United States Patent Application Publication US 2014/0057251 A1 - sequence listing, part 108

SEQ ID NO: 195204 - DNA, 1860 bp, Cannabis indica
ttttcagatcaaacaaaaaaaaaatctttcactctgtaaccatttcgaattttgttcactctctctgttggtttttctgttgcaaaacccatggcggtgaacaggtctccttcgccagtctcaggcagagcaaacccaaatgcaagaagttctgaaatgggaaaccccatgagaagaagcttcacagggaaccccttcagcactaaaccctccattgttcccaatccaagagttctcaacccgaatactccggctaatagtccttcagaccatcctagaagaagctcaataggtggcggcgatgttgatgatgataaagaaaacgctaaattggcggctagagttcgttctccaatggcgtcggcttcaaagggaactaaaaacttcatgtcaccaacgatttcggctgcttcaaagttcagtactccttctccaaggaagaggaagattttggaagagagaaatgaagtggttcggggttctcttgatttgaaaggagaaaagactcaatctttaccaaagaaggtaacttttaaggaaccccttgagtgtttttctgacaatgtggttattgaagaggctgaccttgttaatcttgacccttcttttaagattagtcctccttgttcttattcaattcctgtcatagctcctaatttagattcatcagatcatgatcctcccttggcaccaccaccacccccatatgatcctaaaaccaattttctttctccaaggcctcgctttcttcgttacaagcccagccctcgagtcgaactctttcttaacaacatcacaagtgaagggaatgcactctttgacactgatgatatcagtacagaggaagaggaaactcagtctgatgattattcccaaaaggatttggaagaaaaagaagaaggggttattgtttctcagccagttcttatcgatgtgcttgctcgggagaaggaggaggagaaggaagaagagctcattgtttctgagccaattctttctgaggagaaggaggagactgttgaagaggaaaaagaagaagagctcattgtttttgagccaattcctattgatggcactaagtcacattcttcaatttggagatcaaagttgacatctttgcttattgttttgtcatttgtttgtctagctatctcaatttcgatttcacctgtcactgatgaaactgtgtttgatagctcatctctattgaagcagtatgattatcatggtggtgatgtgatggcatttgctaaagcaagatttgacgaattagctagagatttcggtgtttggtatgcagacaccgtgtctgtctttttcgagttgttgctctctaaccttagaggaggaggaggagtacacaaactaggccctttacagtattacaacttgagttctctagttgaggatgcaagttgtggtggtgataatagctatgaaatgaatgtgtttgttccctcaagaggagtgacagaggttgttggtattattgcacctttggaagacaatggaaaagtgtctcaacttcctgaaggtgaagatgaatctgagtctgagtttgagtctgttgtagcagaagaagaagacttcacaaatgaaagccttgaaaatgagattgagattgagtctttctcagaagagtttacaaatgaaacgccagaaattgttggtgaatcttcactgaaaaatgagaatgaaatcgcaccagaaactattgatgctttttcaatccagatgggaatgaaaatggtctctccaaagtgaatgaagaaatcccagagcagcaactgttgatgatgatgatgcttcacaatccaagatgtgaaaagttcacagtaacaatggcatgtgtgctatctt

SEQ ID NO: 195205 - DNA, 1541 bp, Cannabis indica
ttttggattacaagatccttaagcaattgaacagtccgagggttcccaagcccacgacaattataactaaggacactcataattcgtggtgggcctggacaccagaacccaccaaaagcccattttttgagagagtaacattattggaagacataatcaactcagcctccataacatcattcggcccattatcgattatttctacatcattcggctcactatccataaacaccacatcattcggcctcctccttttatggtccgaattctcactattggccaataataaattaatctttggaacattcaatgaattctgatcaatattctcaataaatgaattactattaaaagaatgagaaaatagtggagcttgattacctcccataatattaggagaaataggctgggattttgaattgccgtgattccctccatcaactaaaaaaggcaacttctctttgcctctgttagtcacaccagtagctggcacaggttggtcgtcggggttgaacgcagcagccagttctcttggcccaaaggtttgctcatccgcctccgtaccagtacgcaaatattgagaatgaagcagatagtttttccgacgagtttgagccctcaaccattccccatattgcttgacaatggcctcgtccggtgtatcaaacagtttatgatcgaaattttcagtgtggccaataatgccacagatgtaccaaaagctacaaagaaactcgtatttaaacggcgcccaaaaccagtccccaccaacctttttaagtttcattctccttttgatcggttgatcaatattgattctcacccgaacacgcaaaaaatcacgccataatccgttattgttcttcggatcaaactcaacaaattctccaattaccttagccgcttccttcaccactctctccgtcatgaatcctgaagttaagccatgaatctgcacccacatatccaatttattcagagggacagatttcggatcccctccttgcgacactcttccaaacagaaaaaggagtcggttgaaagtcaacgggcttccattgataacccgtttaatatctatttcatgacagaattgaaatagataaagatttggccccaattctttgacaaacagtcctttaccaggcttccacaaccctgccaaagtatgtcgcatagcgtcgaagtccactgatctagcgttcaaaaaccttcctaccaaacaaaaccgatcatcaaaaatcaccccctcctccgagtcaagagcatcaatttccacaccctcctcttccccttcgagatcaatgcaagcatatcgctcttccacttcctccagaagtctgctactagaagccattacacagaccaaacgagactcaaagtaatacagttccaacttaatcaccaaccaaaaataagaaaacccagaaaatgacaaagaagaactttagagagaaaaaacaaaaacacatgccatatggcaagacttatactttaattcaaatatctgtactgattagtcatacacaaaacaaaatact

SEQ ID NO: 195206 - DNA, 1605 bp, Cannabis indica
aaaaaatataaataaaatagaaggagaaaaggtagacacgtgtattgcacgtgcaatcctcacatgttatacataaatattattattattctcttggatgaatatcggtattcactagctacagaaagctaactgcagacataggccaaagaaaaagccaaaaatggctattgggttttcatttcaatggctttttcttctctgtttagtctcctctgttccattctcactctcaagaataacacccagatttccatcttcacttattagcccagaaaaagtttcagtctcaaccacaacaaagctctacaaaaccagttacttcactcaaacactagaccatttcaatttccttccccaaagttatcagacttttcaacaaaggtatctaataaacgacaccttctggggtggagccaaaaccaaagctccaatctttgtctacacgggtaatgaaggagaaatagaatggtttgctcaaaacactggatttatgttcgaaacagctccccatttcaaagcccttctagtttttctcgaggtgagttaaaaattagctcactacaagttttgttaaatctcaaatgttttcttaataaattggatggaatatgtttatattttagcatcggttttatgggaaatccataccatttgggggtgacaaggaagtggcttacagcaacacaagcacacttggttaccttagctccacgcaggctctggcggattatgccactttgatcatagatttgaagaacaatatatccgcggtggactctccggtcgtcgtctttggaggttcctatggtggaagtaggttttcttcttcttcttttattaacactatttttaaaaggtggattttggtttgaaaaaaaaaaaaaaattgtaaaaataatgtgttgaggataaaaaaacaatcatttttcattggtattaaattttttgttgaatcatatttaaatcaatacaatttttctttcaaacaagctatatggttaactatgagtattggaaataaatgcagaggttgtttattgttttgactttggagattttgttgtttttcaatatatatggttaaccaatatgttaatatatatatatataaatatacagtgctggcagcatggtttagattgaagtatccgcacgttgcgattggagctttggcatcttcctctcccatcctgggttttgagaatttaacatctccatatagtttcaacaatattgtcactcaagactttaaggtatctaaattctctttctctctcttatacaagacattattaaagatcagatttaggattaattatttattttaaatcggcggcatctttacacacagataacaacattatatatatatgtccatatataaaattattattcattgaaagtgaaaaggtcaaaaacaaccccatgatgtagaaagatagaaataatgtgtggatgagtgtatatatatatatgtagtaatagtaattgtaatagaatagcaaaagataaaatcttttttttaaaaaacaaacttaattaatttttaaaataatgttttaaatatatcatttatatatatataaatagaatattatcata

SEQ ID NO: 195207 - DNA, 1106 bp, Cannabis indica
ctgcaaattactcatgaatagataaaaagggttttaagtgctacatgttattttcagataatgtgtcatcgcattaatattactcaccatcgaaagaccaaaagtaaaaacaaagctgtttcccctcaaccatttccttttaacagtcaaattacagtaattaaatatgattaagatttttattttcatcacttaatgctgacatgaaccatgaagacagtatctttctgtctaaaatttgaagatatcaaaagaaagaaaagcatcaaacaaacaaatagccccaaaataaaggtccatcgccccttgctgcaatgaaatagaaaacatatcaatacaaataataataataatgagaatagaaaaagaaaaactatcaagtataattataagatccatacatgatagaatcactagtaccaaaaatctaggatcgaatgcagttgttcgctagtacaacaattaaggtttcagatctttgaaatgctactcctctcttaaaaaaacaaaaattgcaacacaaaacataattttttttttttttttggatgactaacacaaaacaaaattaactgtaaaaaggttcaataagagtcatattacacataatagcaattgtatttgggtcaatcaggcacgcacaacaagagtagtaaacatgcctacgccaacaccacaagacataaatgtgtctaacacatcatgacatgagcacaggcaaagacatgataggtaggacaagaccagactttccaggaaagatgaaaaaatagaattctcttttttatttcaagagaaaagaataatacaaattgttttattctcctgcttttgatgtattggccagagaggcttctgatgaaagttgtttaagcggctagacctccttagagtttacacaaggtaagtgaacaagatgacattacaagtggttgctactaaagatatggtttttctaaaaactaaattccagaggaacaataattaaacacgagaaaatgaagctcaaagggaaaatgcaaaaatagcagccatatgcctttttgtgtgtgcagtggccagggataaggatcaaaagcttataacttcttcttgagttgagctta

SEQ ID NO: 195208 - DNA, 1041 bp, Cannabis indica
gtcgtttttacgtagttatttttagaaaaaccgttaaaaaatagtaaaaaaaaatattactttaaacgtaaaatgtaaaaattttcaaaaaatagtaccttatataattattctataaaatataacctatccgctggttgggccgttaattggtccaaaactgaaaaagataaattaaaaatgaaaatagtaaggtattttgaaaaataaaatactgatgaattagttgatatcaatgagaattagagatatctctctaacttcatacatgttacaatttttcttttcacagagaataatagaagcgaaatatcaaagttagaaggacaaaaaccaccaccaacaccatcaccatcaccatcgataccaaatccatttcctctcccgaagaagattggaaatattataaaaagaacactggagccaatgatgtcgcctcaacacttatcactacttttaaatagtctatccataaaaaatgaagatgataaccaattcatcgaagaagaggttggtagtactattgttgataggccaatgcctccatcgccaccaccaccaaaaccaaaaccatttccgactcttccaaaggaggttggaaatatcataagaagaacaccgaaagccaatgatgccgccgccacacccattaagtctaaaaatgaattaagatgcaatgcctccatcgccaccatcaccaaaaccaaatccaaatttaatattattggcattttagtcaagggcaagtgaattatgaaattcatgaagatgacgtggaccaatcacatcaaaactattatatatattataatttatgtgagtgagtgaaaaaaaataaacaattcattaataatttgtgtttgtcgtgtcatgtgtgtttacatatttttatgctttaaaacttattatcctttccaagtaataattgattttaataatatacataaacttgagaaaaataatgtatgtggtgtttatatcatgggtttttattttatatatttaagtgtaatgattcttaattacattttaaattaagac

SEQ ID NO: 195209 - DNA, 1648 bp, Cannabis indica
atgatatgctaatagcaagcaaggataagggagaaataaacaagatcaaaaagctattaagtagagaatttgacatgaaagacttgggggctaccaagaaaattaattctaggaattgagatcaacaggaatagagaacaaagatctctaaagctatctcagcatagctacattgccaagatcctcaagaaattcaatttccttgactgcaaaccaataagcacagctcttggccagcaattcagactcaatagctcccaatctccctgcacagatgaagataccaggtacatggaaactataccatattctaatgtggtaggtagcataatgtatcttatggtatgctccagaacatatctcagccatgcaataagtgttgtcagcaggtaaatgagaaatctaggcacagagcattggaatgttgtgaagtggttattaaggtatttaagtggtacaagatatacaggcctaatctatggtccaaacacaactaacactcagatagaagggtttgtggactcagattatcctagagatttagactcaagaatgtcacatcacgttttgtgtttagaatgtacaacagcacaatcagttagaaggcaaatctacaaactgtagtaactctttcaacaacagaggcataatatattgcctggactgaggttgttaaagaagcactctggctcaagggaatcactagagaacttggtgctgaccaaaggactgttgtcatccactatgatagttagagtgcactccatctcagcaaaaatcaggtatttcatgagaggaccaaacacatagatgtgaggtatcatttcattctggacgcaatagctaaaggaaagtcaagttccagaaaatttcaacacatgaaaacccctctgatatgctcaccaagccacttccaatagcaaatttatttattgtttagacttactacaaatcacagcttagcatactgtttctgtgatctactttttcttttgtaagtctttgttttgagtgtttttcattcttgtacattaggttcctaggtgaagatttgtaatactgttagttccctaatgtacacgtattagttaaagttaggtgcagttcggtaaattagttatgtcaattaactcctagctagtcctaagatctatattatattagtacctaattgcctactgcattatatgctgtaataacacacactcatatgatacaatactgatttcttttactgtaactaatcgaacctagtgttctatggccaatcggctaatgtccatgtgagctgatcatgagtatttgagtgagatcaaagggagacttcgcataacagatatattttttgatttgtatattcaatctgtgccattagatactgatcatcattctctctcacatcatatcaatggcgttgtcaataatgtcttcttacgcatcttttcgtccctttaaaccctcctcatcactttcgagttctcaaaacataattagaaattttgacgagaactccaaatatcatatcaggagtaacggtgatctcacaccacaaaaggtatcaatattaatagtagccacgatgatcataatactttgttagtatccttacagaagtataaacctttctctaataacaatatatatatat

SEQ ID NO: 195210 - DNA, 1029 bp, Cannabis indica
tctggtccgaccttgacaccatctctgaactttttggcctcgacagtaactacttcaatggcagcagcactgaaccacaacaacactccaacaacctgtttcatcacgtgactacatctcaaaatcctaaacgacccaccaccaaaggtactacttttccttttctttcttgttattatcaaacttttcatttttagagtatattttaatggttttggtttgtgggtattttgattccatagtggtaataaagaaagataataaagctgagaagttaaataatcgagttaaagaagaagacgatgaaggtgataacaatagtagcagtagtagtactaagacgaagagtaggcgagctcgaaaaaatgtgtacagaggaataagacagaggccatgggggaaatgggccgctgaaattcgggacccacacaaaggttctcgagtctggctcggtacatataatacagctgaacaagccgccagagcttacgatgaagccgctaaacgaattcgtggcgataaggctaagctcaatttcgccgccgaacaacaaccggcttcggatacgccgccgttgaagaagcagtgtgttgtttctgcagagatgatgatgagtactgatcagccccaaacgacgtcgtacgcgagtactgcttttgcaccgatgtttgagaacgaattactagcggatgggttttattgtaaagatgaggaagcggttatagagccgagcgagattgagctggatgagcaaattttgagcctggaatcgctactgggtatggaattagctgacgtggcggctgagccgagccagatgatgagtggaagcggtactactagtcaggaggtggtggaagaggagggagccgagtcggttatgagtttgtggatgttagacgacgtcgtaacgcatcagcaacaccgccaccaaagaatcttatataattaggatttgagaaacataataatattatcaataattattattattatgtcaaaaatgacgtaatatttgcggtcgttgcg

SEQ ID NO: 195211 - DNA, 1498 bp, Cannabis indica
gccataggagatccatcactatttactttgatcactgtaatcaggatcaatattccaaatgatcgattgagtaaactaaaatctaaaataatggatttctgtaattttctaaacctatctatatatattagttacaatggttttcatttgtgtatatgttatgtgtacagtatatatttacaatgaaataaataagaagagtaagatgcaaatttattaactagtgattcagccctgttgggatgttgttttagtagtttagttgttttaaatatgcgtctatcatgtttaacttagaaacatatattaattattaatgtaataaatagactttttctaaaacagaagattaggtaattgcaatgataatacgcggttgatagtacttatgttgaggaggacctttttttgtgataagtgaggagaggaccttttagtagtgagaaaaataaggaaattattattcttttaataactcactactataatatgacttttagaggctgtttttttttataagttaatgcatacttcttttttatatccatcaatcaaaaatactctcatattatattttattaatatttacctacttttataagtgagttgtctaatatacccttgtcctccccttaagtgtagcacatgatttacattatcttaaagggtataatgaggacattatctataaaatagaagtacatattaaagaatatgaaaatgaaggtaaaaattataacaaataaaataaagtggacatacaatacaattttctccagtttttcaacccaatttattagaaggaaagctaaagggtgtgaaaatacccgcctagttcgaaattgacatttagaggtggtttttttaataaaaaccgttggtatagaaattaataaaactaaagtcgtcggttggggattgaaaatcttcctgcagtatatataatacatacaacgttggttattatggaaataatcgatgtcataggagggcgcctgtcaataaaccgtgcactttggcgtcagttatttcctaatatggttatttcctaataactgacgccgtatgtattatatatacgagcagcagtgtcttcgtctttcccacttcacctccttcttcagcaagaacagcccagaaaacccattagaaaccctcgccaaccaccgtggaaaacccccattctcccttatttctttaccatttcacccatttttttaaaaaaatacttctattttcaatatctaatcctatacactaaaaaagtattgttttttcacccatttttactgtacttgaccctattaaaataaaaggttgtggtataacttcgtccaccgattttagaggagaaaatattgaatctcaacatccattgaggtgtaaatatgaattctattcattttattaatgtacattgctatatttttgtttttgtatatatttttttttgagatttttccatttattaataatatgttgtgtgtgtgctataggt

SEQ ID NO: 195212 - DNA, 1481 bp, Cannabis indica
gttttcgtgttattttttggaaaaccgtaaaatgtaaaaagaatattctttgaacgtaaaaatagtaaatattttacaaaaatggtgccttatgtaattattccaatttttatttaaaacacaacttaaaaatttacataaaactaataaaaaaaaggggataagttgaaaaataccacttttattaatcaattaataaaatttacctgtattttcatatttagttgaaacatacctctttttatatgtattgtacccaaaataccctgacataagagattcacatggagagtatgttgaagtaacagggacaaaattggtacaatatttaaaaaaagaggcaaaaatgatggactttaaaaaagaggataaaaataaaagagcacaatataaaaagagtatagagtataatttccttttaaaaaaaatatagatatttttgtaagatcccaaaaaaaccaaaatatacaagggagaaaccctatagcattaacgagtctgcacgcatggttagagcccattttaaaaagccctaaattttagaaaaatgccatttttatatacaaagaccacagagtttttaaaaataccatttttataaatattgctgacaacagaaacagttgtataattgttcaacaccaaagaaatggtaataacatacctccacgtaatatttttacagtgtaggctgactttgaatcagatttaactaaatttattttaggtggtatgtttgattttgatagcaattaataagtgtttctaaattctaagagtttgagtgaaataggaggcatgacctctctatttatagacttgtggaatttagtgaaaatgtcatattcttatttgaaatacgaaaactataaatctgtatctttgaatattttctttaatttttaagtatttatgaaaatattcattaattgttcacatatcttgttaattttatgtgtatatacacttgcgtataggtctttgactaattacttcttaatttctttaatataattatgcatgcatgcatgtgctctcttccccatgactatatattattaataacattcttttaattgacttaattattaactacttaattatatatgtatgtaatcgttaattaagaaaagaaagacaactaaaggaagaaagtagcttttcatgcatctctattatatatatgcagcttttacatgttgagaacgatatatcgagttttaagggtaatgactaatgatgaggggtataatggtcatatatattgttacaatatgtataatgtaattgtaagttatattatgtgtagtcaaaaaaagaagcaaaagaagaatcataagtttatgtatatttggaacaagaagaaattaataatatattgtgttgtatttttatagttgcattattatttatttgcacaattagcaacttcatctgtatcatactaatattaatttaattaagttataaattttttataa

SEQ ID NO: 195213 - DNA, 784 bp, Cannabis indica
aaaaaaaaaaaaaaactcttaaaggtttaaaataaataaagaactaccttgctgacaggtttaagtttcagacaaggactgtcagtatgagccccaattatgtaaaatccgttccccgcaacatacctgggcataaactcagaaatcttaacaaacagtttcaaagaaaatatcaaatgcctatacgaattgttttacaaaatccctttcaattgctcacattctgttttccctttgagaaaaccaaatgaaagatgccaatataaaatacttcaagcataatttgaacattcaagcaagtatttctcaacagctaaaatccataaaaatgaaaattttgattatatactcttcttaaattgtataacaaccacatcttacaaatggacaaaataaaactcgaaaagaagttcttactttttaccaatggcgaaggctactatagtggagtgatttctagtaaagaaatacttcttccctgcttcaagtttccaatcttctttctccgaaatttgctcgtaccctgcacttctcaaactctttttcgcctcgtctgagattattcgattcacacaactcagtcaattgcaatatcaatacatattcgaccaataaacttaagctaaataagtacaaatataatcaataagaaaactttactgattgacaaatctagttattgggagggaaataaagtatcctaattttcttggaaatcaaacgaaatgtgaagttggaaagaaaggaagtaagagaaataccaacagcatggaaagcagtgggg

SEQ ID NO: 195214 - DNA, 1329 bp, Cannabis indica
ccctagaagcactgttccactgttcaggaacaaaatattattataaaattattcaaaaattatatatatatatgattttaatataaaattttatatgttatccctcaagatcgatttttgatctcttttgttatggtatctaatgagatattttgaaaaatgatcaagttttagtggaataataaacaacataaattaatgtaagaaaaagataaaattatattaagcattgcataacacatttttgtataaactttcaaagaaagcaacgagtagaatataccaaaaaaattcatttgagttcatatggtatctacaaagtctttcaatcctttaggataggataccaagtcataagattcagtaaacttttgtcctccacgatctttttgaatccatcaatacctcaattcgtacccccaactattttgcacaatccaattgtagacatgtattctccactagcttgttctctgtttatcgttctcttagagtttttgtgaaatactacggcctattcgtcttctcccaccttcaataatgcatgctttctaagaagttattgataaaaaaaaactaacacattcaaaacagaacaacacgtacttgaacatgatgataccgccgatgaaggtgacccatagagcggcaccccaaacggtggagaagcaaaaaagattagccaatttgatataggtgaagatttttggtgaatggtgaccgtcgaacttggatctaaagctctctggtgagaatatcactccgacaactaagaaggtcaccgcagtgaggaatcaagataaccaacccaacaagattaaccctttgttaggaaagaaaattgggaagaaggaaaataaaaggagtatgaagaattgaaagagtagggacccaatttgttaagaaaaaaaggttttgactctgtttttaatttttaatttgacttttatttttattattaactaggcaatataggtgagtactttttttaagtattataataaaaataattatttattaatataataaataataaattataaaattaattataatatataataatattaaaattatattattgttatgaaatactatatatatatattcaatctaatattttttttatgatattgttataaaattattcaaaactattctatattttgtgcttcaaatttatataaaaagtttatatggttcctctaataataactactcgaaaagttgttgacatgctaccgtctttattttttgtgtaaaacactatgacctatgtgtcttctctcatttttcaaagaatgcatgcttttctaaaaaagtatttga

SEQ ID NO: 195215 - DNA, 1171 bp, Cannabis indica
taaagtaggaaaagaaataattctttggcaattgcaatgagtggacgacataagatatccttggaatcctccaagaacttggactttcttttgtaataacttattgcaaaagtaattactaaggcaaaccttggcagcaacgtaagtttcatgattgtgcccaaaagcaaaatcaataccaataccagaattacaagttaatatatatataaaaaaaagggtgataattaacacaaccataaaacctataaaattgtctaggtgagctaacttgggtgtgaacaagccatctcacacccaacatgatgcgataaagtagttgttaaatccaaattaatgttaaaaagacatgaattggaataatttgatgtaaaagcatttcaattctccactcaataacagaaaatagaaaaacagttcataccatgctccttgtagctataagttaatcaactggtttataatgccttaaaaacaaacagcaaggccgaaaatgcactataaaatctcatctagctgtagtcatttatgaaaaatgattagaaaattttaagcaaaatctgcaaaatgtcaaatgggcatcaagagtggggaggggaacttaaggggttcttctctcagttagttcctggacttctttttcttggacttggatttcggttggtctgatgttgaggcggctgcttttgaggtagttgcttgatttgattttgaattggaagcgctggacgcggcaccggaagaaccaccttcatttttatctctagttacagcaccctgagaacctcttatctgagctgctctcttatcctttctcttcggtctgtagcttgacctctctctcttaggaagccacctttcaggatctggaggaggtcctggatttgcagggtcaaaccctttaggatactttggctttctctttctctttttctttgccttagctttcttcgcctcctcaaatgcatcagtggccttgtcatgggaagcaatctcaacatgtttagccccagatgtcttttccaaattatccacattgactcccttcaatcctggtaatggtttaagctttttctcataagcttctgctttgctaacatccacacgagcaacagtacttaccagcccaaccaatgcttcaacacttccatggcttttcacaagctcctca

SEQ ID NO: 195216 - DNA, 853 bp, Cannabis indica
atgattgacgattgtggaaataaaatgaacttaggatacatatgggcccaactattgaagataatttcttttggttgaaaacaacccataataaaaaaaaaaaaaaagtaaaatatgaaaatttaattaacctagaaaagataaaagtacttaactagtatatttagaaagtgcaaggttatggaagacttgacattttataattggttagtaattttttataaagtgaaacttaatataaaattgcaccaataaatatattacaccacaaaaaatactaaaagtgattcagatatactttgtcacatgtattataaaaaattgctttgggtgtatctagtagtcatatgggtggcgcccaattttttcattttaacgtccttttaaaagtttccttatagaataaatcaaattaaacaattattgctaaacatttttttttgcggcgtttctttaatttatagtgggctttttcttattttctaacctaaaaagtgctacatatatctttctttccacaatatctgttgctaagaaaatgcggactcaataagttgaactttttacaaaaccccaacgggtaataaatataattgtattaaaatgcatgtgtcaaaattaatcgtaagtatatagaggggcggtctagtggtagaatttgggataaattgaatgaggttctatcttaaaatcaattgataatgagatgagtagtctattcatcttatatctgacaatttatttccacacataaataataatgtgggagtaaactctaatacacttttttaacgtttgggcctagttagtgtggatacaacaaacgactaataagagaccacaggaccgaacg

SEQ ID NO: 195217 - DNA, 1044 bp, Cannabis indica
attggttatattaattttggttttatgtttgtaatactgtaggtgaaatttcctatatatttgaagggcttgccaggctctatgtgtacagtattgagaataagagtatcaagatgatgggacccttttaaggaatgaaattagaggtaataatatcaaaatcctattttcaataattttgtagtatttgaaatccacattttccttgtgtgttctcaaattgcatgcatataaagtaacgatgatgaatccaacctgtctttaatgattcttcttcttctgcctcacatttccttaatttgctcgagctttttattgcattgtgtacatactgtgagtattttggcaattcctcatctgggcatgtcgaaaggataccactttcacccctcttttgagttcaattttccttcttttttctagattctcttcctctctcttcttcccctctttcatatagctttttttttttcactggccacaacatctgattttacaagattcctttgtggttttacttttgtatgttttttatgcctcagcatgacgagtttttcaactatcataatgatcacatgtctagggtatatttcttttccaaaaattcaattttgagattttggtttcagtcacaccttactttacttcttcattgaaagtaaaacatttcaagttgaaaattccaagccctgtagaccttgatttgtgtgatacttcttattctttgttttgttctttttccccctctctctgtctttttttttttggatgaagcatacttgatcctaaaacaatacatacacagattctggttccttttttccccaggaatcattttaaaagggcaaaaacaagacctgtgcaatagttttgatagaaacaaaacacaatctgaaaaaaatgaagttcatgaaaattgggaccaggcctgacactttctacacagaagaagctgtaaggtatgtattgttatcttctaaaagatccaaataagaaaatctgtcattaaattatgccattactgaccttgttatatggtattat

SEQ ID NO: 195218 - DNA, 1331 bp, Cannabis indica
taattaattaaaatattttttttcgactgtcctgcctaacttctatttcaatgtgtgtccgtataataataagaaaaaagagagatctaaacatttattatttatatatataatattaatgtattctttatataattaatatataataataaataaataaatatatatatttattatatggtatgacccaggctgttcatgttggggtctaataagaccaagacaaaaaactccatgaatgaaactctgaaacaacctttttttttcttcgacaaatccagaaaatcacaacctgtatatatatatatatatttatatatatttatatatatacatgaataatattatgaacaaaacttccaatagccaagaaattattagtaataactcaaatacaattaaaataatattattattattattcatgaccaaattaaacaattaattattagctttacaaaatattgagataatattatcaataaatcattatcagctcaaaatgcttaaaaatctatatattgaaaaaaaaaaaaacatgaattaaaatttataattacagggatgtaacattttcttattgataaatcccaaagtttcaatttgtttttaattttaaattttctcattctaataattctaataataaaaaataaaaaataaaaacttttaattatgcttccaagaaaccagtcattctaagaatagaatttctaacatgactcaaatctctccccttaagagttcttccattgcccgaacaaaccgaaaaagccatctttccaccggttaaccgcctcctgacgatgacatgaggcggtaccagttcttcattttcatcataatcataatcataatcataattatcatcatcgaaattattccaaatttcgtgatttaaatgatcattaatatttcgaaacaaattcgcctcttcccttggaatattcataggcatcgaatttgccctaattttattacctttcttgttcttgctcttgttcttgcttctcatcatcattaaatgattagtattaatattattattattaatactaaacatttcttgatgatgatgatgatgatcttcttcatagaaaataacctcggattcttcaaattcttcacccattgtaatgttaaagttaaaattaatattagacataaaatttagaagaatatatatagatgaatagaacagtagtagagtttgagatttattatatagagagaaagaagtgaccaatagaaaggtaaagaagaaattataagtatttatagagagaatctaaatcgtagttagtacacttttcattattattttttatttt

SEQ ID NO: 195219 - DNA, 743 bp, Cannabis indica
tatatattataagtatgaaaatatagctaagactttctttcgaaaagagataaagtgaaaaagttttgattatttatttgattaataatcactcaaagcatctgtccccaaaattattggtgaaaaatattatttttttcttaaaaagttagttagcttagcttcatatgatgacataattaatgtacaaagatttcttaaactcaaagagaactatctgttatcattgctctatcttcttgtcttcttcttttatagttggtcatatgcttgtcgatacacatcacatataactaatcctaattaagtggcaaattgttctagagaaaattacattagccaaggacaactaattatattaattttcttataataataaatctaattactatatatgcatgcaactactttctttaaacaagatatatttttaagaaacaaattatatcataatttaatttaaaactaactcgaaataaacacgtttatatttttctaaataaatttgagttattttctagattgacggcacatttataactcaaaaattacactacaagtttatatttattatatgttacttattatatgtaattatttaaataagtcattataaatatataatttaattcatataaatatatatgccataaaagaactataaatatactaaacttgtcataaacaatttacttaatcaataagtacttgattaaaattaaatagaataatttgcggcataa

SEQ ID NO: 195220 - DNA, 1833 bp, Cannabis indica
taacatgtgtcacaatttaattaagtcacatcacaaataattatgagacggggttcaattaggtagtgacacaagtattttagtcattatttaatggaagctcacacacaaaaacatataaaattatagttttagtaatttgaagtagttttgcgactaaaaaaaattattggatctttattaattacaaaagtaaaattttaagatgttatgacgcaactaatttaagatagactagaatcaattttgcatgtaaaaaagcaattagaaaaaagtaaaaaggaaaaatcactatcatttttctctcttataattcattcaacttcacaagaaaaaaaaaacttaacatggtgaatttcctcaagtaaaaattaaagcttggataagcatacttccaataaattactagtgatactgtatagagctatgatttaggaagaagttattagaagggggttagagggtcttaaatgatttaataattagtgatatgatactagataaatatgtggttgaggcaagcaaaattattaagagagaggtttgatataataactatacataaataaatgctttattggttgtggctggtggggtatgagacgttattttgaaccttttttgactttatactcgagtggacaaagtagcttgtaatatttcaaaatggagacatctgaatttcgcattaatgaattggttgtaattggtatttatgtgagtcaaaacagaggatgagcactttttataagagagaaaaataatataattagtaattaacagggattaattgaccttttattttgcagaaggacctttttttcttagggtttgcagaaggaaattattatgatggaaaataatataattttttttttttatgaaaaggaaacttgataagaaatttattttttatactttttatatacataaatataattattttaaatttcataaaattatatataataatattattagtaaatcacaatggtaggagaaccttccttttctctttgatggtgcatccagtagggcattgtgggatctgcttgatgatatgtgctacacacaccccggccaaagttgaatggggggacttattttttctttttatattatgggtaaactagaaattgggctcgctttgtaattttaaaatttttaaatgggcaatttgcggccaaattcctttaattttgaaatttggcacgaattaactcctagactaaaaaaatcagagctaaactcctcaatctgcataatcgttttgatttgtacttcttccgtctacttatttagtctgttaataagagccaaagtagacttctatttagggtcggccctagactaaggcgggctaggcccgcgcttagggcccacttattttaggggtccaaataaaaaaataacttttaaaaaatatacatatttttttataatttttaaaaatacaatttattttatagcaagggcctaaaatttttttgcctatagtccatttcaacttaattaagttaaaaattttatatattatttaacttaattattatccgtatttttgattagggaaacgtgaagtcttcataataattacagcttaaatacctaaggcccaacaacaggcccaattaagataactggattggatctttaaattatcagtccgttcgaatgacaaatgagcaactcctctagacgagaatattccatttagcatagatagcgttcggaaaacataaaatcgcgtagccagaggaagcttttagcatgtatttgaaagctcagtatagtttcccatttactgccaaatcgcacaagacactactacaa

SEQ ID NO: 195221 - DNA, 2790 bp, Cannabis indica
tgctaaagggatcgtgcctagcaccatctaatcatctattattataatttaaccactcaatactaaaatattacattattattattagatattatctttctgtcttttcttaaaaaaaaaatatatatatattaataacatttgagagatgcaatcatagactttcaactccttttagtttgatcattaatgattgtaagcattttgtatttattttttgtgaaactatttgcaaacaaagttgctcacagtatgttttgttattaatttacaacttacatttgttatctcaattgctctgtttcatctttgaagattgatagcattttctaacagaaatataataaattactttttattatcatttttcaccatgtcaactgaatcattgatgctccaaattcaagttacatatcaatctaattttcaatgtaatcaaaataatcagatgtaaacaaatattttcactctatttgatgcctgttttcctattcaaggttgatacttgatcctgattatgtaggttctgaaggaactttactgagcagccataccagcatgacaccaacaagagcaccagatagatgagcaatgtgattgatgctactcatggaagagcctccgcgaaacgcacccgatattgccgtagaagcttgggctgcatccataacctatcaagttcaacaagttcaattcaattgaaaatcttttgtctaggcagaatccttttaccaaaagttgctttcttttatgttgctcatactttcccagaagcaaaccaaataaaagatcataagttaggtcaaatgttctgtaatggaagccatataggctagacatgaagatacatatagtggcaagtttcaaagtatccattttaagagtcatgtcaaatgtggtatttagccttttaaattgttcgattccagataaatagcaaggcaatgtagcctaaataatgtctaggctgtaatagatggcaaattatcatgaagattgacagttatctgtagctatttgttgtaagaaaaccagtctcaccacagctaaaggattaccaccaacatgtgattcatgaaaatagtattatcatggatcaatatgccaaagtaatattgttttgcccaacccaagttatcattagaatatctaaaaaccactaccgatatctctttcttatataagtccatatcatttgctgtagtagtctgtaagagataaaggaaggaagtactcaccttctctacaacaaattggcctaatataagcacttcaaggatcttcctccagtcccaagacatctacaataaccgaactagattaataacttctcttgtgtgaagaggtttacataataatctacaccatggaatacctttacaaggacactgatagtgaataagccaaaaacagcccccgaggctccaattgaaactgcattccgtggaagaataagccatgaaacaatgtttgctccaaccccggtaagaatataagaaagccacaatgcaaaatttccttcctcttcttcaacaagctttcctgtaggtggaagagtgtaacattaataccaattattgtcaattaaaaacataaataaataaatcagtaactagagagaagaatgagatcctcaccaaaaatatacaagaagaagaggttgctagaaagatggttcctgaaaatgattacagaaacaaagttaaaacccaaagttgggaaactatgtacaaaataaggggtgttctgcaccacaaggtaactaaaatgaacttttatccaaccttaaagaacataggtatcttaccaactaccatgacagaaggttgctgtgagaaactggtaccactcaggaaaactatgataaagatacagacttttcattgcaggaacctaacagaaaatgcagaaattattgtatcaacatgacagcccttatataaaaataaaaatacaataatagaagatgagtaactaaacatgtatcatgcacaaatctcatttacagacattgtttccatttggcccaaagagtaagacatcatcctctaattctaccaatatctatccccctttgaaccaattatgatttctagggcttttctctttttgtttcagctcaggaaagagataaggtgagggtaaggcgggcaggttgtgaagcccttccctcattatccatctcatctactgaaaagggggccgggcatagcgcattcttttctgggatacataggctattacaaacgcatcattaaagattttgcaaagcacaaaaccccagaatgaaatcattgcagaataaaggtataacagttcaagccctttcctcattatccaaactttcatgttgtccaatgaacatgataaacagttgaatcaaactatcaccatcatcataaattaatgactaccttaaacacatgatcagcagcatacactcccaaattcagaagtaaaatccaaaatattccattcactcgtttatgtggtttccttctgtcttcaggtttcccaagctccagttgtgacataatatctaaaaccatatctcattaattttacaattacagtcattcttgattgatggaattaaacttatgaacaagacataatcatatgcttatccttaatttctcaaaaaacctcaccacattgaaaacataacatgcacagtaagtgtttgtgaaaagacctagcagtaataataagcggtattcgtttgagattgagatatacatacatatatatatatatatacatatagagtacctgattcgctcatcttgc

SEQ ID NO: 195222 - DNA, 1434 bp, Cannabis indica
gtagcatttgcgggctatccatgaatccctttttgtgcaccctaccccattgatggtaggaaacttcatacagaggtgatatatttatgttactgcctttaatccatacagtgttggtcgaccgatcatgatgttgaaggctaatgacatatcaataatggagaactatgccataaccgtgctattggtagaagccttccctaaagtaagacgaagacaggtgactcctagaggtgaaatgttatggcctgagaaaccacaaataatttgtgcacaaagagctagatccttgaggtggaggcccattttctcataagtagagttgaacattatgtttgatgaggctcctatttctatcatgggtcatgccactgtcatgtttgctatttgtacttcgtcgactagggggttgttatgttggtaattaacatgagtggtgtcttcatcaccaaacaatacaacgatatcatccccatgcaactatttgggagttctttcctctactaccaatacttcttcatttttatcatactagagtgtgcacgcatacctttctcaatcctttcttgtatctccaacaatgtggggtcctccaatagttacttgtaaattcccatccacaggtggtggcattagaaattctggtcattgttttgttagggaacttctttaattttgatttgtcttcatgtatcgattcagatgacgattgtttcttcaaataaggaactcaatttcctccttcaagttgttgcattcattagtatcatgaccaaatctttgtgaaagcggctagaattttgtggtgtccctcttattgatatccttttggatttgagcaacctctcatcatccctatttttggcattggagcaattgaccctggacaagttattgcccttaaccaattggtagccttatagaagctgacttctctgacagttaaacgtggtcatcagatcttaaacattaagctcgtccctgctaagcaaaggaaaggtagtgacatggttaggaaacgttgagtaggggccatctgcaacaaaggaggaatctgggtccactcagtcaataggtttggacgctcaaaatctctgaaactaaaaaagaagaaaaactgaagatggcagtccttgaccttcttttggaagttaaacgggaccgaagtctcattagttggatgaggttgtatggagtagaagccatctttgagtttatctcccttttttggaatagattcaagttcataaaaatataatatttctgccgggctaggggcactccagccccttaaaccataaaaaatgaaaaggcccaataatagacgatagccttggggaatatgttggtaaggagataatcctaagaagaataagaaattaataaaatagttttggagtggtaagatcgccccagacatgaggtgtgtttgac

SEQ ID NO: 195223 - DNA, 1072 bp, Cannabis indica
aatctcaatagttcaggaggaatttttaacggccagagaaattcagagagtgtaatttgacacatgttaaaatttaggaggcaaaaatcttaattaaccaactaaaaaatataataataagaaaacacttttctttagtgactaaaacaaactatctatccaaaatttatacttttttcatatatagtttgaaatttttatgatcaaccacgccaaggtggtatatttcttaacataaaaaattagaaattcattaaaaaaaaagaaataaaagataaagaaaatatgttaatataatgtagattaaggggtcacgcatttcttttctcgatgtagattttatattattcctaaaagagaaatgctaaaagtaccagtggcgcttaacaccttcttatatatcagtatcgttattggtccaactaagtatcggatctcgtatagtttaatataataacttttaaaaattatcgttagccgatcacaacacgacatgtcgagaaggtgctaggcaccagtgcctaataacaatgctcttcctaaaattattttttcttcacaccgatattattactaatcctattcggctattcatataaggacagcgtatcagggttaaataagtaatatctctgtgcttcaattcaagagtcctctgcttataaatatccagttctttattcacaattaccacttcgttcctcaacatgatcttttctctttttctctcatcctcgttttcttcttcttcttcttttttttgaatatatatatatatatattgtaaacaaacaatacacaaattcaaaaaatagaaactgaaaaaaaaaaacacttacatcaaaatggtgactagggatagtagtcgtagcagccgtgaccaaatgtcttgtcggttcattaattttttactagtattggcttcgatatgtgtcattctgatgggcatatctgtttgggtaatctcttccactattgagtccaattaatttgatacaaacagtccctaatctcgctcatcattttagaagtaaactccataattggctctagaatctgatgatgatgatgg

SEQ ID NO: 195224 - DNA, 1721 bp, Cannabis indica
aatactatattcaagtttataaaaatgtggttttttttcaagaaattatttgatgagattttttttaaatgtttaaaaacatggaaagaatagtgtaaagtaactagttaccttaataaagtaattgattacccttaactatttttttcatatatatttttaattttctttaaattttcttataaacaaattttataaaggaaaaaaaaactatattattaaaagccataaaatgtgtaatttttttttttctgaaaatattggcatactagtgtaatttaatataaaataaatttaatttaataaacatgaaaaattataaccacttataatgcaatattaaacatttaaaaaattttaataacaagtagtgtatattgtattttgctgttttatactatcgataacttaattatgactaaattaagattcaaacaacttatttacacatacgtataaaataaactaatttggtatacgcgcatgcaacatactatttgcatcatatttttaacatagtaaattatcacaaaaacttataaaatgtacactatatatatatatctctacataaaagaattttcctatattattattatttgtatagctaaatatttatataattaatgaattaattacctgagagggcaaggagatagtgtctccagattgtttctttttgttctctgtacaaaaataagagtacaatcccataccaaaaatggcaaccaaaattccaagaatgtttctatgagtaaaagggtcatgaagcaatgtgtagccaaagccaagaacaaggcaagttttgagatgacccaaaacttggtatgtcactggtgatgtttttccaatcaccaaaaaagtactgaaattcactgatactgagattatgcaagaaaggattataaaggccaaaacaatgggactgtattggtgagcaaacacattctttttggtcaaaaattggtctaccactggccctgatacaaatagaattgctgcttggaatggtgctgattggtatagcaattgtgttgatgacacattcaatctcttttgaattgtgtttgtaagctgaattttcatcatcatcaagttaagttctacccttttttaattatccatgatagtattaataataaaaatgatttgtgtttgaaagaaattgggtcacttgagacatgtggtactatgtgagtgattagagcgatgcttaacaggtgagtaacatatttttaactactcacgtggtgccatctaactcggaagtactatttaaataacatacattactttaataatttactcacgtgaatttaggatatggtcgacactagattaaagtaggctaggtgctaatatagggcccaaaaacaaaaaaataaataaatatatttttaaataattttaaaaatatcataataatttatgttatttagacccaattaatttagagtcaaccttgcatgaatctatattcttaacaaataataataaacatttgaaaaatgttttctaatgaaattagatatgtatccgaatcaagtgatattacgtaagtgatcagtacctaaaaacatagttttatacaaattttttaatcactcacgtggtgccacctagatcagactatccaattaggaaaaaccacaaaaaatatagctattttaagatgtcactcataatattttgtgcatatttgaaatatatatatatatata

SEQ ID NO: 195225 - DNA, 797 bp, Cannabis indica
tagaaaatcaaatttcccttgtagcctccaacttcgaaagaagaactattgtagtttccccttgactttgatagcgagctgaaggagtcaactttcatcaaatagtgagctggaggaacatatcttatgcaccttgaaaattctacaaaacaataagagaattgctaaaaggtactactggtgactagcatttttctcggtgctataccgttattaatgaaattaaatatcgagtctcatataacttaataaaataatttttaggtaatatcgctatacgaactattggtgcccaataggaatgctaaaacaacaaatatgtagttattatatcattctttaatatgctagttattactttacaataaaaatatataatcagaaataaaataaaacccaattttaattgtgtcaaccaatgttggataatataaaaagacaacttcatatatttaagatatatatattttagggttaaactctcaagttgaacataacaaaacaatcatatacaagtttaaaatcgttttcttagattaatgaaaaaccctaattaaaaaagtatgacacacacaaagaaagaaagaaaactataataattggtaccaagaaaagagattgagttgaataaaaaagaaaaaggaagaaccttgaggttggttggggcaatgcttcatcacttccactgccgttggagacacacccaccattatgaacaaaatgatatggaattcaaaggggatgatatgacggcaaggttacttatattcaaatgtttaaaaattttaaaatttaaa

SEQ ID NO: 195226 - DNA, 893 bp, Cannabis indica
taaaaattattacattaaattatctatatgaaaatcaatacttaattgtacttaggtacaattggacaccattgataccttataaatttctcataaaacattcaaacctgaccccaaccctagatgatggttgcagttggggtcgagtttgtagtaaagatacaaatattatacaatgataagcaaattaattacccccaaattagattaattaacccaaatgttcaaaatgtaaagaaaaagaaatattaattagaaatggaaagagagaaataaagtaaactcaccctaacattgaccttgtggatatcagaaagaggagattcatcgtaagggtttacgactacgtatctacccaaagacatggcattggccttaatatcctccgatacgcacttactggtccccgattgtaggtcgaacctcatcgacacaacccccctcatcctcacacccaccaaaacaaccatcaaaacaacggcggcgccgccccacatggttttttctttgtttctttgtttaatttccggtggtgagtaagtaaatggagaagaagattggatcggaaatatgagatggagatatgagaagattgggttgtttggtctttgcttctaacgttttcccgcgaattaactgcctcttcacatgtatctctccatattactttttttaaaaatttactatttattatttttatgtcaaaatttatagttttcgattcctcaaaaactaaattataattagaactgaatatttttaccggatttgacccgtacttggccaatctgaaaaaataaaaaaaaaattgttctatgtgggcgggtctggttcaacccggtaaatctttcggaagggttgagagttttttatttgggatttttttaagaata

SEQ ID NO: 195227 - DNA, 2982 bp, Cannabis indica
attgactcctttgtaaaaaaaaatgaaaagatgtgtgttctatggattaaaactaaccttttcccccaagaggaagagaaagctcacaagaaccaataggaagttggactttttccctcagcacattcaagtttggcttgtatagccaaacattgccttctcgggccacaagttccttgcatttgaaaagatttggtataggaaaacactcagtaactaaaacaacatgcactggattgtatcctttgtaaaaggcggcaagttcagcaactgcaagttgtaaatgaagtcgtgcaacatctctggaccagttcccctcgtttcgacaaggaagcttaaccgcgatgagatcaagtcgttttcctggattttttagctttggcaaagatggacaaatgggaacatcttcttcttcctcctcatctatccactctggatataatgaatcccacgttacatttctctcagcatagtctaattgcagaacaatgtgaatggcatctggtgtgagctgcttccattgattaagttcactgttgttgaagttcaatagtccaattccctgatattcattcttcagattcaacttcttgacaactatagaaatgtcatcccagtttgtatttatatttgatatatatcttggatctgatccaccccatatccacctcttcacaaaactctctctgcaccattcaaataactaatgggattaaattgcaaactcaacaaaaatatcataaaattacatagtttggaccttataaaaatcacagtaaataaaaatgttactcttaaatacacacataaatatgtgtcaatacttactgagaaacagaatttgaagatggatggttgttattgtggtaaatatcaggagagtacaaaagtgttactaaagtgccgaaaatgacaactagtaggacaagcttaagcagaggaaacttgcatttgggattcctttcatgaatagatatgtggaaaggagctttctctgagtccttagctttagttctttgtgatcttcttctatatgtatcttcactgctcatagtacatataaatagtcaaaataagctagtaaattaataagggaaagaaaattaattaaagatacttggataataaggagctatattagaactcatatgcacatttattttttttatggaagaaatcacatgtaatttgagcaatgaaaaataaattaaaaagatcatttgattttatattggttggattcaaacaaaaataaaagaattattcaaaaaagaaaatagatcattttttttaaaaaaaaaaatacctctaaatatttatttaagggataattacatagaaacaccaatttttataaaaaaattacatttctacattcaaagtttttttcttatatttatacggtattttataaaaacacaacaaaacaataaaaaaaaaataacaagagtacaatataagaagaccatattttatttaaataaaatttaaaaaaccgtcaaaatattgaaaattccacacaaacagtatttttataatttttttgttatttttatatttttttttttatttttaaattatccctttatttaaaggattgtccaaccaactaagtcggttatacaaccaacaatatatgtcatttctaaaatccaattgagctaatgtatagaccagaatatttcccataaaaaaataaaatgaaaagaactaacattaccatgataaacaaaataaaaaatttaaatattaaatttagaacttcaaaaataattaaatctattataaaatctttgaaaaatactgttttttcctactctttttttcttatagaactttttccatgataaagttgaagatccaaaacaaatcctagagtaattaatgtgattttcattaccttatttatttatttattttggatgttttaaagtattcaataattccttctacacaagtacatatacctaaggctttggtttggattgatgtgtcataaagtgcgatctacgctaaggtaatgaggttaaggtgaattaagaaatgtgtcactatctgatttgctccctacaccatttctccctaatgatgtatcaaacttttggaatcttaataatataatatgtttgtatatgttagcagccatgaagtttggtaagccaattatttatcaatgtgattagaactgcatagttacttaagagacctcaaaagatggtcaaagtagagtttagatgagttagaaaaggtaaagtgttgtactttgaaaaccaaacaaatagcattattgggggtgatgatgagatccatctaagagccttcacattggcattggactatacctactacaacctattatgacttgcttcaaacaacatcatgattcttatcttgcatttataatcgaaaggtgaatgtgttttcaagcaaagaaagaacaaaacataaaacaaactctttcatcacaaaaaaaaaaaaaaaaaaaaaaaaaaagaagagcaatgatcaaagcactacttcaacatcatgaggtgcttacaataaacttttaaaaccaaaatcgtgatgaaattaatctttcttatgaatccaaaattgataaatatttttaatgcaaagataaacttacattgatgccgataatcgatggcctccacgaggggaagaacccattgctcccctcatttagtgtagtcaatcaatagtaagtttacagaaccgtttcctattatgaagagagaattaagaaaactctgagaagcttaaaaatgaaaatatgataagatataataagatttgatgaatcaaatggcagaagtaaaacaatgttaacaagcctcttgatattgaaatatagcataactgaaaaaactatgaattggtggaaaagctttaggaaagacatcataataaaagtttgcataaacagagaagagagagagagaggatcatacctgtaaactcttgagtagctaatgaaga

SEQ ID NO: 195228 - DNA, 898 bp, Cannabis indica
aaaaaaaaaaaaaaaagaacgtgcctttctaacgtttacactttggtattgaaagaaagatcaaaagtgacctaggtgcttattaacttatttagtcgattgtgtaggatttaaggagtaagttcgtatagtaatcacatttatggtgtttgatatacatttaagactatatataataatgttgtaaagccaatatatataaacaagctacatacacatgtaagagtactaaattagtttcttagggttaatcattgcacaacacaataattcagattctttctagtttctttgttcatagaaaaagctctcttttgcttctctacattttacatagacaatgtaaacgggctcttgcatttgacagcaacttttgtgattaataagaaaaaattaatggattgagttgggcctcataatgaatgagatattgttaagtcttttctttctaacaaagggatgcatttattagtcatctgaaatggattttgtaatgattcatgaatgacttgttatatgcattgtctagtcgtgacaattatgaatacgtgaaatgaaatgataatatttatttggtggcactgttatatctggacaaaagaatgtaacatatttttcctattgtactacatatacacagaaaatttattaataatttaatatcaatgcagataataaatgcatatgtaggagaacgtccatatttatttatttatttattttatttatttgctggaatatcgcccatattcattactctacgaaacgtttttgttcatgatatgtcaaattcttcttgcattattacaccatttgtagtgcaatgtaatatatctataatctataacttaaataaaaatcacaatattttgagtttcttttgattaatttacacata

SEQ ID NO: 195229 - DNA, 1172 bp, Cannabis indica
gccgagcacttttattattgcacacaattttttccgttgtaatacatttgcacaaattacatcttctgaaaaaaatagcatttccatgaactaaataattggtcacattttgaaaatgaatgaacaattgcttgaatatgttgctgacctcattgctgagccaattatcattggcaatgcacagagctggaatgcccttcgacgaccaactccatctgcaagccacccactaaatagagaaccaacaaaagcacctcctaaacatgtacttaccactagacctacaccaacataagaatagaatatatcaataaaatttctttggagaagaaaagaaaataccaaatttgagagcttgaaagtacacagcgaagattaagactgctattaaataaagtaccttcagctaaagtattcccactgaagccaagatccacagaaatactctctagtgtctcattgaccacactgcatagcataagaacagagtaaataatctatgctcatattcatgataaaataataagtaaaagaacaagaacaatttggtagatacccgagatggtatccaaacaagaatgaagaaatcgcagcaacaagcatatgcggtaaagaacgtctccatgaggggttgacagtatctttgccattcactaaacgttctataaatgtccatacaagaatttaacacggctgtcagtatcatcagtgatatagaacctaaatcagagcattgctctagaaattaataatgccaatacccagatacccacaacaaataactacatctgtataaaatgatttgaaatactattttaagcaaaatctactcgtaaaacaagaatcccaacaacaagaacatagaaattagaaatgatgaaagaggaattgaaagagtaccagaacttccatctttgtcataaccattgaaataatccctcgctggtccacgcttgtacgtggaaaaagcgtcgtggagacgccctctcatatcaaatattataaaacctccaacttccgcaagagggtgttctacgaccgactgcaaatactatgcttgtaaatgtacatacagagtttcagcatattacattttattaaaaaaaaaaattaagcaataactgaataaatcaaataagacaaatatacagagagagagagaaccttgtaga

SEQ ID NO: 195230 - DNA, 1206 bp, Cannabis indica
aatattagccacaaaaatcacaacttgttgtagctaaatatatttttagtcacaataacctaagttagtaacaatttgtatctaaataatatgttttagtcataagtaattttttgttgcgactaaaactcacaattaatttgaaaaaaattatgttgttactaaaagattgtcactaaagatagtaattttttgtaatacttataattaactacatatatatactaggaaaaataaattatatgctagttaggagaattactttatatacatttttttaaatttacggtttggattgctctggtagttactccagtaggttgctatataaattttgattgcaatttaggttattcagatggttgttgtgtggcttgctatgtagatttctgtaaaaatatatattaaaaaaaatcattttgaagtgtaaaaataaaaaaaaaccttctattagttattgacttgtcggcaatttataaataaaaattttaaattatgcatggcatgctatataaaagagaaatgcgaaaaaagtattattaatacatctggtgttatatcgttattagtgtaattaagtatcaagtcttatataacttaaaaaaagtaatttttaaaaaatatcgctaactaatagtaggatgttacttataaaaaatactagacactactaaatatgatagcaatgtactacatatataacaatatattatactactttattatgcacccagatattaattagtacttaattaattatgaacaatgtactatatattatacatactaatgtgctctaaaaaaggacaatatcaatatttatttatgttataatattaattaattgtcagtgaaaaaaaggcaatatgtttttcattacaaatctggtctaatatattaataatagtaattcactttatttacatagaataaagttataaaaccagctatttggacacaataaaaataaataaataaataaataaatatttgttatttagatttctaaaaaggaataattaaatgggtaacaattaagaccattttactaaataaaagattaaaaaaatagatcgctgcataaattgacatattaatataattacaactaaaattattatatatgtgtatgaaattttcttatcgacctagctagctagctagggaccatacatttaactaataataattaaaatcataatgggt

SEQ ID NO: 195231 - DNA, 2196 bp, Cannabis indica
aataaaatttaaaattccattaaaacgaaatttcacccattacagcaatcagtccactaaagatcacaagttgtatttttataatattatatatagtttaaagtaaaaagagtaacaacttttatagtatttttataaattataaattgtcacgttggttcttgcctttatgttaaattaactcaactgcaaagtctaaggtcaaattatttcacatgaaaattttaaatcttagtttgaattattagcataataattatatatttaaataagggtattttaataaaaagcaatagcatagaagaaagcaacatgaataggatcaattttccttctttccattttccatttcactgtctaaaatcacagacactgtataactgagtagactacaaagctcctaaaatacacaacaaaactgagaagatcttaactttaaaacaagatgagcttgtttctgatgatgtttttctaaattcaagccttgattttccacttatgtgcagtcctgggtccgctaacaatgccttcgtagtaccgggaatcaagtttgtgtttgttccatgccttgatgaaatcggtgaacatatcacgggcagcctctgccgacaaatctgagaagaaaatcttcttcttatctttcagccaagtggcaaactcattgttcttggagaagtagtcatctttggtaagctccttgaactcataattctgaaagatgaaagaaacagacttttcttaccaacatgaatttgatgttcaagcaaccaaattcggaatgttttagcaatgaagttcaaggtagtttggtcgtagttcacatgtcaaatttcccagaccataacttgattaattaaaacatttatttacactgttaacatttctgatgctaatctaaatctctagtctagtagacaaataaaaaatccaagatccattgtctaaattctaatggttttccacatttaataatcagctacagtatgctaagttttgaatttaagaaaatgaccaaactagctatgcttcagttaacaagtttcaaagacgaaaaaataccaaagaaaactcccaataagctttgagtttgaactcttacttgatttaactcctttcttatcattagctgagtcaaaatcaaaatatcatttttgggcttgctccctgctgaaccctacaatctctacagagaactcttatacatatatgtatgtatttttctgaaaaactagcatccttacctaaccttccaattactacgtaggtaccctttgagctacccctcatgggtcagagaactctattattatattactaattaggatcccttaagacctaaaaccagaacttgagcaaaaatgggcttgcttgacacttaaccaactctagtaagaaaaaaccaaatgtttcttctcaattatctatcataccaaaatatatgtaagcagataaatttaaataaaaagtaatcagaatattaccatttgatcacctttcccatctttatctttgtgcttatccttcaatttcttgtctgagaataaacacaaaaattcaaattattcaatcaaaacataactactgaaaatccatttctaaatacatataaatatgtaatagttacctttattatcagtttcagaatggcgtttatggcttttcttgtctttatgcttctctttcttatcactactactactcttctttctacttttcctttttcatcttcaactgatttatgcctcttccttcttccctcatctgaaacttaaaaaaaccctaacaaattgaaacttgtaacaaaatttcatacttagtagcagaaaacatatggaaaaacagagagaaaaattatagatatattaaatcagatatcgaatcattcaaatgaaatatgagtaaagtattatatcaaagtttctcattgttctgaaaataaccccaaaacacaaaagaaaaaaaaaaaaccaatacgaccaaaatcaagggaaacacaattaagaaagaaaagaattagagctctgtaaaaccaaaaaacgaataccttgggaaggtgaaggtgaaggagaagaacttctcttccgactggtcttctgcttcttctcagatattctttcgcttcccattttttcagaaaagtctctctattcgagtttgagactttaataaatttatatataattcagtttgttatta

SEQ ID NO: 195232 - DNA, 1063 bp, Cannabis indica
aaataaaaaaaataactctacagaaaaaaaaataagcaacaataggttgggggtttggtgacaaaagtgagtgccaaacaaaataacgtctattcaagacatggacattcaatccaaattgaaaccatatatgtaaatgacattacattttaaagacaagggcttgaaagattatccccttcactttattaatcattattaatattaacattgaacaaagcttatagcatgatatacatatacatatgataaaataggacacccttcattcttaattttctttgatgagttcaattcaatcattttttgggtgagtccgtttcaactagtgtatgttgtaatgcacgctttgtccaccaaagatagaacattgacaagataatagccatgcccgccacacatcctagtgctatccctactacttttccaaccttcttcttgttccttttcgaagctgaaccaattccacctgaagctacaataaacacacaaatatgtatgggatgtgaacgtgagatttactatgccatgctatgcatgcctatgcagaagatataagaagatcaaagttagaaaaataaccttggtagacattaatggccgacaccaaaggtccatatgtgccttgaaaagggatgcaacaagttcctttcccagcccaaaagaagtggatatccatgactgagtttgtcacattgactttgaatgttttcaccaatgcacttttcgatcccccggcttctttcttaatattcaagtcttttactactttgtcaccctaattaatgatcaatcaaaacaacgaactttgtaattaattgagttgttttagggcagagtctggacaaaggcaggtcaataaaagttgatgatatgaattatgaggttaagtttatccatttacctgaatgtaaacatcaaatatgcgccttccaagggctttccaagttcgactgtcccccatcgctatctcggcaaagtgaagctcaactacatactccccgttcaccaaaccaaagccgaagtatcttagcgagtttggtgaaattctagctgttttgta

SEQ ID NO: 195233 - DNA, 1261 bp, Cannabis indica
gaacccagtaccacaagccgtgcatgttcctctgccagaaatgttgtaagacctgcctgtgtgtgccaccggggtattatggtaataaagctgtgtgcccttgctacaacaactggaagaccaaggaaggaggccctaaatgcccttaggaaacttggagaatttccaataatgccctttactatataactttttagtaatgtccttttgtattgtctggggatttttcattttattttgttgttttggactctatttagagaggactgaaagaacaagtgttttttgtgtactaaaaaaagtcactcctttagcttggagttttatctaaatgagagtggctctttcatcttattattattattatcaatgaaaaaagattatggcttttatgagttttactttgttctttagtgtggtttctctaaagttcagatctgatctgattgagtaataatataaatgtacatagagaaaagtgagtgagtgagtggaagatatttttaagaagagagaagaatgaaagtaaagagggatcactcacatgttgagcacttaaaatctttagaataaatatggtcacttaccggtggcatcattttgctttgaagccttttgggatagatagatagatagatatagatgggttttaggatgtttattagggtagggggacctacacactacacaacacctttgctcatttggggatgcatgttcattgttcaacaactttactaaatattattcttggactttgaatttgatgggcctgaacgtgtcatattcattgttccccatatcattataaggttttagacttttgagaagaaatatctcctacacttgtagtaaaatatgtggctttccaatttttttaatgaaagttttatttaaggttgatcaagagtataagttcaggggatcagttaactaaatcgattcaaaaaagagcattaagttcatggctcacacaggagtataaaaaaggacaaacaccccaaaaaaactcactatagacaaaaggtgctcaacttcgaaataactcaaataaactgaaaaactcaaaatattacgaacaacaataaagatagaacagtttcaacaaccattcccctaacacactcacaggcaccgtagctctgcatcttctgataagtaatatcctaacatcgtggctgagcaaggacgcccgaaaagtaacctaaggaaaagtattccgagtagggctgagcatcagtcggtttagtcaattttttca

SEQ ID NO: 195234 - DNA, 1648 bp, Cannabis indica
aaaaaatgttaccaaacacaccttctattagcataattgtcattaatgtttgtggaactgatttttgttagaacttggtcactatagtttttagttttggtacattctttcttccaaagtcataaacatctcgtgattggagatttgataagtaatttatggatcaattgttgctaaaatttgtcattaacataatatgatggatcaaaacataatatgattgatcaaaggcttataattaatttagttaatgtaagcttaataatgaagcacaaattcaatacagtaacaacaagggtgttcgctgtctggtttgggaaatttcataaattatgcacacatttggccaaaaattgaaatttgaacagaagtttaatatcctatgaaagttgtgctcatttttctctttctcacttcaccatctattttttctctttctctcaaaccaaatcatcattgtacaagattttggcactaaaatcttgaaaaatagacatttattgggctgaactaatcaaaacaagaattacattgtaaagtttgaagataaacaccaaggattgccacttttgggttttggtaaagaaagaaataggtaagtgatttgtttttgattgttgttgttattggttgttttgatgttttagaatgtcatttagatgttcgatctgtggtttgttgatattttttttcctgattatttggtgtaaatcacgtttatgtgaaataaatattttattttgggttctatgtgtttttggaaaatgcccaatagtgcccaataagggtacgatatcgatggtttcagggacggggggttaggggtgaagttccgatatgtgtatgataggtgcacgatacatgctcgatgttagaccaccaaacatacggacgattgatgtccaatagtttcctgatacatgcccgataggtttctttgtattttatacatacctataagtacgatatggcccgatgggttactcacttctttcccaatgtctattttttgaatttatcttatcctaaagtaagatatgttagttttgtagtactaaatcaggtatgcaacaaaacaataattgtttgattatcattgtaccatagtttcaagaatctccagatgtatatataataaatctaaaatataaattacatgaaaataataaatacttcttgatgattatcaaagtatccttaaaacttctcgtaagttggatccaataactctcacaccgtaatcttcaagatcgatccaccacacacaaggagtagtgtgagctactatgataaagtgtatatgaagttcttgtataaatctcaacatatgagcaagaacaatgtttatgtgatatagagaaaaaggtttactggtaaaaggcctttttaggctttcagaaaagttatgtgaaaattctattcccaaaatttattgttcagaattttgttatacggtatatttaaataaacccaaataaatttttaatttaattaattatctaaatttaaatctatttattaaatcacatataattatttgaataaataatataatcgattgaggaaatctctcaaccacttgagagaaaatataaactactttttaaattcaaatatgtatcgattgaattaattaattaaaccaaaa

SEQ ID NO: 195235 - DNA, 1818 bp, Cannabis indica
gaagagcttataaacatatgaagtacttccaaaattcatccaaacacaagaggtaacttttaggctttggaagagctttaaaaaagcgtgacatataaagcttacatagtcaataacaagtgttagagttgagaattttgggtgaaaagctttgcattggcgtcttcttgatctctcatctatgcctattgctgtaatggctgcccttttgacctgtcaattatgttgtgggagttgtagggttagccttttccaacttctgttgggctaacacatttgctgactttaatgtgtttttattttcaacataacttgcagtcattgtcattatagtttgctgctaaaaaacatgttttgctagctagcctgtatccttttatctactgatggaatgccaatcgaatgtcatgaatgtgctaaccaagatggaaaagctgatgagatatttgcagcgaaagtcagtaaaggttgcaccgaagtcatttcacactaatttgatgtgggtgtgtcaccttccattaaatctaacatattacttactgaatttcgtcacgttaaattggtgtgaattgtgacttttgctgcaaaaaaactctaagtgcaatatttcagactacatactgatttcgttgtcaaaaaatattacttagtgacatgcaacctataatactacttattaactttcaacccaaatttctcaaaattgatttgtaattactgaaccatgtttatgttttttttccttaggtttatcaattgttctctcatttagaccttgaggtcttatagcttgccctgtatgattccagcgtccttgttatgctctattgaaactgatcgatgtacttctttgcaggaactgaatgctcgaagacaagataatctacaaatagaatataacagagaacatcgaaatgatttattggattatcttcggtctttggattctaatatggtactatcccaaggctgaaacctctacttcaaatttattggaggtttaaagtccaatacattgttttgtgtgtgtctgtttcaattgatcatttgcttgatacgttcaaacaggtgattgaattatcgaaaccatcttcatcagaagtggaagaaataatacaccaacttgttcaaaacatatctcagagattcttcaaagacgacggcgattcaaattttatcggggagtcagtgacgccaaacagagaaaatcttcctaacgacaatgatgaattttgcaacaccatgggcacctcacgggattacctagcgaagcttcttttctggtgagaatttcgtcagtgtcattcataaatggcttgttataatattatatatccacattatgtttgtatatattagtgaatatgacctgtgagttatcttatcttgacatgggaaaggaagatgaacatacatagttctctcagacactgaatttatccttcgttttggcaggtgcatgctattgggtcatcatttaagaggcttggaaaacagattacaattaagttgcgttgttggattgttgtaaagagaggaaagtgggaaaatcatgtatattcttactacctccttttcctttgtcttttttcttacctttccccccctttttgtttatctatattgttctcattttcttttttataaaattaatctaagttaaaccattctcaagttccgatcgatcactctttgttgtcataataatgacattttgtatttcattcactataaaagcaagagtacagaaaatcagaaacctcaaacaacttcaggattatgtgtaatttgtagttgaggtagatcctcccttccatc

SEQ ID NO: 195236 - DNA, 789 bp, Cannabis indica
aggagaaactcaccaagacagcaaagccaccgcccacggtcatggcggcggcggctctactctagggaagggcaaaaaagtccatccaggaaacttctcaactcaaaatccagaagggtcagaagcttgagggagtaagtactaagtagtactaataattaaaaagtaatgtacatggccttgctccccttggctatatatgtatccataattatagctagtttttaatttcctttcaactttttctttcttttccctttgagttaattagtgcaagtgtaatttataccgtatatcatggatatgtgtgtcttgtgtattgaaatattacaagtttctatgttctagctagttgaagtttcatgaacttggatatggtgaccacttgccgtgtaaatttgccacaaggctttttattattagtggaaaaaaaaatatattattatgtatattgtgtgcgtcaattaattaataatatgattggttaacttcataataagaacaaagtttcacctttattatagtgcaatcattaatattatgatggaggagttgtttataattttgctctacatagatgtagatctcaccaattgatatataatattattattgaaaattaatatgattggagttttgttctttgtagacccattgtttttcattaagttggatgattaacaggataattatcctggttttattttaaattattgtcggctaaatattaaacaggtaatgattaaatttgtttagtggaaaagcatcgtacttggatctaattaatat

SEQ ID NO: 195237 - DNA, 1536 bp, Cannabis indica
ttttgttgaattaaacttgtgacaagagaagcaaaaaggatttgatctgtctcaaaagatttatagaaaaaatgagcagtgtaacggttctctcaattaaatgaatttagatccttttataatggaattactccattatttataggagaggttaacagaagatattggttccccaaaagctatcgatccattaaaataaggaataaatgacattcctaaattatgagaaatatatgtagaaatacctttaaatcgagatttgattatatattaaataggaaactatattaaatgcctgctgtcgaaacattaatttaatttgatgtttgttgataattttcttgggcagggttaaactgttgtattgccacacgtacatatattttcttgagaaatttcattgaaccgaggcttttatagtattttagctttttctagggtttaagcttgttcttgataatctttgatttaggttctgcatcattctgaaaaaatcttttcttttgatctgtatattctgttggtcaaaatatatagattgtttccaaaaagaaccttctttctattctgtccagtatttacctccccctccttctttttgagatgaatctgaaagacttttagggaggtaataatcaaattgacaataacctctaattgttattctttgaagaccaactgagactccgggcgtcaccttcgtcctctattgatatttcctttagctttgaggagtgggatgtcttgagcgagaaattcaacctgatattctggtcgtccaaaaccatttctatccaaaacgaattggtggatacatgtacagtatgtttattagagagtacaattttggttggtggaaatactttccatccaattggacatacgttgttcgatcaaacactctaaacactttgccaaaagcggacccttagccctctcttcccccaaaggttgaggcagaaattacggttactgttgtagaccatcctttagagagttattcatttcattcaagaaatgtgtcttgcacaaagcaaactgtttgcaagattggcccgaacgatgttgagctcatcaaaataatggttatgcatcacaagtggaccaagccagactctgagagtgagggtgacccacccactagggatcctaaagtccaggaaatagaagacgaggtcgacagtcataggtatgcccttatgccttatgaaggcacttgttggtggtcagaagatgacaaaccttacgactttcattgttgcctcttagtcttgggcattgattacatggatcaagagtttaactaggccaagtcgtctaaacatcaggagcccaaagacccaatgtggatttctccactgtccgagcttattaagaggtgccttcaaaacatggacaaggaaggtcttcttggggacatgcacatctttcaaccatttgaggaataacttgctaacgaccaaggcaaaggtatgtgtgcgtggtcccaccctcatgctaaacatggagaaatattataaaatctctctgatgcaa

SEQ ID NO: 195238 - DNA, 1318 bp, Cannabis indica
gtttgtactaaaaaaaaaaacaaaaaaaaaaattaaaaagttaagtatataaaattagatatgagtgaagagtgattaccttgagggaagagagtttgggagcaagaggaccttcaagcctaaactcatgcataacccaatcagttttctttccttttggagctcttccttggtaaaacaccaaagtctttctcatcccaacaaggccattattattattattactatgtgattttactcctttgcccttgccaaagattggtctgtctttcccagtggccttccaatacccagatgcagtggccctgttcgtacgaagcccagtagcatattttctatctctttgactgtaaaaataccactcttttcctcccacacatgctctctctacacacattaattaattaattaaagatcattacaaatacaaacacaaattaatagcttcatttattcatatatagctcagacccagcttatctcattttattgatgtttaaatttttagatttttaccaatcaaataaacaaatagtttcaatttacttggatctgtacaaattattgtttaaacatgaaattaaagtaataaacgtgcaagtcttattaccattaattttagctgaaataataaaaaataataataatttcaactaggctagttaattagtaatactacgtactacgtatatatgaaagaaataaatagaagtttgaaattggaatatgagaaaaaagtcaaaattttttttaaaaaaaactcttctaattattaattgggatgatcagtaaagaaagtaatttgaagccaaagtaatgtacttataatgacacgtgttgaattactattggatggaaacaagacctttgctcttatcccaatcactttcacagctttgagctttggcttgggacaacaccaaagctaacatccatttcttcaaaaagtagagaatatgatattttttgtttctattcaaaatttcacatataagacattacccttaattaggacaccttagcaataatattagcttttctttttcttttgattttgacataaaaacacatatatacccccctcacacatatatagcatatatacataatgatattagggaatattaaagggataagacttgtaatgagtattctatttgtaaattgttaaacatattattgagaaattaatcattttagtggtttgcagttaattataaaaaaaaaaaaaatgcatatatcactgaaaataaaaggggtgtttgtgaatattcttgatataaggagggtcgtaatctaacttaaaacaataatgatt

SEQ ID NO: 195239 - DNA, 2192 bp, Cannabis indica
aaaagaaaaaataaaacggaagaaagcaagttttataacatgtcagcgtgtatttttttctaactgtatgaattttcattatttatttaaattagataagacaacagaacttcagctatatgtacttaatataaatcaaagcagtgacacaggataatactacagtatatgtatagtgttcaatatatgatcatatcctcttatggacatagtctaataggtttagaacattttccttttcttatttctattcaggtgggaaaaaatagtctttaaggaaaattatatataaaattggatttttggaattcctttatggtccactagtaaaattcagatgtgtatagggtaaatatgagcgggggaggggggaaacattttccatggttaattcaggatgcataattagatttgggagacaagttgtcacatgtcaccactttttagaaaaggcttattggctctataattgcaggtggaacaaaaatgtcatggagcatatgcagaggtgaaaaaagtgatttaagttctatgttctttttttagtctgcagaaattggtaaatgaggaaaaagaaaacatgaaacgtccctatctgaattctccttgcattgaacaggaaaaatataaatctaaccctcctgaaacttcacaaagtgaaaaaaaaaaaaaaaaatggaaacgacaaacaactatggtaaaagagaaaccttgaatttatttacagacagatcagaaggcgatgttatcccacgaacaactgatgtcactaagccaagtttctcagtccatgtcagagaattccaagccctttcaagctgtggaaataaattatacactattaaataacatgaaaatatgactgaagttattaaagtcgaaataataactcatgtagccccatggcttggcccctcaaatttggtgacatacagttatttcaattggcctgtctcccaaaactatttgagcaccaacttcttcagacgcttttcgagcagctcggaactgcgattataaaataaagaaaaccaaaaatggagcataagtacggataattgtcatgaagatgattactactactgcttatatttatgcagacttgactttattaactcaaaagactcaaatacctcatcaccaaatgggcggttgacatcagaagagagctttgaagagaaaaccgccaaaagcaagcgtagagctaatgcagtttgacctcctgtaaatgtaatataagtaactgtaattgaaaagcatactcctttctcaagaattatgacaaacaagtcaaatacattgttttggtcacgtacccaagtctatgctacgcccaacagcaccaaagaaacctgttccgctcaaagagaacatgtttgatcgtaagcctggaccttgctcatcaccatcagaagtgtacataatcccagctctgaaaatgaactctgcaacaatttaagttcagatgtgcaattgaaatcaccaaacagaacacttaaattttaacttagtaatcattttatgaaaacaacaaatcccccataaaccaaattacacttgcctgcttcgacagagctcaacaaccacattatcgggcttaatggctcggacaacgcgctcaacctccatagccgattcctgagaaatatgggtggtaccaactaaccaaattgtctctggctctacgaactcggctctccatggcggaacaggaccaaaaagccttttctcaattaaaaccaagttgccactacttgctaagtcaagcaattcagggtgagattttgctattaaagcgttggactctcccaatatatctgatctgaaatcgaagtccgggggtggaggtttgatggaaaccttggagggtttgaaagctgggctctttagcctaactgggtttgtatgaaatagtggaaacgaagttggattcatagttttcatggatcaaactgataaagccacaaatgggtttttcctctgatttacggttaagctattttcagccctcaaataagcggttgttagtggtttgaattttagataaggcaataactcgcttctctcgtattattaacggtcactttttgttttactaacagatatcaacggactgatatgtaaggaaaattttacactggggtgcgatgcaccaaaactgaattttgtatttttttttttttttttttttg

SEQ ID NO: 195240 - DNA, 745 bp, Cannabis indica
agttaatcatcaagaagttttatggtactatagttttattgattttctattatttaccctaccaatttgaataattataaagaatagtactacaactaactgcctaaactttgtgatcatcaaaatctttggaatgatactatacgggttatacttctcatgtatcataattttgtaaatttctcataacttctatagcagcttctctcatcttgagtgtcctccaagacattctgtatttctgtagttaccgagaaaaatttagtatcaaaagctctacatgccgggacaatatagtgtagggtacaatttgtttgtaggatggagattatatgttctccaattccttttataagagtaacagggaaatcggaagtgcagataattggtgtaggtaaaatatttatgctgcccttggttgaggagtaataatatgtgcacacaaaatatctaccaaaagattacactaagtaacatggcattgcttttaaaacagtaggtattatcttaaatacacgtggttggttgaagactaatggtcatttgtaatagtgatcctaatgtctttgcatttcttaaaaattattactcattgatactattgttttttatcattctatccaaagaatatgaaacataaggggaaaaataagttgtactcaatgatattttatgacttacatctgatgatgtatatcatcgtaatcatcaaattaatgtcaccgtttacaattttttgagctac

SEQ ID NO: 195241 - DNA, 796 bp, Cannabis indica
ctactaatattgatctaaatattcgaatgtaattattgtgttacatatatgaaagataaaatgaaatatcatgcaaaaaatcccgaatatattttccctttattttatacttacctaactttttgtaaactacatcaaactacaccagtaagcatgtaattattattttccctaacgcatcccatctcctatggattagcaaccgagtttcaaacctattataataataatactatttaacatttcttaaattggtcgataacctgtaaagattgtcgagcatatccatatccttaaattggtgggtaaccttcaagcgagcaagttctccaataattttttctttaccaatattctatttttattttatttataccaagataatggtattttatcaattttttttgataaaaaaaattacttttattttgttttaatttagacctggtaacgcagtttggagcggacgttatcagcatcaccaataattttttgcttattttgatgaaagtaactacttattagatattttaaaggggatggagcatctattctttgtttatctttcttattggggatcattattcttgaatgagtatatatgctatattattttattgtcagctttttctcatattttttgactggttttcaatacaatttgtggccactgttgctgaattctatccgtcaactggtattgtgctgctcatttggaaatcaagtattttcttactcctcacattaatttatatttactaatgtacttattgtgttatgtatattgaggataaaa

SEQ ID NO: 195242 - DNA, 962 bp, Cannabis indica
attaagtaaaaaataaaaaaaaaaagtttaattacgtataattttgtgatgtcacattttctattacctgtaattggcaaatgcaacttcatttgaaacattttagcttcaaaatccacttgtaaacacatatcgatcaacgctaataataatataaggtcaaactaatatacagacaaacaagctgcaatgatgataattattagcaaaaacagctagatcattcatatatatatatagaacccaccattaaaaatattagttacttttttctttaatcttttcccagccttgtaattagttgttcgtcctctaatagagggcattttggtaatttgaacacgcacatattttataataggaaaaaattaatagtataaaaataaagagtttcgtttgcagatgttgaattctctaactaatttataagctaaactaagcttattccttggcctgcgatattagattattttctctcattagtgatgaaatcatcataacatctcccctagcctaaaccgaccaagttgacttactcttctctctataatatatattagtcattattatatcatataataataatattaaaaaataacaaagttttccatagatcggagaagattaagtagggctgagatatcacacatatatatacatgtatatataaatggataataataataataataagtttgagctgatgaaatgggaatctgaagatcagatcagtggtttgagtgatctggtgacgaggtcgtataattgtagtttttgcaagcgaggattttcaaatgcacaagctctagggggtcatatgaatattcatagaagagacagagcaatcatccgacaaagattctccgaggaaaacaaggtaaataataattattcctctgaatatacaaacccagatcatcatgaccactatggtttattatcatcgaaaactcagaaaagtg

SEQ ID NO: 195243 - DNA, 2894 bp, Cannabis indica
atatatataaatatatttatagtatcatctgtcattctctgagctattgtccatgaaagttctagtggtgagagctcaaccattattactatttaaaaagaggaccttttttctctcaaccccaaataaccacaaaaaagatttcctcactttctcgacgattttcccacttgccaaacaccccaattccaaccccatggccacttgcatcgacatggctccaacaggctcatcaacccaaccaaacccacgttcccaccaatccaaagaacccaacaacaacaacaacaacaacagctcaaaccacttaaagttcgtatctttttgccggagaagcttttcctccgataacacagtttcctgcgccgccacgacgatttgtccgacccgtacggtcgccaccacctccgaatctcgtaaggtaatcgattatggcgaagacccagatgaggataagatcgatctgtggctgaaaatgcaaggtgaggctcgtacggacattgaagaagaacccattttaacaagcttttatttaagttctattttgtctcagaattcatttgagagtgctcttgctaatcatctctcgttgaaattaagcaatccaagtcttcctagcaatacccttttcgatattttcattggggttctaacagaagatgaagaaatcatcaaagctgttaaagatgatcttagagctgttaaagaaagagacccagcttgtataagttatgttcattgttttttaaatttcaaaggctttttagcttgtcaagctcatagggttgctcataaattatggtcacaaagaagaaaggtgttagctttattaattcagaacagagtttctgaggtttttgctgttgatattcatccaggtgctaaaattggacatgggattttacttgatcatgctactggtgttgttgttggtgaaactgctgtgattggtaataatgtttcaattttgcataatgtgactttaggtgggacaggtaaggcttgtggtgatagacatcctaaaattggtgatggggttttgattggtgctgggacttgtatacttggtaatattagaattggtgaaggtgctaagattggtgctggttctgttgtgattaaagatgttcctgcaagaactactgcagttggtaatccagctagattggttggtgggaaacaaaatccaattaagcttgataagattcctagcttaactatggatcatacttctcatatttctgagtggtctgattatgttatctgaagtgaaatgaaatgactactataatatgatatgataatggggtgtttcttgttggtggtttaagtgagaattgattctcctattggcaaacaagaagaatagatagatagatagatagatatattaattgttagattaaggtgaaaatgttgagcagcagctgtgatttttttctttatttttctttgttcttcttgtctttgtatggaacactaaaaggagaatagaagttctcttattgaaggtgacaaaatatgttgtagcagctggctggtatggtagtactgttgttgtgtaagacaattttctgctatgctaatatagtcttgttccttttatacaatattatatttatttattattttcttctgacaatttcaaggctttggtagttaatagctatgtagtttagaaagataaatataaaactcaatagttctattattttttaaagagaaatgttgccactgagtgtgtggtgtagttggttggatgattttaccttaaggttcttatttggttgccttttagagtttaaatccccatggtagcacttatcatgggctttaaaagttgcgctcttttgggagtaacgggtgattgtgcgccctattaggccatggtattcctgcgtgggaggatcttggctggcaaccatcttaggaacaatgtgtaaatttcaattgactactcggtcgtatttggggcagtgtataagccccagttgactactcggtagtctttgggatgctactaagtcgaaggagaaaaatgttaaaagacactcgcagtgtctagcaccttttaaaatataatatcgctattagtataattaaatatcatgtcttatataatttgttgtaataatttatatagagtattggataaaacatgaattagacttattctgcattagtatattttaaattaaaatgaaatgtcttcagcataaattatgccattgtttaagacagtaaaagtcaaaagaatgtgacagagtttgtattactgtattagaaaacaaaggaaagaggtaataaagaatattcatttcattttcaccaaaatgtaacctttgaaggtcaccaaataatatatgatcatagctcttggtctaattcaaaagataaagaaagcaaataagaacacacatatatacatacttccaatgcatttagtatcacatattctcatgtcaacttctagacaaggaataatcaaagttaaggtgtttgagggttccacgtaggtagtaccaatataattccaatggtgatttttgcaggaatttagagtttaatagggaaaaaaaacaccatatcctaggatggtataagcattatttaagaacaaagattaaggttcaaagtactcttacaaaactaaggatactctatctttctttctgtttagtattttgaatttatagtgttggccaacttcaaaataaccactaggaggatcattaaaattgttgatcatcattactactgaaatttaggttgtgttgttgtttccacaagggttagtgttggtacaaggtcggtcctgagattggacaggtcttaagaaaaataaaattattaaactacttattttaaaagtatgcaatattttcgaaaaatac

SEQ ID NO: 195244 - DNA, 682 bp, Cannabis indica
atttttcctttttgttcctattttgacttcaccaaaagcaaagatatttgagtatttctcactttttgaattgggaaagaaacaagcttgtattaatgtgagaaaagagtacaaagggaaaggagatcagaattgatctcacaagtcacaacaaccacatcaaccagaaacatagatgaagtaacattttagctagaaaaacttcaccattctatattaaggtctagaaaagatagctccttaaaatcttaaagactttataaaccaagattgcaacccaatattcaatcttctcccaaatagcttttctgttgattcttttgtgtcttcaaatattctgctattcctttgaagccatacagcccaaaagatagcaaaatgtcactcttttgagcagttatgaccatagcttctgaactactttgcactccaaaaatgaatgagtgatagtctccccattcgacctacagcaaacacgcgaccctggggacaacgattggtgcaggggcctatgttgtatgttctcatgaacattcttctcctccaatgccaatagccaacctaacactttcactctatatggaatacttgttattagtgattgaattgtcttttgtttactctttggatggtttatttacatagcctcatttctatctgatttcttttttctttttttttt

SEQ ID NO: 195245 - DNA, 1819 bp, Cannabis indica
aaatggacgatctacataaagcaaaagagacataagacaatctgtaatataaacggcattattctatatcgtaaacacaaactatagcatagatgatgggatatagaaacagagaaatgagatttgttttaccttgcgataagtggtgccgtcgagctcgacggtccaaccggcttcgttgcacagggctttaaggacctcattgttatcgcagtgcttgggaagcttgtagttaccgtacattctcagcccggagaagatcttcgccgctatagctcttcgtcttctctccctcctcttgttgtctctctctccttccatccatggcagcagccgaagtcccccgacgtcaatccccctctccctctctctctttgttccagtcgaaactaagcactataacaccaaaaattactttgaaagaaagtacgatttctgaaatggagctttttatacaaaattattcaactagattcgcttcaagcctaatttcaaaaccgaaaattcagctcttcttttcaaaaatatagaacccaaatagaaaaagacactaaaattcaaaggaacggaagaaattcagctagaatggaaatttgtaactgaagaatcgaagtgaaacttcgctctgcggagaatataatcttaattcatcgctgaatagaactaaccaggtgtaatgcaggaagataatcgggtctggttttactataaggatcagataattgattgttcaacaaaaaagaaaagaaaaagaaaaaaaaaatacccagcgatggagccgggagtggtatttactgatgaaatcccgggaaaatgagagaaagtgaaatgaaataaaagtaacgtgaaataaaaagtggcagagacgagctaattatgttgttggagaatcatgattgctatttgcccacatacctcggtaattttactattctgccactacttttttttctttatgacaaaaaagtaaaggataatgaaatttttgttttaatgtctttataataaggcaaaggttttttcttttcgtaattatactctatggcccaagtaagaaagcgaatactaatataatctaataaatattttaatcaaatttcataaatactaattattttccttataatacattcgctagtatattatacgaattaattattcgatttgactaaaaagcttttcaacacaaggcatagaaacttgaaattgattctaaaaatgaataaatcaatccacgttgaaatgttttctaagcttaagcctcacttttagataagaatatccgttcagatattgatgtttccggcccaccattattaccatttttctcgagacaaatttaggcaaatgaagtaattataattaactacagctgtgacaagattgtctaaagaaagaaacataatccaagattatcattacttattttatttgaagaaaagaagaaaattgatgaaagtccaaaattttagattatggcaatagtatcccctcaaaaggaaatatgtattgataaatccaaaaacggaacatttcgctgtagaaaaaacatgcttcgttgacctgaatcaaacaaagcaaaacgggcccacttaccacaataataacatgtaggggtatttatgactttttatctcataaagaaccgcactgtccaataccttaactgggcattatacggactcgactcccgatctgtgagactcagataatctgatctcgttttctaaccgtcactgtgacgtttgaaagacacgtgtccttattgtatacgttacttcgtaaccgtctctgtcttgctatgactatgactagttat

SEQ ID NO: 195246 - DNA, 1893 bp, Cannabis indica
acattatggaataaaaaattaaaataaaatgtgaaaacaattaaaacagaaactaatatgcagacttgcagccttatgaaataccaatgaacgacaacaaaaaaagttttctttttccttcgatggttaacttggattttcatttaaactaaagggtctcaaaatacaaagaaaatcaccaaaatacatcccaacaaaggtttatcattaccctccaaaatacattagagcaaggggataacaataacattcaacttctagtcttttaccatcccttaagttcttaaaacaaaccaactcggcaaaagtagccaatttcattagtactaagttacctcaaaaatactaataatatagcattagttatgataatattgcaaaaggccactagaatatgttctctccattaacagataatgttttcaaagagggtgaaatccaaatcagcacatcttctaaatctgactttctctcgacataacaatgagtaataacaagcctgagatgcttccaattgagtaaattagaacgacatatccttttccaattgtctggcatgatgaaagcctttaagtacataaaaattcaaaaacatattaataatcaatgtatggtagatttaaaaaaagtaagaaaataaaataaagcaacataatcacattaagatacataaagacaaaatataaaagataagtaatggacataccttatcagaaaaaaggtggagtgttacaatatcccaagagcaattgaaattcagaaaaaaattcatcataccgataaaccaatttgttgcatattcgtaatgataatcatcaaatacaaattttccattcaacaaattgggtgattccaatgatatacgacaattgatattaccttcataataaaatgataccaattttggtgctgatttaattgtgaaatccatgaccatatcaccagtgtggtgtgtatttctcaacttaaagcatttcaagtgttgatttgagattttaagatgctccaatccggacatacaataaacattctctagagtcaaatcctcaaggagaggaaggtttaaaatgaaatcttcaaatgatgactggtctgtcataccccatttacaattagatagtgagagatttctaattgccatacatgcagagagatttatgtccttaaaacaaccactacgtagcaccaaagattcaagattaatggcttcaacttgaagggatccatcaaattcaattatcatgaacttgaggcttgagctttgtacccgaaggggatgatcatgaatactcaaacatttatatgaacttaacaccagtttctcaagggatgggcaatccaacaaagacttggatagcacatcattatctgcaagccgaatgcgttctaatgataataatttcaaggacggaaaaccaaatgagtaacgcaactcaattccactcaattctaaaatcgtcaaagctcttaagttggatacttttaggtaagcagtagtagtaataaccgtaactcttaccttttcctggttctaagctaaggctcaactccttgattttattgtcaactgaaaaacttaaccatttatctagactgcgagcttgctttttcgatagcattctatctgaagcttgaaactagttacagctgaatcagcaataaaatacagacctctcttgcggtgttccaagcaattgtcaacataattttggaactttagaaattcgggagcagtagtactagtatcggagaaactgagtttgagaactgaaaaccatataaatttccaacgctttgagaggatgcatgtctgaacaacatccgtagtaggtagaaatgagagaatatgtacaataattgcatcaggtagtttagatattctgtcctcagcct

SEQ ID NO: 195247 - DNA, 2190 bp, Cannabis indica
gagactctatcattcaaaaaaaggagaattttttataacaccacactagtcgaaattcaaccaaaatacatcttcaaaatacactcgagcttgagaccgaaaaccgaaaagagaatcacgatcgatataggaggaattatgtaatctggcgtagttgcgttttttttattggatcaatactgagtaaagaattactagtggaaatacaattttgttgttgaggtaacacctaaagtcaaaactataatttattcaataaaaataagaaggaacaaactaccatggtttgtctcctgttagttactgttgaaaaacaataacttattttgacttgactagattctgttcacaagagattaactgtggagaaatcttatctatttatataccttttttttttcttggctactgtactggtcatccattgatacacctataaccaactacaatggcgtccaatcttctcaaaattcaattgcacactactccaactccaaacacaaaattcgaatcccaactcgcaaatgcattctcttctctatcttcatttcgtgttcatcatcactgccacctctcctcctctactacaagcgtatttcataaccacaaaaactcttcgccgtggatcaaggtcccgatcagaagctccttaccttcttcaagcccacctacctcaaaagaatcggccattctccaagccaagacatgcctctcaagcacactagaaaaacccctcaataacaccaagctcaccaacaagctcaagagagtgaagcaacccagattccgggtcgagattccggtcattgatgactccccggaatctctctcccgattatctttcgaggtgtttggagaactaccattcaaaagaaaaggctccccagtgaacatcttaatcatttggcctaatgattcctacaaagaagctgctttgagagtgttcgagtcttacccttcatgcccagttgaccacgttgacttttcttccctcactactggtggtttgagctctgcagacgtggcagtgtttctagctccggaggtaaaagatttggggaatgtgaagagtgtttcggatgatttttacccgaggcccgtggtggtattcaaccccagatgggcttttgaggaggagagtgagtttggggagctgagtagctttgtgggatcttttgaagtggtgtattctttcatgggtttggaggtgaaaggaattttgagcaaaagaagaggagtgattttcaagtgcgtaagaaatggagttgtgagtggtgagaagtggtctgtgcttgttgaagaagaagaaggagagttgagggtcatctccaagttcaaagctcggccatcaattggtgaagttgagaatgttttgtataatttgatggccgtcaattcaccggtgaccaagtctgtgaagttcttgaaagatttggtgtctaatgtcactggaaagaagtaagtgtctgtgtaattattagtaaatagattttcaagttttggtttcattcctcgcttttggagtttcaattgtttacctttaactgatattgtagtgagattgcaaatatagcctacggttaatatattatttaatcataaatgatgagatcgactagaatgagtgagctgaaggaaaataacaataccttttgacttttgttgaggattagtgaacatgcgtgaactatcaatattttttcttttttgataagacttaaatatcaatatttgttgcacattaaaagaaaatttaaagaatatactttaaggagatgtatctttatgcatccttctaaccaaaaaaaaaaaaaaaacaaaaaaacaaaaaaatatcacgaatactgtaatctttttcaataataatcataaggtatgtgtaatttgtaaatagtataaaatagtctctgtaatttatctcggtcctcggcggtgggtgtttctgtttagtattggagtgattcttgtaccagtaaccggtcctctgaacagattttatcaagtatgtgaatacaaaatagtagctgaaatttgtgtatttcgtaaaaatatggagtaaaataacaatcatcaggtatgtgtaatttgaaaatcagtataaaatagtatctgtaatttgtattttgttaaaacaaggaataccgaatccgaatgagttattccaaaatataattgtgggacttcttacga

SEQ ID NO: 195248 - DNA, 1003 bp, Cannabis indica
atctactttggaatcaagtggtagttccattaaattcagctaaaattctgtctcttttaattttagtattttatttttattgaaagttaaatttcttaatttttatttaaatgagaggatccttatataaaaacaaattccataacaaaaatgtaaacaaatcgatgtggtattagttgttgttactcatttattgtatatgtatacatactacacatacaattaatcagaagacatgaacaaccatgtcacaaacctataaaaactcatatttgaataataatatatatacattttaattttagtgagaaagaagcttgttgttgggggactaatgacataaatattccttaattttttgtttttttttaataaaataaaatgaaaagccatatcttagatctataaattaatataaatatatatttaggaattgtacaattatactcaaataagaaaccaaaactaaaaccattaaagaaaccttaatacacacataattgggcttagtttttcattattaattatgaataatagatcagttctaattatatatatacatatttattgttttaaaaaatcatttttattttaataattttccaccatgaagatgccaagaagcttagcaccaatgtaaagttattattaatgtgcaatgtaggtaaccccataaacctaatttatgcactaaatatatatttgaccaataagagaatagtaacatggaatttgacttgggtttgtgatgaataattcttgttgaccaatcttatggtactaatatgaccttacctttttttttgttatcattattcaaaacttaaattaggaagaggaatcttgttactttaatttaatctttaatgctcttcttttcattttttttggttgaaattatacaaatataatacatggtttatcaaatcaaataagaagagctagttttctttgtgtttgtatattatggggaatatttagtgtatatatgagcactatcatc

SEQ ID NO: 195249 - DNA, 3125 bp, Cannabis indica
ttttttttacatttttatggacatacctaataaaaaaaattaacaaaacaactaaaaattaaaataaaaataacataaaaaaacaacattaaacaatatataaaaaatagtatacaaataataaaaaaattaacaaactaacaataatacaacataaaaataatattatttttgtaaagaaaatcttaaaaccataaaaaattcaaaattccgtacaatgaattttttatttattatttttgttgtttttaggtaattatgaaattaccccttaaaactttaagtgagattcttattttctagtataatttgtgagtagttttttctctatcatatatgtagtggatttatagtatagcatgtattaaaaatacttgaatcatttttattaattttaattaattattaattcgatggtggctcacgtataattaagatggtcatgtgattattaatacatgcacatatataaagttgttgcatgaattcatattgatcaagaacagctatacatgatcacattcttgatctaattaattgattttaatttaaatatatagtcaactcatgatagataacaaaatcttctttatgtaatggtccaacttagatatacatcttattcatatccccctatataatatctgcaataataatggaccatggaaacttatagctcttcccaaactcaatgcttagaaaatacgtacattctatactatataaatatagtgttgaagtcaaattaagcaacttaactttaagtgtatatatatatatgcatggttcaaaaatctcacaaaaaacaccaaagaaaattgaaaatacatggtatacatacttggttgatgactttaatcaaaagtaaggtttttaaaagatgcttttataggctttccatgcaagctccaaacatttttattgttagttgggtaattagtggagttcagtttttaaccacttgaggctagctcaagtggccataggggttgcgtgtgtattggaagtgcgtgtgtattggaagtcctgggttcgtatcccaaattatgcttatataatatataaacgcttaaataaataaaaaaaaataaaaaaaaaaaaaacagaaactcaactaaacagaattatattatataaactattattattaggtatcactacaaaagtggtgtcttgtaaataatttgccatattttataataattattaatttaaattatgtaaaaattaatatttaattatattaataagtatggatatgttattttgaaggggtaatatattatagatatatccgtgggcatgcactttaacatttgtatatatatatatatattgtataagaggaatatgagttgatcatgtgatgcatgagtagtgatgatgagtacgtacttaggtattattaatattagatgagaatgaaaaagacaaaatagtgatatcatgatgaaatgaagaagaagaagtgcacgagtggagaagaggtaaataattaagcttttgagctggatccagagatagacacacacacacacatacatataatgtacgtacgtaggtaggtaggtatggctagattagattagattagataggctgtaactgtatctttggaatggtcaatcaaatagtcacaatcatcactctatcttatcccatctctctatatctttattaattatcatcccctaactaatgcatgctctaagacaactctaattatataaggctttaactaagtaggaacattattcactttgtgtttaagtttttaaaaatttatttttagtatattcttaaaaggtcttatactaataaatatattggctattcttatatatttacaatttttttttatttttaattaatatgagactttagttgcacttttaaaaatctttccctcaaacacaagattacattgctcattaattactaggccagcttcggctgcaattagagcatgcttaactgagcatattcactgatctcatcgttatagtacaccaaggctcattacctttgtttaacatgttgatgatttattcacataactaactttaaaactgctctgataccacttgttgggtcgtcgaacaccatctatctccactcttaatatgatattgtcgcttgagcttaagccctcacgaatttaatcttaggagcctttttgaaaaatctcataccaataaaaaacaactaaaataagccgaaaaatctagtctaattaacaatattattacgagcagttttattaaaatttctagtaatcaaacaaattaaacaacaaagcaaaagtctaagtaaattcaagaacaaatttttatccttccaactaggaactctccctaacataacacgatccacaagtgtaagtcaatcaaaaagataaatatataggattcactctatcaattatgacacaaagatatataaagcatgagcaataacttgtacatgaccaagttaggctggtgggcataaaattaaaatgaagcagtctctcaaactatgtgagcagaattagatgcaacaactcgggagactgctcgcggtcgggatgaatatattttttttattactcatattattagtattgagtaataaaagttagaatattgaaagagggtaaggtggggtcattactcaaactctctgcctctttctcatatatgcattgagaaatggtcattttacagctgttgttgttgtaaatgaagccaagccaactgtgtcttagctatgtcactttggaagaagcactcttcttttggccctttcctcaagtcactctctttctttttctctatttttattctcattatacagtacataatgtcatttataatttattggctcattacttattatgatcctatctttatagctcgtttccattaattaccccaaataaaagtttggaaaatctgacacaaaaaaatattactaaaaaacttttgttacctcaccaacctctctccccccaatttatgctcactttgagtgtgaaacttgtgccttgaattgattgagcctcttgtacaagtgtaagagtaatgataaatgggttcaaatattcaacaaactattatccatagtcatcttgtatcatcttttaa

SEQ ID NO: 195250 - DNA, 1712 bp, Cannabis indica
ctttatagaaaaattattcattccaattgtaatttgtattctggatgctcttgtttaaatttttaaatggatactgattttctcaaaaaaaagaaaaaaaaaaaaaaaaaaaaaacctttaagcgcgtccttttcaaaaagaacaaaaaaaaaaaaaaaaactttaagcgcgtgagactgcggaaaacgtatgggtactgacccttgagaagctcttgcttaaagttttaatacttattatttttattaaaatttccatataaattatcattattggaaatggccagagaatcgagctccattgagctcaagctcctgtacggcgaggatatcagagccttcaatttcttccagaagatctccatcttcgtcctcggctccatcgctagcgacgattcgaccaagaaagtccacaaccaacagccccagaggactcccaccgaccgagaaggggactccaatccggaatggaatcacgagatgaactttttggtcgatgaagaagaggcctctgagtccaatttcgaccatctctttattcacttggacctgcggcacgagggggttttgtttgggatcggggataggacgatcggtgaggttcggattccattgaaggatctcatggaccaaacgtcctgtaatggtgtggtgaggttcgtacggtatcaagtgaagagctccgacgggacgcccaatggtgtgttgaacttgtcttttaggttcaattctatgactgaaaagaaatcgccaagccctggtaaaattcagtaccccactgtggaggaaatccccaatttcgatttacaagttcccaacctgacgttttctcggcattcttacttttccgaacgacaaagaattgagtgctggtcttctccttcttcttctcctgctacggtgtcgtatccccatattcatattcctccagaaggcatccctggttcggggcaccaccaccattatcatggaggagcaatgtggcccagtggaagaaatgaaatgggaaattggaatgggtactgactgcgaggattgctcttcatcaagcttttggggaatggagaacagatgtagtgtgcaagattcttagctacgattctcatatggattgttcttttttcatatcaaaatctctatgaaagtaactgagtaccatatttgatcatggcaaatttgacgtttgaacaggttaaggggaagaagaaataaatatcgaggataatgtatacttggtataatgtggtacataagaaatttaatatttattatacatgttatctctgattctcatgaagaatgaccctttcataaatgagtaaatcgttacctagtttgattattattctggaataccattttgttagttacattaaaataatatataactgaattatctgggaaatttgaaaagcttggacagccgttggatttggctacctgttaaaagatattttggcattgatatggtagtaaggaagaaagggaagaaaagaaaaggaagaaagggaagaaaagaaaagaagaagaatgatatcttttgaagtatctttgagtattttactgaagtattcaataatttttactctaatacgacgcctgttcggtttgttgattggaggaattagtcgatgtcttctctgcattagagagataaatttattaatcagagtataggtgtcgtgtattcctgtattattttttagtttaag

SEQ ID NO: 195251 - DNA, 1446 bp, Cannabis indica
tatctcacacccatgttgtaattctgaatatttcaagtagaaatttcatcctcatgacaagtgcgatttttttcgtgggtcacccgaaaacaattcagtagacacgattcaagctccgaaatttgacaatcaccatccaaagtcttcttagccattagataatcatcaatggtcaaaattagcccataaatattaaaaaatcaattttattcgaatgttaattgattaaatctagatttgtaacttgaatattaaaacagaaagtaaatcaagaacaccaaatttacaattaaatctaaccttagaaacacattctaggcgactattgcttggggttcccttgaaccaagtaaagtaactttcactatgaaatcaatcaagatacaatatccaattctgattacaattcaatcaaagtaaacagaaatgaatccatacaaaagttacccaaacacttgattccaaatcaagtataaagatctaagtctccttagatttctgaagctgagatccccttgctacttatcagctgaaatcccttcagcagtttcatttgaactcccttcagataatgcaaatcatcattccttcttcagctcttgaagatccaatgattaacctcttgcaacacaaacatgaacaagaaaaaggtttgccctagcagagcaagaatcacaaaaggattataataaagatgaagagagttaattagaaaaagcttaacaagctatttataaacttatttttagtaataatcaacttattcaattgtaaaaaaaaattcattacaactggcaatgaactgtaccaactaaaatagtgaaactcgaagctaacctgacaatctataaaaaattccctaaaaaatagatgcacctaaagcattagataaacaactgtaaagaccagaccagatgcatctaagagatcaaaagacaacaattcaaataacataatttgccacaataaaatatggcacttacaatctcttccttgacaaattatggtcaataaataaaccaaagtacatgaatgataaccaacaaaatttgaattaaaaaaatgatatacactgagaatgaccatatgatataccaatgagacagacattatttgccacacacaaagatatgattcctacaaatattttatcttattttgtattattttattaatattttagtggacctccttgcttataaaaggagagcctggctagctcacttttcacatttagaaaagtccctacaaggttagagcatctttatctagttttactctttagaaatttgagcttttactttagtcaattctcttgtaattctcgtgattaataaaaaattgaagtagacgtagctccattaccgtcgcgacataggcagtgaactactataaatcttgtgtgtctctcttaataattacttaactcatatttcatcttgccaa

SEQ ID NO: 195252 - DNA, 1032 bp, Cannabis indica
cctcaactcctttccaactctgatcatggcgtttgaaaagatcaaggtcgctaaccccatcgttgagatggacggtgagacttttcaatcttttgtttttctttgcttttttgtgatccgatctgttctcacacgtgatctgaatctattctgattcatctcgattctctattgtttcgcttcctttgaacgtccaatagtgagaaagaaaggatgtttcaatatcgttttgatgtcgttagatccgattgctcttttcggctcaagttatttgttccgtactatgtctttttgcagttgactgcttctattgaaaatttctgtaatttttttaatggattccgttccgatcttaaagtgccatggactaaattaataataataataataataataataataataataataataataatgaattaactagtttcggacgtgttggtttttctgttggtacaacttgatgtgatcattatgtgctaagaatttatgtctgcttttttatttcaggagatgaaatgacaaggatattctggaaatcaataaaggacaaggtctttacatttgtttttggaattttttctactaaattatagtaaataggagcttgaaatatgttcactcctggattaaaattttggtcggttttgaattcagcttattttcccatttgtcgatttggacatcaagtactttgaccttggccttcctaatcgtgatgcaactgatgataaagttacagttgagagtgctgaggctacccttaagtaagtgtttttaatgtccctgattaattgtccaagaatggttccttgttatcctaaccttttctgttcattttttcctgtagtatttgaaaccttttcttgtcagttccttgttaataatcttcgactgatgttgttctttaaacatattttgtatcatatgttatacttttattcttctgactattgattttttatttttgaaaatcctaggtacaatgtagcaatcaaatgtgcaacaattaccccaggtgggctgtat

SEQ ID NO: 195253 - DNA, 856 bp, Cannabis indica
taaacgcttaattcaaaaaaatattaagaaaattacaaaatttataagatctcaagctaaatataaaataaagtaaaatagaaaatatataaactaatgttcaaatattattctttactatatataaactataaaggataaattacgggccaactaatattatatatagagtgccatgctatagataattaaaagcactttatttaataataattaccatacctaaattacattgagtgtagtctttggcacaattgaacaatcgaaaatctaccgaatttaaaagtgtagtgtatagtgggacattactatagtctatgtaaacgtacgtactgaaatcttcagtgcctttagtcagacaactatatgtatttaatgtatatatataaagtctgcaaaagttgtataccagataatttatttttatataatatatgtatatcttcaagaaaaaaaataatataaatatatatcctttgtgatggcatgcagttaatgtagaaacatgcatgatttgggaaaatgctaataattttatgcatatctttaaattagattatatttttaattatgtgatcttaattattagatgaacctggaaggtagatctccaaattatgcaaaaacaggatccatttattggattaaaaatttataattcagataggtaaaatacagaaaagcttaaagtcaattgaaataaatattaatataattctgaactatatagctagctgttgtatgtaaatgtatatatataattacctacaatgcaaggaatttattcacatgttttaattttatatacaagtactactgtacccgtcattatcatggcaagctagctacatctcaa

SEQ ID NO: 195254 - DNA, 878 bp, Cannabis indica
aataaacaacaacaacaaagcaaacagattttgaaacgggtcggccgaagattcatgattggacgtcgcctgacagagaggatgggcatgcgtcggacatccgctccacagtctccgtataaaagttgtgaacgaccttcatatttcagatgaggcgggactggcgggcactttcctcctccagctgtcggttggcttgtagtaggccctcaatttgaaacttggcatttgtaagctcagtccggagagtctcgttggcagtgcccaggtcacggtttgtctcttggacccgctctagctccgtcactagcgtgccaacctccacgatagccctttccgcctgtagggccgcttgtcaaacaataaggccaatttagaaaggctgaagtgctagaacatgggatagcgcaaactgaatgaaaagacaaaatcttaaagtcttaccccaacgacctgcctctttgcaaaatgggccagcgcaaaagcatccgcgctgctgcaaaatgcccaaatcttcgtgggcaattttgaggcgctccctgccacttggtccaagagctctgcagtgaaaggagcggcctcttgccccaacttataggccagccagttctccagggcttcaacctcgacggtttgccccgcgggaggcgttgcgtgcatgtcatctgctatctccaccttacggaccgccaacatcacggccgccctcggtgaacctggagcctctccgtctctaaacgcccttttagggccctattcgcttctttttccctctatatctccagagggtcaaaaggaaccaccctcctagggaaggtgaaccctaccgaaggtgtccttaacggggctgagggaagagacctaggctggcccagcct

SEQ ID NO: 195255 - DNA, 672 bp, Cannabis indica
ttttttttgtttttaaaataatttcatttttaacattgagtaaatgcagtttagtttttaagagatttatttttgtagttgtaggaatggcatcgtatccatattttcatatattgagtatttcattgaagaggagtaaagttcatgatgttaaatattatagatctaggctttgcttatttataatattcatattagaagacaaaataaacttatgaatatgaggatgagtttaagtatccatgttgttattaggcagttgttgtacaagtcgctaacatggttattttataatattgagttgttgtattgcggacatgatttttgtaaagattgataatatggttactgtaaaagtagctaacatgttgttaaagttcctaaacatagttgtgttatgagattgaggtgatttaagggtttgtaacattataagagtgagtttctaacatggttgttgtaagggttgctaacatggttgttatatgaggttgtgttgtaagagttgttaatatagttattgtatgagattgtgtttctataaaagttactaatatggttgttgtatgattgctaacatgacatggtatgagattaagttgttgtaagtgtttcaaacatgcatggttttcgtatgagattgagttggtaacatggttgttgtaagagttg

SEQ ID NO: 195256 - DNA, 1801 bp, Cannabis indica
agagagagagagagagcgagaggaataggggaagaaggaaaaaaaagggatgtgtgagtgttatggaagatggaaggcataggtgcatgatgacacatatgatgaggtccagtccgtgaaagttaattccttacctttttccatttggaatgattatcccataatttgtttcctttttgtttttcctatttataaaattccaactacatcatttaataatatacatctatggacatttctcttcatcaagaaccccacccaacaaattttctatgagaaaaagcctagctagatatgtagctaggttatcctatatgtttacatagataagttcaaaagcaatgttagagtatagtagtagtggctatagacattggactttcttgggttttgtagcttccttggctgatttttatatttaaaattaaaaaaaaaatatagaaatagaaatttacttcagagtaatatatatgatatttttggctttctattaataagattaattttgactttctctttctcaatatcaaaacatctatacttgtaaatatatgaagtcaatgaaacaagtttacaattctgagttttttttttcttcgtttcttgaactttaagctattaggttttttttctcttttgagtctcacatgtagttactatttacttctgccacttttactgttgacatgtgtgacacatgaaaagtttacagtatcagtgcaatcaattatttgatcatcattataagtgtaaaagttggatcgtgtaaaaaataaaataaacgtacgtatatataaataattgttcgctcgtatatatatatacacacatttatgtgcaaatatatttgttaacagtttgattttgaagcatcgtatctcaaaaagtaagcagctgatgactaattttaaaaattatatgatgatgattaaatcaaacaaaaggctacgtactatattattgttaaatatattacagttctcgttttcattcataattttatatgagattggcatatatgttgtgatgaacagataaacggtttggtgattgttatttcaaggcatttccattaatgaaaacgctgttaaactactatattaattaattaatgccatttcttcaacaaaaaataataataataattaatgcaatatacatgtttgaaacaatcgaccgtttcccatatggttaaacgtagattcttttgtcctagtctttttttctggactggtagttttacaaggagaaagttacagtagttgatgtgaatatatataattggtaataattatcttgcaaacatcttatgagcacgtgtatccatgcacgtgaccaactgtcaaagaaggtaaactccaaaggaaacgacgaaatatgtaataaaagggaataatcgtcccatgccatctcatatatattctctagatttataaaccacttgcttctcttataattatatacatgtcttttaatttatatatgttgaaatgtcttagataatattttgtttctttattattaagtactagctagtatatatgcctatacatggctgcaaaaaaaaacgtttttgtcataaattaagtgttttagacatgaaaagaggaaaacaaaaaaaaatcattataagtcatagataataatatattaatttgttttgtagatatttaaagtccaagctgctatctagccctagggcttttttccaattataaagaaacaaaaggttaataaatggatcgatatgcatagtgctctttttcaaaagatagctagtagtcttggaaaatggacaaga

SEQ ID NO: 195257 - DNA, 1805 bp, Cannabis indica
agtgcatccaggagcgagtacgaggacttatggagtcacagtctaagacactgattgaaggactttcccaaataggaaagatctagctgcagtcgactatccaagacaacttccaagaggaacaactagccacccggagctcttttctggaggagggctagttttcctgaacactgcacctggagaagacatgatagtcattcgggaacaaccttccgaaagacaaaacttttcataaatgacttttgaagatcttttcatttaaaaaaattataccacaatatatacatacactgaaaagaagtcatttctcgagctcaacaaggcattacaatttacagttgcttcctacactacaatctacaatcatgttaaaatactatatagatcataggaaattaacacccttagtttcaaagttaagcataagacaaagaacaacagcaataatgatgctttttaaatttgatcagtgaccaagtttgggaaattcatcatatataatggagatatggatgacaataatatggtggaacaatttaacaagcatactatactatcgatcgattatattatattatattattatatactttgttgcttttcttatactggcccatatatagcctggcaaaaaactaactttcaccttacaccaatcatggaaaataatgtagagaagtgtcaaattttggttgtaggaaccaactcataagggatgaataaggtatttttcatttcccttttgtacatgtgctttttgaattgacagctgattagtttatataaatatatatatatataatatatatatacatattatatttttgttgaggaattataagcaagctttgtgcattaatatctcatacaatacaaggctcatttttccttttgttatgcagaaaaagaaagattagaaaaacataaggacaaagcgggccacatgcagcaaaagaagtaaaaggagagactagatctagtattaaggatcaagctaagaagtaagaaccaaatatttttgttaaaacattttcaatattgagtgagtgacaaggttaaggttacattacacgcattaaattctctcctagtacatatctactaaagaaacaagagcatattaattacacgtgtcctatttatttatggggttttataatttctttattattataagtacatattatctatactatagaacgattacatgctccataatatctggggaaacaataactaaattgcttattatctataaacaaaactcactgatttaatttattattaacacaatgattcaaaagtacatggtcaaaacagagtctggactggatatcacttacaatatttcattggtcaagtaaccaaccatttctaaaaccctgagatctcaacaagcttaacacttaacacagactccgaacaattattaccaaatctcaataaaaaagaaaaaagagaaataaaaaaaatgataatttaccagacggaagagaatgacagaaacatataacaatgttacacaatcatcagagataaatactctaattgacaacagcacagttcttcctgatctcaccatctgagccagtcttaacattaattcttcccattttctccatggacttagcaaactcagtgaagaaattctctgagccttgaagaagtttttgcatgtaagattttgtgaagctgtttgtggtcaaagcagagtcagattggaagagtcctctcctcttgagtacgagggtgtaatagctaagatcaaatgatttgcggcttccagggtccatctcaaccaa

SEQ ID NO: 195258 - DNA, 1981 bp, Cannabis indica
gtattgctgtggtggttctgtcagtgggtatggaagatggaggcctcaatttttttagtgtttacagtataaaagaaaaaagaaaagggagggcagtataaatgtaatttctggcagtaaaattgtaaacttttcaccaaaatctaacatttttgtaaaaacccccagaaatccttcaatttttaccataatttgtgttatttctacataacataccttgcgaacatcttccagaaaagcccagcccagcccagattagtgtaaatggttaattactccaatttgaggcttatgtctagtccagtccattaacatctgggcctgccaatcggacacagaatatacgcctgaatttaccatgtaattcttgaaccatcgataacactgaactgaacttcgttcatcaaaaaccctaaccagttaacttgagttctccatcaatggcgtcccaaatggctattttcagtcggacccgaaccctaattaagaactttagtcaaaactccaacttgaaatccatcaccaccttcgggttcctgagtcaggagccccagctggcggagccaaatcacgatccggcaactccacttcccccgaacccggcctccggtagccctctataccacgagaactggaggagcccgatcacaaatgcttccatggctcagtcgttgctaccgctcaatttcttgcagcggtcgtcgactcctcaaatccaagctttgtcgcagtccctagacagtgcgagccttatgaatttatttgccgattggatggcttcgcagaactgggccgacatgaaacagttgtttgagtactgggttcggtcactagataagaacggaaagccgaacaagcctgacgtgaacctcttcaacaattacctgagggccaatttgatgaccggagcttctgcaggagatttgctggatctagtggcccaaatggatgattacgatgtcaagccaaatacagcgtcctttaatctagtacttgaagtcatgcaccaggccaaagagactgaagctgccatgaaattgcttgaacggttggttgtttttctactcccatttgtttgttcgttacataaatattcatgtttaaaatgcgggttaatatgtttgtatttatataattgtatagttgtgtactatgctgaattgttggaatttatacgagtatatagaactatgtgtctgtgctgaaacattaacattggattacgaattatttttatgattgaccttcttctactccaaaatgcttgaaacgtctgtttcttaatttataaacaaaagaaaaaatctaaagaaattgatgatactgaacaaaatagttgccatttgatagggtagctggtgtgcttaaaaacaaagttttagtaagaattagaagtcacaattttgagttaacccatctttcaattcagtttgcattacgtagtcgtagaggctctttgttaaaactaaaaaaaaatgtcttttttttttttttgtaaattgcagttatagtgaaaactatgagtgactgttcaattaaaatcaatcctcctagtgtttttgaggaatttttatggttttatgaatttcttttaaaaagaatgcattgctgtattggtgaatgaaaacaaagatttatgtgtttttaagttacgcaggttgtatcgtgtctaattgccatgacagtgtttatgttagttgtcttagtaaagcattttggtacatgtacttatagccccgtttggcttagcttctataagctcttttttagctttaagaattaaaaataagtgtgtttggataaaaataaaaagtccctttttaatttaaaagtcctttgcaagaagctaggatttgttaatactttgaaaagtactttcattaacaaaatcttcaatgggaaaataagacaatgcttatgattgtcttatacttcacaaaagttatatattcgttaacacattgacttatctcattttcac

SEQ ID NO: 195259 - DNA, 1359 bp, Cannabis indica
ttttttttttgaaagaattattgggaatgtgtttgatgggcatattattactcatatttaatattcaaatttacatatattatagtattcttttattttttacctttggggaaaatctttgttgttaaagtccaaaatacaaaatagttgttgaaaattaccacaaaagttcttaacaatttgtccccatgtttattggtgtaaatgcctggctctatttcaatttgtcatactttataccaatatacatatttttatatataggaagttgttttaaatcctttatagtttataaagggtggcaattcaagacactcgtgtttgacatgaacacattcgagattggttcgacacaactcaaaaaattatttgaatttgctcatgttttattaattttttgtgtcacgaattgtatttgtgttaacgatctaaagtaaatttaagaactccaaacaacatgatgatactaaaagtaacaatttagtttataacctatcaacacgacataaacttttgtgggttcgatatgacacgaaatttaatgaagtcgcgttcatgtgagtattttataatattttcatgtcatgggacgtgtttcggtgtttgtattgacagtttttcaataaattaaaaacttcaatacgacacgaatgtgacatttatgcacgaattcacccctactttatatacaaatatataaatacataatgtatttttgcaaaattgtaaactttttctttgaattgtaaccaactatattgtttcaggaactatttcataaatctttaaaaaaaagacatattttaagaatttacatttcttttacattattttatttctttacaaaaatacgaaatttgtttttctatttaaaaaaaaaagtaaaaaatttctaaaaaaaaaaacagaatctgtgtaagtgtgaaaaaataatgaatccataaaaatagttcgattttaattactgtgtctaaatttcctttctttctaaccaagtatatactgtaaaaattactagtaacaaaattcataattaactattaattatatcatgtttatgaacaataagataattattggaaaacaaaataataaagttggtaaattttctaaaaaaaagtttagatatccagtaaaagcccatacattatttgggctaggctgggcccattacttctgcgtcttcttcctcgtcttctgttcattttaattttcgatctcaggctttctccaatggcgacgagatcgaatttttacaagaacccttccattgcttacaggaaagatttagtctcaactctgttcttcaaaacttgaaaggtacgtactacgtaaatctcctttctctctctctctctc

SEQ ID NO: 195260 - DNA, 1928 bp, Cannabis indica
aaaacagattagaattcttcaagacaagaaggttctaacatcaagccatttcataaaggaaaagaaaaaaccaattcaaacatacagcaaaaggaactaaaggacaagtttttttcacctagcaaagtagaagagaatatagcaaattcaactattcaagggataaagacaaaacattaatcaactccacggtagaacaaattgaggaaccaaaagaatgaacttcttaacaagggaacaaaacaaaaagatgggattaaaagtaggaatctacaacagaacctgcaaaagaatggtgagaagtcgttatatgtaataaattagagtaagggcaaatccgaaaagatgtttgctaaatcagctcattaaaaaggaaaaaaataagtaaataaaattattaaatggcaatgaaagcaaccctttagtccctctcaaaaggagtgaataaaacaagtaaagatataaaacgtttgaaccccataacacaccaagcattaaatgagagaaaagaaacaaaagagaatgctttgccactcggtgtgcagtttgtgaaaacggcgacagacaacatctaagcaaaagctatggttatcactcaccatgacccacatcaatgctatacaggtgtgaaattaatgatgttcagagaagggaaaaatcataagacatgaaaaaagttacagagaaattattagagcatgtaaaaaagtatgacaccacaaaaaagttaccaaaaaaatatcaatgttcattgttcatttactagcatcacaaattggagcctgagaattggcaccaacatccaaacattccaatttttcaagaaatatgataattaaaatcagcccaccttgatggaaaaaactaacagtcacactaggaaggagtaactcagatttaccttctccaccatgaaagtttcttctccattaacatcaacttcgaggtcacagcaaatctccatgacccaagaaaggaaaaggaaaaagggacaatccaaaacccactaattagaccaaaattcgctttttataactttttgggaatctgtattagtactcagaagaagaagaacaaatcatagagataaagaacactaataacaggaattgaggggagaacacaagtccatattctaggaaagagaagaagacaagcacaaaagaggtgtgtcaccaccttggttcttcaatggatagtctctatctaattgtagagaaggagtaggcaatgtggttttcaactgagatatattacacagagaaaacaaacagaaaaagagtgttgagaaaaaatgagaacagaacaaggagaataaagacaaacaagtatcatataatattcctgttgaagcagttagtgagagagagagagggagagagagagagagtgtgtgttgctatgtcttgtgagtgaccaccaggctcaatctgacattctccagaaacaacatatagtttaatacagaaaatgaagaggtgtatactcttgtcaaataaaaaataaaaatctctctttattttggggacaagcaaaacaaggaacaagaataagcttaagtctaaagctttatggctgtctttgtttagtttaaattaacattgtttataatagattttgttccagcttcatcgctgcgacgagagagagagggagagtcatttgtggctgtgcacccaccactactgtacctgcccccacccaatagtttactgccattttggttcaattactaaattacccatttccaccattctcttgcgtcaaagtaccaacgttgtagcaaatttttcacttttactaattagaattcatacaataattattatttgttgtccccaacatataaatttcacaattagaagtattcgtaaaatattgaatttaatttaatttgcacttgtactaattagattaaatttaattag

SEQ ID NO: 195261 - DNA, 1559 bp, Cannabis indica
gcccaatcgtagagtttgctgttgatatagttcaaacactgaagcttaggaaaatcagcaacaacgaactcagttcaggccccgtgatgattcacaagatgtaaagcaaataagtaatgatttgaacgaaccagattcacatccaaatgataacaagtccagaaaacgaaaacccagaggtgagtatcaaaaacctaacgataatgcagtaaacaaaaaagatgagatcgaaaatgtagcttccaatggagctactgctggcaaagaacggagagcgtggaagaggcagaaaataatccagcagttggaaatgtgagaaagccttcattgaaagaaattccaggaggcgaaaaaccaaaagcagacgtctcggaaggaggagggagaaaacccaatgatgctcgaagatctaaatcttccgaggagactgatatgcagcctaaaaagaggaagcagcaaattcctacagaaatggagagaagaaaaaggccaaagaagaacaaagatccacaagggagagacatgggagataagcttgacatgcttatcgaacaatatcgatccaaatactcaaaaccgagctccaacaaaactgacggtgagagacctaattcagggaaacttagaaaatggttccagtcttagtcacatactgttacatgtctacattaaatcccacctttttttgtaatagattacagaagacaaggcaaattatttgcccataaattttgtgcttttaattaacttaacaattttgcttttaattaaattggagaaatgtcaaaaaaactaaatggtctagcatggctcaacagtggttggtggtattaagccgtacactaatataaatttacacaactatttttatttaatgttgtattaatttacaattaaatgtggtataaaagaaagaaactaagttggagagggaagccgtacaatacaactgagcccttgttggatatttaaagataaagcttgttgtgattgtgaatgttacttttgacttgtcataacataattttgactaaattaaatagctcatttgtactcttctccttcttgttcaagcaattatagagtaatgatgccattttgggttgtttattttttgttttttggttgagatgagatgccattagacaagctttttgattgaatgttactattttattatcatgacagtttatggttgcaactcgcaagtacaattggtatcaaaatatatattataggaaaattctgtagtttacccctaagcggtattttagttgatccttttatttatttcggtatttaaaaaaaattaatctaatttttgtatgatcgctatgttgtagctatataccacctgtaaatttttagaaaattttaaataatttacaatattaaaataaagttttaacagttatttaccacacaaataaaaaaaacaaccatagatgtaacaaaatatctatattttatttttatcattgtaaattatttaaaaaattttgaaaatttacaagtgatcttttataattacaagtatacaatcatgaaaaataattaaa

SEQ ID NO: 195262 - DNA, 1447 bp, Cannabis indica
aaaaaaaaaacaattaatacctgctctgtctattttttcatattggattttaataatcatcacttaagatttattattattgatacttgatagtatagctggtttccctacattgataatagtaaccaaaaacatatggagggacattattaggtggttgtgttatatatgggccttaagattagacaatttaatcgtatggagatggtaaaaaggggttgtggtatgtgggcccactgctttggtgtagcatcaccccaactaaactgcatttaggcccaactactcctctcacatgcaatatggacaaaaacatttactacctaaaaatatgcatgcaaattcttttaactttttcttattttcttttttaattgtaaatttcatacatttcccatacaaaaaaatgaccctttttgtttttaatatgggaatatgaagaattcagtgccaatttctgcactaattgtaatatgagaaaatggatggtactagtaaatcggtcaatataaagggatctttggattttctagttgtaaatattaaaatacaccgtttgaggaattgttttaagcttttatgtttaaaatatcaagaatatattccctaatttaatcagtaaaagggaatcaaatatatacttttttttttaatttcttttgtaagtaacattacgggggttgttaacactacataggtttggatagatgaatcaaaaaataaaattattcgagtgttgaattttatgattattatttataaaatatagtattataatcatattatttgaatatatatttttttttaaagttgattacattttttaaatgtcagttctggtacaaattatattgtattttaattattctttatttattttttccctatccaagtccaagactcaaccatacttttattcatgaaacatgatggcggtacatttgttcttacttgtcaaaatccaaattattctaaagttgaagttgatataatgacagcccataattttcatctaataaccagcatatggatatatgcatatatacaacacaaatattttatatacatctttgagtttgtcaaagaaaggatgcaaacctgtacaagctaaaaaaaacaaggcaacaagaaataagttgagccttcccactaacacttttgtaatgcttaatttcttttctttagagcctatattaagccaagaagcgggtttgtattcaaaacattagccatcattatacattataatggttttgaaaagaaaggaaagaaaaaaaaggtcaaaagaataatggcaaagtgccttaaaattaacctctatgcttttctattaattaatttctattttgtaaaaaagaaagtacccaaatcatatctccttcagtgtaacgcgtcccctactctatattactataataatcataaacgtgtacacaaatacgaatat

SEQ ID NO: 195263 - DNA, 1772 bp, Cannabis indica
tgctagagattgaatgcacatctcatgaaagagagattggatctaggtgacctcaaagacaacactgacaaggcttttaaattcaacttcagtggaggatctgctaatggtgacttgcttttgagacttccagacaacaagatttcctccaatgtagacacaatatcatgtagtggatctcatatcatctcaatcagatgcccaatcatcattacaaaacactttgtgagagaaatttggtgtaggtctcaacagaagaccatagtccaatgtccctgctatgtacctaagaattatcttaattactgttcagtgtgtaaacaaagaagttttcataaactcacacactttgttaacacaaaaggcaagttcaggtctagtgatagtggtatactgcaaggctctcacaatggacctgtatagagtgacatctttgactggttcactcccataaattgagagtttaaggccactattcatgggagtgttttttgtgttaacattttgcatataaacgttgtagagaaaatcttagagatgcttggtttgagagagtaaaatctcaactgaaaatctgcttacttgaatgctcaagaaatagtctaccaaattaaccaagatcttttagagaaaatgtagagttgagtttagcaatgagctgattaacaagtgtgtcatcatttatcataattaaactatcattagatgcaatttttggatgtgactttgatgaacaaggattgatttgctttggagaagaaaatgccatgcttcaatagaattgtagagagcttctcaaagcagggttctaggagcctacttgagactatacaatgctttgttaagcttgcaaacatggtttggataggtttgatcaacaaaatttggtggatattgcatgtaaatttcttcttgtaaatctccgttaaggaagaaattattatcatccaattgcctaatagtccatccctttgtaacaactacagtaagcaccactcttatggtgataaatataacaacaggactgaaagtctctaaaaaatcaaatccaacatgttgatgaaagcccttagccacaagtcgagctttgtacttgttcaaattgccatatgtattttgtttgatcctgaacacccatttgcattcaattggggttctatttgccaatagagaaaccaaaatccaagttttgttatttctaagagcatgaaatcagtgttcatagcattgttccaatgaagttcttaacgagtttacttcactatttttggtttcacaaatgactaatagaacttttcgtttccttttaccagccttttgtctagttgtcatttgatgagtagcagctgtggacactgcaagtaaaacatcagtaacatcagtcatataaatagtagagacattggtaacctcatgttggatagagagatcatttgattattaatttgggttattgacaagtgcttttgggataaaagtgagaggtggcatggaggtggaggaagagggaacaataggatttggatttgctgaagttgaaccaggaccaagaagtggtaatggaaggggtggatagtgaattttggagacgtctgaaggtgaggggaggtgggaataggggtcagggaacaatacaaccgacgaatgaggcatgggatgagatacttgcactaaatatgatagagtgaggaacgactagagttagagtggtgagctaaactgaatgagtgttgttgagttagagcagtattagaataatgtaaaatgtgttc

SEQ ID NO: 195264 - DNA, 1541 bp, Cannabis indica
tttttaattattttttttaatttcttgttttatatcccctctcttcaatctgttcttctattagctttctggataccacatccattgtctttcaataaaatcattctttgaaatttttaagatgaaattgtagggagtaaaaacttgaagtaccttgattgaaattagataggcatagttttaatgaagtaacctccacaaaagaaaaactaacaccattagctcttttaaaaaattcaacaaatgaaacttgataactcaggaagtgtatttgtttatcttttgtgtgttatagtttttctttctattgtcctactttttttaaattaaactcctctacaactactacaattagatttatactttttttttgttttaaaaaagaggcataggtcaaatgtcttggactgaactcctcccaagtttattgagagtccttgcttgccttgttaacatgagatcaagggagaatttgctattaatgaaacaaaaactatgctgactcaaagctaaaaacattaacatagtctcttaagttacaaacaaccagaaaaaaacatatgaaaactagtacagtaggttctcctattacatacgaagtaatatttaaacaagaatttttgggttttccatgattttgttgaaagggaaagttaaattatgttatgagattttctctctttctctctctctcatgctatgaagaaaacttgtggttttgttgtttaaatcttactttttttggcatattctactccctgctgtttaaaccctattatcgaaaggaatagaagaatcttttgttggactaggagaaggttttcttggacagaagggaaatgcagtttctcttattagtttttaggataaatattttcgacgtttctcattgtctttgatttttgtacagttggttggctttgttgtgattcaagaagtgaacattttgttctatattcttctttttttttaaaaaaaaattgattaattaatactaaggaatcgttgcatgataatttaccttaaatctactgatagttgctcattcattgccagggtaatgcattgaatgaatttttggtgtcaaacagtttacctttaaggcctggagtagaagagtgagttgccttatcctgattagatatggatttgaccatctaatatacattctcttcaaatgtgctatcatttctttagctctgtacagtttttatgattataattttttctgtagaaacttctatttcaaaagcttcacatgaaattttatttgaaaaaaaatgaaaaaaaagcttaaaagaaattttatttgaaaaaaatggaaaaaaaaaagcttcacaggaaattgtgcaattttagacttctctaatcatcattccattgtgttcagacaatgtgtttgtttgatgaccgtttttactcaaagcttaagaaagactggagagagcagtttcaagcatttgatattcgacactaattggtctgatattgataagaaattctttcaagagttaattcttagcaaatcatgatttggtagt

SEQ ID NO: 195265 - DNA, 1944 bp, Cannabis indica
ctctctctctcactcactctctcagttcacactcttctttcttcccttcttttctttgttatataaatatattaaactctgctttctttttaagcagtctttacaaaattttccctcttataaataaccattcttcctcttctctctctctctctcctagggtttactcgctccttctttctcctccttctccgttctactgtgattttacgacgtttgctccatttctagggtttattattattatcatctcactccctagctctctccaacatggcggccgagaagcttagggatttgagtcaacccattgacgttgctgtacttgatgctaccgttcaagccttctatggtaccggatctaaagaagaggtaaccaatttattatacttctttcttgatttttgaatttggcgatgaaattcaactcttcggacggactcttaactgtgctacactttgtgtaatcgctgggtttagtgttgttgttgtgtgtcattgcgattggtttgttcgtgtttgtggctagggtttaacgttgatgtgtttcgcttgtttgggatgcatgatggtgatttagggtttagtgactttcggttggttctttgtgttgttagatacgtttgttttggatacggtagggtttactggtttcttgttatgtttttggtgaggtgtttgacgatcaatggcgtttaatttaagctgtgactatgagtaacctgactctttcatgctttttgagaattttgacgaagggttggtgtgtaaacatttgggtttttctgattatctatgaattctatgaatagtactttcaacgttcgtaagtgtattggtagaagtacattgccgttttcatttctccaacactttttttttaattattatagggaatttgaaatttatgcgctttaaagtgatgaatatcgatgaatattcttttgcatgatatagcatgtgttacttatgccatatgccatatgcatatgctaagagtccagcccatgtatacttattcctcgaactttatttgttttttttttgggtaaacagaggactgctgcagatcagatattgcgagagttgcaaaataatcctgatatgtggctccaagtcgtgcacattctacaaaatgcaaagaacctgaataccaagttctttgccttgcaggttggttgctttttgttttatatataaaacttttaatatcagctatatgtacaggacatccctaataattcattgggaagtggctgatgtaaaatttgattgtcctgagtggttgcataattggtatcttcctgtctccatgcaggtgttagaaggtgttatcaagtatagatggaatgcattgccggttgagcaacgtgatggaatgaaaaattatatatcggatgttattgtacaggtgcagtttttatggtggactttaataaatgggatgttaaaattgttggctatgtctttcagctagctatgcttgtattacgttgttttgacctttgatttttgttgcatagctttcaagcaatgagacttcttttcgattagagaggctgtatgtcaacaagttgaatatcatattggttcaggcaagtcttcttcttttgagcttcttagtgcaagccaaatgctattgacagcaaggctttgtgtttattggtgatttttctggtctttccttttttcgtctttgtagaagatttatatccaatcctaatctggtaaatattgtcaaatcgcttgctgctatctaatgattttaattgtcaaatttcatgtcatatcaatgtgcttcctttatgtttaatattcagattttgaagcatgattggccagcaagatggcaaagttttattcctgatcttgtttcagctgctaaaactagcgaaacaatttgtgagaattgcatggctatattgaaggtttctctctctctct

SEQ ID NO: 195266 - DNA, 2568 bp, Cannabis indica
aagttttttttttttttaatttagtccatatatatagtatataggcttttgtagttacgagtagtaaggttaatggggatgatagaagaattaaaacagtaaaactttcatttattattattatttattattattattatttattattattattattattattattattattattattaatttatgcaataatgtgatcaattggtttatttattcgatctgcatgacccataacatattaacttatttaagttaataggtcttaaaactaaaacttttacttttacttataggtaaaattataaaataaataaaagttttcgctaagtttaattatttatttattttttttccataaaaaaaaactgatagaagttaaagtcaaataaagtcatgtattttacaaaagaatattgttattaagctccttaataaggtgtttaatacttaataattttttatataatttattaaatcgaaatatgcagatctaatattgaattgcaaaataaaaaaaaaatgtcctaactcctaacatttctcattttagaaaagggtttaatggaaaatttattaggaggaagttaagttaagaaatatttttttttatatcaattaattaaaaatattttatattatattttattaaaatttacttatttttatgagtgagttgtctaatataattttatccttcactgaagtgtaacacataatttatattaatttaaaaagtataataaaaatatcatttataaaaatgagtatatcttaaaaaatataaaaataaaagtaaaaaattaaaataaataaaataaaatagatatacaatgcaatttctacacacaattattgtggtaggacacttctgctctactaagacaaaaacctaataattgactccagccagattttttttcctttttttggaagctgtaaattaaattgcaatgacctatcttttgtttgttattttatagaattaatgacctgtttgtatggtatactgtatttaattttatatgaaaggatcattgtcatgttcttgaaaaaaataataataaaattttgttgtcatttatctaatttgacaatttgtaattgggagtatcttattgttagtgtcgtatcaatatcaatcagaattagaaattaatatattagatatggtaacgtgtataattattttattataaaatatttatgtatagagatagtggagtatggtatggttagaataggagttaagtgagcccatgatctttagttttcactcatatcaagtttctctgcaactctttgaaaaaatgagtttcaatacagcacacgagtacgaacataaaatgaattttatgagttaagattagaaaaattaagtaaaaggaacaaacacatcaacataacttgacatgaaataaaaatatattaaatacgtgatgtgcttaatttggatttgacataattttttaaataaaataaaataacaaattgttaataataataataataatataattttgtaaaagtattaatttaattttctttaatatgaaattgatttttttttaaaaaaatatagatctatatattaaaagacagagtaagttaatataaatacgattcgattttttacaaattaaattagaattgaaaaaattaaatgtgagtcaaaaataaatcaacacatttaactcaaaatatatatgttgagaattatgagttctatttcaaaaccaattggtaatgaattgagtagctcatgttcttatatacagctcaatattttgccgagtggacatgtgtgtataggtgcggatcaaatatgatcacttgtccggaaagaatatggctctaataccatattgaaaattatggggttctatctcaaaattaattaacaatgagtggagtagctcatgttcttatatatagctcaatactttattatttatttcataggagacaatgtccacaataatatataaagtagttcaattaaaatataataccaattcagcatgcgacacattttatcacctctaactgcttgctacaatattttctattttctttctttgagggaggtagctccctttgccacaatactatcaactactcttgatttttcttttcattctttggctttgagtggtattccagatattaaaggaaaaagaaaaatctccgccacgtcactagcaagtaagaccaaatgagcatttacaatcacgaattcaacactaggggtcccaaaacccacaacagggcagctaccctagcctcttctcccaaagccttagataataaactgagacttggcccattttgaaatttattggactgttctcaaacttctctgtcaaaaactcattgtcctactcacttaagttttctttgggtttttttttttttttttttttaaaaaaaactttactatttataatgggtaaggagttagtctcacatcatcaaagtatgtttaatccgtaatcaactttatagtcattagatttagttgtgtagctatggttttggttaggaatttacatagtatactactttagttca

SEQ ID NO: 195267 - DNA, 2482 bp, Cannabis indica
tctctctctctctctgtgtgtaaagattgaatttttattctcaaagaagagagattgggagctggttgagtgggattggtgctaatcacacccaattagatataataggaagaactgttgaatccatacaaagaatataccaacagtatcaaacatatatcgttgtacaactaaatagtttaatacaaatttgcaataatacccttcttcttctttttatttatttttagatttaaatattcaaaagttaataaagaataatactaccccataaataaaaatcaaatatttttgatgaaaaattaagagattactatttagactctatattctgaaaaaattattgattagactctccgttttattaaatgagaattcaaactatgtgtgttttaaaatggtataaaatagacactgaatttaatttttatcaaattaaaattttttaatgatctaatctgaaagtattaagacaagaatgattatatttttttttcaaccgttcgtgctagaaattagtttcaagttggttatattaaaaaaaattaataaaaattgaattcatgatctattttgtaatattttagaaaatacagagtctttattgttatttaatgaaatagaatgacttatttataacttttataaaatacagaatttaaaattgtatttacctaaaaattaataatggaacaaaataatagtaagcaaagtggaaaatctaatgaggaagttcttaatggaggaaaaaattaatttaatttataagtaatatgcttactttaaagaaagcaaaccaccaatccatctcttaaatttcttttggtgtcaaattttagaccccaaaacaccattaccactatatttttataattaaaaactttaagtattaaaaaaaaaattataaagaaaaattgtacatagagcatagagaagaattacctaaaattgaagcaatctcaaagatcactttaaaactttttatttgattttttctatttatcaaaatatgtgtttgattatgacttttttgggcatctttgtatatatatttatagttagcataaggaatattctttaagctccatttaaacacactcatcaataagaaacaatgcaaattagtgttgtgtttgtttatttagagaaacaaaaaaggaatatttatttttcattgataatatttttatgtccaaaaggctaaaatggttctttttggagagaaaaataaaattaaaacaatggaatatatatagcactaaaacatataatagcaaaaagaaatagtaagaaagaaaatgacttgttcctaacaacataatataacattatgaaaattaaagggtttataataataataataataattttaattaataattaatattattatatgtacttttctctagctatgaataattttgaactgatattttcatccaataaattcaagtgaacccctggtgatgacaaggggtcataattttgcattgcatgcatatacatttattggcttctcttttttaatttttaatttttaagtttttttggtgttcttttcatacatatgtaagcatttcaaaagtgtaatcctaattgagaagatcttcaagtatcttgttgatctattgttttgtttttttttttttttcttgttaatagtatattaacttatttttattattttacaaagccaaccccacctcaaaatccatgcatgaaagcacaaaatcaagttggtcaattcaaattaattatttgatcaccagctagctaagctagttgtcttgtgtcattataatgtaattaagtttatcacaatctaaaaattaacacaaattatttggtaataaaactatggaatatgaattgagtaataattgatcaaattgaaaagtgagaagattggaaaagaagttcttaatattatttactttcttaatgaaaatatcaattttattaatcatataactttgttatcaaattaagtaacaaatcaattaaaatggactctaaactaaaatgttgaaccaaggtaaataataagggctctagccaaactttaaactaccctattagttaattgcttaataaaaaattgaaacattttttaatttgctaaggctaagcaaagatttacaattttgaattgcacaaccaaacaaataaatcataacaatattaaagtttcgtaaagtttatacgtattattagacaatctgtctccatattcatattctcacaactttttctttggatccaactaagacctccttgacacttaaaaaattcagcaaaaattggctctactgtgatttggcaaaacgaggtacatccactataaaaaacagttatttttattgacaattttttagtcacaatataaattttttgtgactaaatgtgattttttatcgcaactaaaaaattactcgtgactaaaacacagtatttagacataagttgtcactaatttactttt

SEQ ID NO: 195268 - DNA, 989 bp, Cannabis indica
ataataataataaaaaagaaatacagaaacgctatatttttgtaagcaccaattacctcattaaaaacccactagttaaagttgttaatattatttatacaaaggaaagacaattaatataagaggttgtcttaagtaaccccttttaacataaacagacccaatactagtgatcctcttgcatgtgtttctaaacctcaaaaacctttgtgcaagaactcacaaccaacaaccaacaaccaacaaccgtaccaaattacccactacaatatacatacattggttttgtaattttatcactaatggagaatcaagagaggagagaagggccaaaggagaggagaaggaagagggaggaggagatgaagagaaaacaggaaaagaaggagaagaagaaagagaagaggagaaagaggaaggagaacaagaagttgaagaatcagaataacaaggctaagaaggtggtaaaagagtacaagaaacagtttaatatttctggatcaactaattatgatcattctcaagacagagttggatccattgaggaatatttcaatcaagaatttgattcacaacttaagaaacttgaattcctcaagcaatttttcaatgatgtcaaacttaaagtgagagtgaaactattggcattgtataaaattctcaaattggaacagaattcctctcaacaaacacaaaaagtattggaggccatgttgggtatgcctgcaactgctcaacaacaagattcaaacattaattaattaatgtttgtaaaagaatatgagattttctatttctttctatgagccctagtagtggttttcatatttcatgactttattctttataatctttgttctttatgttctttataaatttggaaatgttgggtttttctataatgttcttttttgaaatttgatgatattttgtacttcatattgaatatatatatatatatatatatatatatacgtacactattacct

SEQ ID NO: 195269 - DNA, 1257 bp, Cannabis indica
agacgacgactcagactcgactctactcattttgtgtatttcttcgttcaaaacttgaaaactattagtttaaaaaggttgatttacacattccgttaacatatgacttatatagtttcggtacccacaaagtctacatcaattttattttcagtgtgtaatcttcaatcgacttgattttcaatcgatacgatgagtcgacgacaggtgaacgatttcagatgaacgagaccagcacattcgcgtgatcatttttaattattcagaaagtaagagactctcttcctctctgtttgtttctttatttttccttccattttctcgctacattttgatgttcagggacgacaaacgaacttgcttctgtccaattatcttctctttttctttttcctttttagatgccatttggttttcaagatacacacttgataccatttcaatccaatgacgctctcaaaattaggttttgtgggatgttttctaattaagttgaacctaagtttttaattaattcacttttttttttgtatttttggaatttctacactttttaatccctacagattagaataaggatttttgttggttgtttgattctgatttagggataaaatgctttgtgattgaaatgtgatataacaggaaaatgatgcgaccaaggagcattttatagaaatttgccaatgtgaaatgtttctccccaagagctatcaaggagtgtggtgatgctccagtgtggtgtcgtttgcaatggtaattaatttgttgaataataataatgaaatatttaaataagaaagaaatttatgtaggcaatttattatccttgcagattatggtttggggttacatctttgtgcccttgaaggaatcttgcaaagaggtagatagtcgttatctgttattgtaaaccaggagtaagtattttaccatttcttgatgatttaataattcaacgtaattaagagaatttttaacttttaatttttaaatttgcatctatgattgtaggttgtcttcttggagctatgctcgagtaaagaggctacttacccctcagatttcaaaggtctctcttaatggtttttgttatgtatgaaatatcatttctttttaatgttttgtccatgtaaccttttcaataaatgaatggtgatgtttgttgctttaaaatgtgtataggtataaacgtatgacttactttctaaaattacttggcatactggatttgttaaaattactttttttttaaaa

SEQ ID NO: 195270 - DNA, 1297 bp, Cannabis indica
aaccttcttttgcaggaagagcaatgttgatcaatactgtgttgctcacaatgcattcatattggagtcagatcatggtgcttcctaaaaagatactaagggaaattgcagcagtttgtagagcttttcgtgtggaaaggccaaacatcaacaataggggctggagcagtggcatgggacatgatgtgtgatgcaaaaatgatggtggaattggtttcaaaaacataatggaatggaacaaaactacaatggttaaatatgtgtaggctgtagcaacaaagaaagacaatatataagtcaagtgggtgcatgacgtttatataaaaggtgaatcctagtgggaacacaaatctcacccacaaagtagctggtactggaaaaagattgtagctatcaaagatgaggtaaaaattctcactgatatttgcctatactatatcaaaaggatatctattgtttcataactcttgagaaagagtgacttggaataatcaagtttggggtagatttaatactcccaagcacaacttcatctattggttagccatctaggaaaggtaaaaaatcaaagaaagattacatagattcaatgtaattgaagatgccgattgtgtgctttgtcaagcaaaggatgaaactttagaacacttgttcttgcactgttcttttagccaaatgtgtcttcaccagatgaagagttagcttggctggcagtcatcctctatttcttcagagaaggtgacaagatggatagaaagagcaaagatatatcgtgtcaaaaagaaggtttatgcagcagttctagcttctctattgtacaatgtatggagagctaaaaatgggagaatttttctagaagaaaatgtaaatataaaagttacagtgcatagagcaaagaatgatgtaaaaactagaatacaaagcatatggcctaagtgtttggtgttattttaccaagatctagatttactaccaagtatgttgtgtaacattttaaataagaatttctaaaacaatggaatttaaacacatataaagttcaagaaaccttacattggttgcagcagaattaaatgactccttccaatctaatctctaacccttgtatcctttctgtagcagagtatcaccaagatctgggcccgattctccttcaattgattagattcttcacagtcttacacactatgattgagtaccaacttgctatgtatgggcatgtactctatcactataagagtttgaaaattgaagagagaaagagtgaagaatttgaaaattagagagagagagagag

SEQ ID NO: 195271 - DNA, 1497 bp, Cannabis indica
atatatattacattttttatcaagaatatataactatataataaccttttctctaaaaaaaaaaagaagctaaaaactatatttgatatactattactattatatatagcaccttataacattagccataattaatctaattaattgacttatttatcaacagctctatttggtggaggcaactcatgtgatatacaatattaatttactttgattttcactaaaaaataaagatatataatatttattatatgtcaaaataattatatatatatttttatctatattttttttaaataaaaatgcaaacatgcatacgggattttaaagttgggtattacattgattgttatatataggctatatatcatgcttatatatacaatatatgtgtaaactaataaattttgtataatatatattattggttaaaaacaaattgtgtaaatgaaatgttatttttttcttaagctctagaatgaaagtgagtttagttggtatgctgaagacgattgtaaaggctcctaactttggaaccttgtaaatatattttggagtttgtgttttatatgtaataatgcttaatatccaggatgacagccgtaatctaaaaatatttcaagtgaatattaaaattttgctcaagtcaacaaattcattgtaaggacaggaaaagaattattttaagagatcttctaccacacaatcttgggattttaacagtacattctgaagtgagaataaggaaatctccctttaaatacttttgaatgtggaacaaagcaccgagagagattatgacaaagttggatatatacaccaattaatgggactttaatgtatttcttggtgaacaaactcaagaggttgaagatatatatggtacttaaggacattaattaatagggaaaaattaattatttagcatttcagaatcgagattattaacaaacttatattgactaccagaaattgaattacaacaagctccataatgtactggggattaatttaattgagaaagaagagtaaggtaattttcagttattcaaacacttgctaggcaccaagatggtaaaagaagagttgtaataccaggtgtaattaaatagggatcgattttctctaataagcacaaataaattttatattggcaagttttactgatcaggctgcagaggtgaaataagtttgcaatttcgaggtgatcacagctctagagccaattggatttggaagttttctctttcaagattatttggattatttaaagatggaaaagttgttgaaggagttaaatgctacggtgatcactttagatccaaagaacaaatgtgcaactaatgtaagtgaataccctctaattatatgttgtaatgttatttataaaattataacaaaacttataagttctcgattgagaattgtactgctagacctaattttttagaatcagagtggatttatgcaaggaagatatattgtctacaacattat

SEQ ID NO: 195272 - DNA, 3373 bp, Cannabis indica
  modified_base (419)..(419): a, c, t, g, unknown or other
attgctaaaatatattattagtagtgtaattctattattggtgtaattaagtatcaaatctcatataatttaaaaattaactttcagaaaatatcgctaactaatcgtgaagcgccacttatagaaagtgtggatattattagtgtttaatatttttcttagtgtaatactattattggtgtaattaagtatcagatcccatataatttaaaagatcccatataatttaaaaattaactttcagaaaatatcgctaactaattgtgaagcgccacttatagaaagtgtgggacacgaagggtgccccataacaattcggacaaataatatactcgatgtcatactggtaattaagtatcgaatctcatataactttaaaataattttaaaactttaaaaaaatatttttaaaaaaaatnttactaatgaattataaagcttgacttattaaatgtactgaatacgattagtgtcgataaccatgctcgtgcagataataaactaagctacaaccccaaaattccaatgagagttgttatttcgccatttccaaaaatgccattaacttagattaattaataatgaacaccaaccaaatgacaaaaaagacatgttctttctactaatccaaatgtttttttatgtggggtttattgatttttaatctcaaattaaattaagaaaagaaaaaagaactaaatttgcttaattaatcttcctagagaacccaaccgcaggtgcttactggttcatgttctattaattgtttaatgcgttacactgttcagtgttgtcaggcatatttatttgaacatttaaaaaagctgagtcgtctcaacggctatatatttatttgaccgttaaaatcggaggtgccttaggatccttaatcaccggcccattgttttgatgggtttctcttttgggcttcccacgtgccaatcagcccattggctcttccctctaccgaccacgcttcataacatatacatgtggattttttttgtctaataaatatatattatattagcaaaggatgtcggcaagggaagatgaatttgctagtttttttttttttccttctataaacatatgagtatacttgtatgcaaaattgatgtttgacagaaagtcaacggcttatattgataaataatctatgcagctttgattatagggtgaaatgtagcaacgattaaaatgtaatttgtattgtactaattaatgcctaatgcatttggtgtgtaagttgtaactggatttttgctctaattgtctattagcatcacttttcttttttctatggagaagagaaaaaggattaaccaagttcagttattagatctcatattgtactatatatatcgatttaaagcctaattaattaattagtgttagctgtgtactttgtatttggtgaactaattacaaatattcaatgaacatttagcttcatatgccctaactcccaatcttaaaattgatacatatcttatccacttttcttaaattcaaatcagactttgtatcaaatacgtcataactcatatggaaaatatacgtggtcaattcaggcatatcttgagaccaataagaagggaaatgacttgggattgtacatcccaaacatacttatatttaagtacgtagtagtcttcatgtttgattttgtgtggttctaataacaagtcagtttccaccaaacaaaacacacaaaaagctaacacagaagtttgtttgtttggacaagccattacagaaagtcaattttcgctccttcgaagtgttacacaattggttggcaagtgttagggatattagaaaagtcttagtttgtgtttattttgtttacttgagtatattgaaaaaaatgtaaacttggatgacgtaattaagcttgttaggccatgtatatatatacctaataacagattgagtataaactaaagaagtaaaccaaaatagttaattgatgattttcaaacggccaaaataattatgtcatgatagtatgatatattaatttgttcttacacgacttctcatctatatatatatgggtgtacttttaatggatattaccatgaataggtaatattaaaaaaaaattgagtttttatacttaattttttaatttaattacaaaaatctctcattttttcattatatgggttgaggttgtttcatcggttgaaaaaataataataataaaaaattcggcaaaaaaaatgataaaaaaatattgagttttatttaaatatttttcatataaacttattattgatataatgttaaaagatgtaattttttattttttttttaattaagtagctaatttaagcgtagaaattcaaatttctcttttattattcaccatcggatcaaaatctaatgacttaatatttttaaaattaatatttttagttaaatttatttagtactcattgatggataatatccattaagaagtgttccatatatatatatatataaattaagagtgtctttgtaacactttaccaattagttgtttttttaattaaaacatgaaatttttctaaaatatattttgtaaaattatttttatttttttattttttaattaagaatcaaaattaaaaattttgaaaaaaaaaaattacttttagaattttttaaaatatattttttttttcttaatcaatatatttgactctgacagcaatttgaatattgggacacggactccggcctcagccctagttccagactcagaccaccacctcggatctcagacttgaatttaaactttatttaaataaaatcaaaaagaaaaaagaaaataaagttataaaaacacttttgttttcgtttttagaattaaaaaataaaagtggttatagaacgtatttttatttttaaaaacacaaattttagttttattttggtgattaaaaaattaaaaaataaattttatgtgtagttcaatatagttgtgttaatatcttaaattataatacatgaattcgatatcagttcttgatgtaagtttgtgatcataaattcataattggagaaaatcatagagtccaacataatcaatgattttgtttaaaatttagtgataattcaataattattaatgattaaactttacttgatttttttcctttggtgagagtcagtaatattatttaaagaaaaaaggtaatttatgcattcaagcatgatgaaaaatttaaaaggttatttatgcattcaagcatgatgaaaaattttctaagttcaataaacacctataatatgatgacaatttctttttccacgtggcttgaaacaaaattatcccccatactgggatatatagttgaaaggatcaataacattgtaacaa

SEQ ID NO: 195273 - DNA, 1120 bp, Cannabis indica
acaatgacttcaagttagtgcttatgctcatcttttatctttttttctttaatttagcaaaggttttatagatttttgattttaggattttctatatattaaagcacttttaggaatatatttatatatgtgatatatatatatatatatttattgagtgttttattaaacctaatagtattcatctacgaattctacaccccgaatagtaggcacataccactgtcttgacattacaaaataaattctccttcctcttttattttgtgacacacatacacttaatagtgtggtatagagacaacttggggacaatgaacctataacactaagcttgaataaattatattatttattaaatcttatgaattcaaaaatcttatttattaatttcatcattattccactataaatatgaaattgcactcttagggtgtttggtatagtattctgttttcaaaatttggtcttcaaaaatgagaatagaaaacagtttttgtagttttaaaaatacaagttgtgttttgctaatgatttttaaaacctatttttctaatgaccgcaagattaaaatatgaattagtatcattaattatctttattctatagatttagacgaatatttattttgtgggtcacatttttttagtaaatagacattagagttataatttctcgattccggagatttcattaaattctaagagtattatttatgctaaatataaaatatacaatttttatgatttttttgctcggtgacgatggaaaatatgacggtttggccattaaagtcacacagatatagtttagaaccttccatgtagggtgacaagtatatttgatatttaacatatcgagctaaggcaaagttgtggtatttgaccattttacccgtaagccttaaggttgttttagcattaagtaagggtaaattggaaattttgcttaagagagttagttttggcttttagcgaaaatggtgagattttgataagtttattttttgatttttaacatttgaataaatcaaaaatattataggttatccatttatttcactaagttaagaaaaaaataaagaaaatcaagtctcctcatcctctatctctctctctct

SEQ ID NO: 195274 - DNA, 3263 bp, Cannabis indica
atataaacgtgtcacatgtataataatatacacataagcaatttatggtggcagttacccgaatgacaccttaaattcgctatcaattaatttgaagagttttaccgttaactattagaaagatttaacagccaaaaactctttaatttaacagcctaacaacaaagtgtacaacaataaaacacagaccccacgtgttaggactttcctcgtttgccgcccactcttgtccaagagaaatgacacaattatggtcgcattatttaccatttgttcaacattttgagccactatttcactatcctctgcacaaaaatacaaagcttttagaataaattgagcctataaatacaattattttacattgtaaaaagacattagattttagagtaaaagaatcacacttaatcatttctttgattctcttaatattattttagcttacttattttggtgacaagaataagtgaattggagtaataatatttgtgagagtagaatgtagttattatattttttattctcaatattgatattgatttattagtgcttcatcttcaaatctcatttattaaaatgttctttcttctactttttgctctaaattttatagtatcttttatataagttcagtcatgtttttctaatgtaagtttggttattaattattttaaggttttattatattgtatgttttttattgcattatgtaaaagtcgtattttgtcgatttaagatatataatatgatatgctatcaaattaaaagttatattcaatttatgtaagattaattaatttgtatttttattatatacatttttcagttataactaataatgtagaattataactgtattttgaattaatattggtattaaaataagattttcataactatatttctatcttaccaagcaaaatttatctaatcaccctctttctcatttattattttattatttttaattcattcacattgctactattttttatttactaaactaatatttagttgcgatttgcctctctttgagtacgacaaagcctgtttactattgctagtgcagtgtaacttattaagtgacatcatatactattcattgtggttaacgtacttggctcgttcatcaagaacattcaaagtcaaacagatggtgcaacaacaaaaaggaaatcacctttttggatggcaccaactattatgaaattccttccttcccacgatgtctcatgcctcacatgtcactgtcaatagtacgaccatgtatgaaaggtaactcaatccaacttggacctcacctacctagcccaatagctcaaattatattggattttggcccatcagtgggctttttacacaaaattaaccctatttggttcagatcagtccgacccatcaagaatatatgcctatacatatggcatcatctctccatgtaattagttaaatttctagagttcaaaaaccataaaatacattgtaaattttatagccaagagcctaataatagtgactcgcggactaagacttgttaatgcctaaccacgtaaaaaccttgtcttagtttccttataatcatactttctatagattaatcattattatatttagttgttgaaaaagcggtggatattttggtactttcattgagagctaaagaaagccatcaacttttttatcatctacaaacatgatagcaacaagaaaaacaattgtgtggccagccgactaaatgagacgtaacaatgctaaaaaccctgttgttgatgttgtaggactccctccaccagtagatgcccatgcaaccactatggggggggggggggggggaggaagccttaaaagtgggtggtgaccctttttgagatggtaactagctagaaaattttgttgaagaaaatcccgacggctgagataaccaaatagagtactataaggaggagccaaagggtggttattatgaggaagaggaaggagactatacctacatctacacagatgacttagaagtagtctgtttaaggcacctggtccaagagcaagaggctaaaatggcaaaacaaaaagaagtagccccctaaattcaataaatgctcatatatttccaaagcctaatagcaatgggaggccttaacccgaaagtctctcctacaaaatggaatcttggcatggtggtctaaattaacaccaatttgacggtagatgcaataaagttcaaccatccttgagctggaccctcccaatcagtgaataaaaaaagggaatgccatagctaatggcccctaaaagagaactctccctcttgagctagcatgagaaaatccaaaatttttgaaaggaagggctggccaaacccttgggccaggtcacccaaacaatccacaaaggagggtcctgcaaggcaatacgaccaattcccacacatcaagacttaatgcccaaggaaggagaaaccatgctagcccctcagttaacaaaggagaggatgttgagacttggatcctaaagaaagaaatttaggggttgacctcagggacaacttgaatgcacagagagaaaaagtgtgatgtgaaagaattaggcatcagagatgaaatttaagaaataatgtcgatgatcgtatccaggggaaagaagtttaggatgatagcaccagacgactgaaagatgaaataataaccctaaaaaaggcaattgattggctgatcaagaaacaaagcggagtcgatatgattcagaagatgaagatttggaaccatgtgttggaagaatcttagatagtgttctgccaaagcatttttgaattcctcaaatgggcttgcacgagggccaaatggaccctagggttcacttgatactagagagaacatccatcaggctacctgcaacttagtgcactacaggaagcaacctcctatgttcaaagggggaaagaacaataaagactagaacaacaaatgtgagtatcatggtgacgtaggtcacacttctaacaaatgcaaccagttgaaggattagatggagaacctgatcaagttgggccatctccatcagtggatactgatatcggttatatatcctagacaagtaataatgtaggggcaaaggatagttcctagacaagaagggtctgctaaaccccctcaagtggtggtctattagtaggctctaggaacacaagttcttcaagggacaccaacttttcaagtcgacggactcagtaagaaaagtacagacttgtatttagacacccatacacc

SEQ ID NO: 195275 - DNA, 1090 bp, Cannabis indica
cataaaaaattatattataactataacgttttcacaaaaactagttttttttgcaatgcatgtaaacagttacgtatatatatttgttttcatattgcatcataatgaagaacaatttattaccacataataaagtatatacatttttttatatataggtgaattataagttatgatattcattgtttattgtagtaataacaaatctactttgcatgaaattttgaataatttaagttaaattaaatgtgtaaaaaatttattataactataatgaatagtcgttatgtaataaactactacaataagttttcatcatgattaaaaaattatattatattgtcttgcttaactgatttgtttctttttttggtgacagaatttgaagattaaatgaaattggttttctatttaaaaaataattatttgtggtgtgtgttttgagacccttaaatagtgtaactattataatacgtataacttggaaattaattaatcacgtaatggttcgatcagagaattatcgatggatatttgagtgttagcgatatttaacattttcatttttttttgtttgtttttgtttttgtttatttgcaatatggttcgatatcgatcgataaagatcattagtttgcatgataattttcattcatcttaaaaatgtagttggtagagttgtattattcaaaagggtatagaagatagtttatctttaattttctaattaatgaggtgcttaaaaaaaataccccatatattatagaggtttctgtatgaaatttcgtaaaaatacgaaaaaaaaaactattttaaactgtaaatataagaaaactcctaaaaaattccactaccctaattaattattcctaccattctataattaaatatttatataaattatttgtaatgagatgaaattaatattccattgtattaattataccatatctttgatacaaccgggaaacaagataataaaggagctagcctaaattcttttgacaaatatattaattattattactattattggaaattaatcaagttgtccaatattttattatcaccacattaattggagtacttc

SEQ ID NO: 195276 - DNA, 819 bp, Cannabis indica
aatggatattggtttcaatgggagccatttcagtttagtaaagctatatatgtatcctcaatttaaatttaaccatactgaaaaaaagaaaaatatagaatgatatatgatgacaaagcagaaccaagctagaagtaacaccgtgtcatgaagacagagagaattgacaccctacctgagtatgagttgatatgcctctcatttgagctcgactgccttgtaagttggctatctgttgcctaagtcggactagctgccgagccagagttctagttgctgcctgcataagagaaagcccaataaatatcggaaaaatttaagcataatgtgtggtgatttaatcactcaagaatcttgtagtaatcagccattaactaacccaatatcatgtactgttggaactaagtcttttacaggttatcgagttagagagagagagagagagcatcattttattacaaatttagtaaaaaatagagagatttctttggagagttgtcgaattgacttgtgattgaaccaagtaattgttggtgtgttcttttctctgttatgtgttcttgaccaaggtgttaattcactaataatgaatgacaatccaatcgaatacagcacagaacatacctcattccctgttttagcagttctctttatctcggcaagaagctttttttcctgaaaaaaaatgataaaaatacatcaaatataaatttttaaactttattttcaaaaaacgagtatcatttctaagatcattacttacttctagttgcaatgctccaatttccttctcaatacctgaaaaaaacagatttagac

SEQ ID NO: 195277 - DNA, 1321 bp, Cannabis indica
ttaaagtttaggagataaaaatctaaattttaaccgtaaaagaaacgaaacctaattgtataaagtgtatggttatataactgttatattttaagggaaattttcaacaagttgtatattttaaggtcagaattaagtaatatcaaaaatttgagggggtaaaaatacttttatttatttatttatttattttttctaattttccaatttttgtcttgttccttaatcaggtgtttcttttatacaacttttaggagaccaataggactgcaggttttttttttttaacaagtgttatcacttatcagtcgaatttcttcactgattgttctctcttttgaaatgttgtattgcatctacccaaaatcatcatggttggaatattagtctacattagtttgcaacttcaaagcagagggatagtattagtgatgtgaacttctgcatgcaaatgcaataaaaacacattgaagaaattatcaattatatttatatgtactttccaacatgcataatgattaatatagctaaaatcacacaaatttagctgagatcaaccataaatcttttcaattatagttattgataccccgtaggcccctccatggactgatgcacttagtgatgcaggggtcctttcaaattttgtaaaaactttatttatttttttgtttttttttacatgctatcttttaaaacaattcaaaaatcattaatttgatccctctaaaattatattaacattttgcccctcctttccaaaccttcctccgtaccagtaccctaggtccctcctctgcttgatgcgatcataaaattaaactgtagtgagaatatttttgttttacaaaactgtagaagagagatttttattcagggacttgttggagaatcagctagctagctgagttgtataccattttattttatcccaaaatcatggttgttcttttctttgggatatggaacaaaatagtgcagtataataatataaaagtctacatatacataatcattaattccattggtcctaccatactcataagtcacaagcaaagcatagcagcattaaatattaaatggagagttttgaacagtttcagcactataatttttcaagtttaaggctgtaagggcttatctatgctaaaaatctaacagaatccaatgagattgcaatttaagactagcaaaagctaactagctttatgaaataattcatttatataagggagaatacaatgagtaagcaagaatttaagcaacagaaagttgttacaaaaaaatagtgataactgtttttaactaattaactaactaa

SEQ ID NO: 195278 - DNA, 1249 bp, Cannabis indica
tttctcacttaatactaccctcctatacaaagaatcatgtacccttattattcactataagctagcacaccccactaatcctagagcctaacacttttcctgctttgtgtttagtgaactgtgtgctgctctctttcttacttcttgccaaggttgattcttttgtaactgctttttgacctgtcattactattgaattgttaatcgtaatctatttgcataattgtgtatttgttccttctattgtttttatttaagcataaaatttgcatattcaggacattagatttgattcctacctaccagtttacttatcaatttataggtcttatctttgttcctgactgctcttatcattttctattatccttaataaacaaaagaataaaattgaattggactttttggtgtgtagttagttgtaaataagtctttaagttatggttgttggagtatcattggtgcagaaatctgataatgaagtatgtcatcctttcttaggtgatttgggcttaacattgttttggctcatgtatagcttgcattttatccatcccgaattagtaatgtaaataagttggtactactgtttgagaccgcctttgattggctaagactaattccatattattttcaacatttaattattggtttccattttaactatttctaatcaatgtatatatttgctttaatgcagacgagtttgaattcgtaatgaagagctctgatgacgaaaaagatttggcatatgggaattatgtccctaaagaagtaagtcgtggtttaggatattctggtgcaaaatttgtagatgaagtacttaatggggaaaatgaacgttgtctcgagaattttcgtatggataagcatgtcttttataagttatgcgatattttacaagccaaaggcttactgcgccatacaaaccgaatcaagattgaagagcaattagctatattcatgttcattgttggtcataatctgcgaactcgagctgtacaagaattatttcgttactcaggagaaaccatcagtcgccattttaacaatgtactaaatgcagttatggcgatatcattagatttctttctgcccccaggctcggagtttgttcctacagcaatttcagaagatcccagattctatccatattttaaggtaaaagaaaacccaagtgttaagtctgataagtatctgtgtcttctgatgtctgttttgttttgcttcaataggattgtgttggtgc

SEQ ID NO: 195279 - DNA, 705 bp, Cannabis indica
tatacatgtgcaattgtgcacaattattcatctgacaaatcacaagttgaatgtactgacctgtgcagtgagtgagataataaagtcatctggctcttctgcatcttggtcctccagatactccctagttgtcatttcctgttaaagataattaagctcctcattcagtagagaaattagaaaaacattctcaaattaaaacattacatatgaatcaagtctcaaatacctgcatatggaaaatagtctctagttgcatctcaacacgtaaaactttaaggcaatcaattgccaatttcctatactcgtctgcaaatgaagccatatcccttgaaggtgcagtgcttgattgagttggagctttcacggttgtccgcccaagcctacaaaatgtatggcatagtgctccattaaataaattaccattaagttgcttcagaaatgatagtgttcttacaaatatgaacatcataaagtgaaaaaattacaggtggaagtttgttttgaataccaataagttgatcaaaatccctttttgattaaaaaaaataatccataaagagggatattgcaatagataaagaaaaaagcatcctccacaaaaccaaacaaagtcaataaaaataacaaagaataatcaactggaacagttcaatttttgaactcctcaagtgaaaaccagaggttgaaaatagccttctccca

SEQ ID NO: 195280 - DNA, 1977 bp, Cannabis indica
ttactatcgatgacgccatcgcatattaaattttggatattcatagcgtggacaagagcagcagctgaagagggagaaaatagtactccttgaatacccatcttagtagcaacatccacgctaatccccaaaaatgcatcaaaaacgacacaactaatcttgtcgttggactcggaagtagtactactaatacttgctatgagcttttcaatctccacaggcaaatactctacaattgacttagttttattgatcatacttctctcttcctgaggacccaacccatctggaattgacaccaattcgatgttattcacatctgaggacccaattctagtctcatccatggctctcgtgatctggttgaggtcgagttgagtgtaaacgaaagtgatcctaaagccatgttgggcaagcttgtgagccaaaagcataagaggtttcacatgtccttgggctggagctggtaccatcatcacacgttgttttctaccactcatcatatttaggttcattcgataatattattcaatgaaagttgaaacaatcaatcatgtacttataagataagataaccttgatgcccaaacaaggtgggaccctccttgcttttggaggtcaaactaataaagcagtccaaaacttatgtgggaccctccgaaattaagttcactgaatgtaggcgtagcgcacatggatttggaacaagctaagttcgtgggcaacaaggtgataccattaatatttatgttttgtcttatatatgcgttatttggtaattcatataggtatagtcatagattattattattataggtctctttttggtcagggtgattctcatatgtgatttaagtattttaatatagttggtctttgtttacttcctttgcttcgtctttgaaaaataattttattatgttttaagtttagattagaaggagggtcggtcggcccggtctcaagtgagaccagtgaggaccgaggtggtcgtcttagactcctaccgctatagactaacatttttttgtaaataataataataatatatttacattttttaatattgtgttaatttgatacaaatttaatatttaattaatatttttattaaaaaataaaataataataaatttatcattaaaataataaaaaataaaaattgttaaaaggcatgaattacttattattttctttagtgttatactgctattggtgtaatttaattatgaatcttatataatttaaaaaaataatttttgaaatatcctaataaatcgtaagatgtcaccctataaaaggtgttggacactactggtatccaatagcaatactcgtaaaaaataaatgtaaaacgtttataatttattacaataactaaatttaataataaaatattaaaaataacataaaagtaaatataaaagtaagtatattgattgtgatacaaattttacttcatgcaatattgtgatataaatttgaattaatttttattgtgataaatttggataatttttaagaaaccattgcagcaaatttttacaaaatgagttatatttcaacaatacatccttaaattgcatatactttttgtagactacccatagtcttgggttatttttgcatcttggttgcaataaagttttgtcaaaaggtctaaggaaattgaggatggaaatgagtaatggaccaaacctgaagaagatatatgatcaaggttaatattgatacaactacgtttgataatgtgaagtgttttggctttaattttgtggcttaaaatcaagtaaaatctaatgtgacaaagacaataaacgtgaaagaagctcttagttaaattaaaaataaaagatggtctaacatattttgtagcagaatctaattgttttaatgtggtttaagccataagaagtctaattcgcatggtttggtttcttaataaattgcaaagcatttttatctgttttttttttt

SEQ ID NO: 195281 - DNA, 1614 bp, Cannabis indica
agggaatcttgagtgttggaatcaagtgaggtggtcctttctttgaaggaaagattgttgggtgtacaactaaagtcccgtgttggctagaaatagaaataatcttaggtatataagaatgaacactaatgaagcattttgggaaagtatccaaaaataaatctgtgagtgcttaagcccaaattgaataatattatactaataaaaaaataagatagtatcaaacggtctttactctttatattcaagaaaaaagttgataaaaaaaaagagagagaggagattggaccaccacttggttgaaaataggcacatggttcaaatcggatcaaatgtaataataatagtattaatgttgctcttttaattatggaaaaattaaataaatttttcttcatcaaaatatatatgtatatttagagatgatttacatattatatactataatgatgtatttgtatattataacatgtaactacaattttaaaaaatgaaaagaggataggtatgggacattcatatcctttatcttatgatatatattagcagtgacagactcaggatttttactttgtgggaacttatttatcataaaaaaatatttataactacattataatcacttttattaaatttatctaattttatgggggctattctactattttggtttataattattaaattgaaaaatttacatttaattttttaaaaggcaacattattgtgaatgggtccgtccctgtgtattagtgttatttttttcaattacaatatagaattagaatgattagaaaaaagtacataattaacatttggaattgtttacttgaaaaaacagcaatctttgttttctcctcattatagtgcacacatatgttaaaactaataatgaaagagatttgattacaaatatgtatttgagcacatgatcataaagtaaacaatataagattttagttttactttataagacattaatggtttttggataaatgaatatttttttaggtacatacatgtaataaatacatggaactaaaaaactttaagtgcaaaagctttggttagctcaagttgttttcaatttcatcaagattcatggtatgctatgtattttgacaacaaaatatatatacatatattctttggaaaattttatgggacaataatttttgtattgtccgtttaatatttaaagaaattataatttaattttttaaataattattgtgtatattataattatagtagatactctatttatttagtaaaaaaatgtaaataatttataatatacaaaaataaatttaaactttacctgtaaaaataaaaataataataataataacaataaaaaatttacttaaaaaactctcatatataatttttttcaaaaatgcagaaaacataaacatttttaccaataaaaataaaagtaacatttctataatttattagacttaacataatatttatttaattaccaaaatcttataatgaggttaagattttgtagctattaagtaagtcttaccttagatataggcgagttagacttgtgcttagagctcatctagtccaaagacaaaaaaaattatctcctttaaaaat

SEQ ID NO: 195282 - DNA, 1127 bp, Cannabis indica
attgtaaaattttccaaaattttattagttaacatcatattaataatttaaatatataaatcagaaaaataattttaaaaaataattaaaattttaatatatattttttttctttcttcttcttctcttcttattaagtcgacttcatggaaccacgatggttcccttctcttccttccttccttccttcttcttctattatcaccatcacatccaacccccgaccgacaccctagaccgagatcccataaccccaaaaccctagatcttcagatcaacatatgctggtacaaaggcagaagttggaatctccattccaggttgttgcaatcccaaatgatgcagaactactgatacaggaacagacctttctagatcgacttctagtggaccagacttagccaaaggcatgcgtaatattagttttaaataaattattatttttgtgataaatttaaacttgagtacactatttttttaaaataaaataaaataggaataaaatataaaaaaaaaagtttttacaccaaattggtatagatttaaaatctaataccactaatgatgtacaatttggtatacactaatttagcgtactattagtatagaatagtgtgaagatttcacaccaatttaataaaataatactacattgaaaatgctcttagtaaaatactaaagtcaattagatctttttttgggaatgggcccattggtattttggtgtctatttttttttactaatttggcataaaatttattattttttctacaataaatcttatttaataattagtaatagttaatttatgaaaaaattatatatatttaacatatattttattattttttttaaataaattaaaaaaatgttaaaataaaaaaaatatataaaaagatatgtattactttggtataaattaaaaatttaacaatattaactgtattaaatttagtgcatactaatttagtatatctttaatatttaatggtgtaccatcctactaaattggtgtataatctttataccattttacttcaaagatatataagtttttacatcaaatttgtctgcatcaaattttatattaatggtgttggatattgaatctataccaaattagtgc

SEQ ID NO: 195283 - DNA, 544 bp, Cannabis indica
tttattacgaaaaggcttattatcagttaacaaaaatctgcgttaacatcttgcgtacccctctctgccaatctggctggggtaacaatgtgttgaacgacgggctctggagactctgaagagttacttgagacttcccactcgtcgaagctcaaagtcgatgaattatcactcagagatgctaaagctgcacagagtctaggctggtctttgtagagcaattggagcagatcattatctatctaatgcttacctccccaaaattcatctacaaaagaaggagagaggtaagaacctgacaaatggacatgatttttataagggaaaaacatttctgatgctcttaccaaatggattcaaatgttcgaaaaaggaaatgtcatcctaataataaattcacaaagtcaaaggttcaagaacatggaaagaacccagaaaatgtacaaaataccgaacaagcattttaagtagtttttttagccaaaagtaatttaagatcaattttgaaatcaagaattgcgaaccgcacatgtgtactgaattc

SEQ ID NO: 195284 - DNA, 1757 bp, Cannabis indica
tcatttggtatctcatacattattttgaaaagttaatgtaaaattatcaatatgtgttatccattgcatgaatgtttagaaaccaccttaaaaagctttaaaagctttaagattacctctcagggcttcaaaaatagaaaaatttcattaccaaaatgagattgttgaagatctccatttatatggaaagattacaccataccaaacaactcctagagtccaataaaactaatcagttgcggactttaaaattgaagggataaaagattgaggaggcatatgacagttttgaggatatatatttttctcttgtagtgaattaaggattttgaaggtggcaaaacaaaacaaggaaaacttttactcttgggtttaagattaggatatattttcaaccaatacattattatcatctcaaatattttctatattatgacaatggcagggcaatgcgatagagcagtgaaagccattaaagaagggggaagcgtagtggccttaaccggagcggttacgcctcctggtttcagatttgtggtcacttcaaacggtgaagttttaaagaaattgaatccatatttggagagtgggaaagtgaagccaatcatagatccgaaagggccatttccattttcacaggttgttgaggctttctcttacattgaaaccaacagagctgtggggaaggttgtcattcatccaattccataagacgaaatatatctaaataaataaaagccattttttcaaggcatttgaattatatacgctatggataatattgcactataaactcgaaagttagtctgtataaattaatggtataagtgttcaatgttctctaccattttaaattttacttccatttataaatattacttgttttgttattatgtgtactagtgccaaaaaaaaaaaactttaaatattcagagcagcgctatagggacacgtgtctagcattctataacagattagaggtattctataattaaataagtttaatcaaatattaaattacactaaaaataatattttaagagcacctacggggagacactaaaatttaaatttggtgtatataattcattcaatgacgctttaaattttacagtatatatgccgtgtgactacagtacacggcatatatgtcgtggcaccatagttacgatatttttttaattattgttatttaatttatatttataaaattaaaaatagtatttctacaatgcactcttttaaaaatatacctatcaatgaaccttaatttgttacatctaaaaagattttttagcttaatttttgtatggttgactacgttataactatttaagacatccaataaaattttgaaaaattcagaaaaatttaatacactgaaaataaaatttaaacaatccttaacacgtgaaacttttttattttatacgtgaaataaacaagggtcaaactcttttatttttgacaaataattataaaaaaaataagaataaaattgatattggacatcagtagtatctagtattttctagacgcgtcgccttacgattggttagagatactccataaaagttattatattaaactatataggacctgatacttaattacatcaatagcgatattcacacgtaggagggtactaagcaccagtagtagcctttagcatttctcaaaaagagcattgctattagacatcagcagtgcctagcaccttctagacatgtagccttatgattgattagcgatactct

SEQ ID NO: 195285 - DNA, 1911 bp, Cannabis indica
gtcataaatttagtgctaggcttagttttagaatttgttgaaagaagatttgaaattaattgatacttcaatatcaaataatttagaatattagttttttacatatattctgtttaatggagtttacacgatgaaactgaaaaaaaaaaaaaaaaaaaaaaaaaacagtactttactaatattatataattatatcgcgaaaaagaaatcataagatttatttcaattataaagtcatagttttatatacttataccgaaaatatcccataaaagaaatatgaattcagcagaatccttgtacttctttgtggctatagaaaaaaaaatctttatttgattaaaagtaataaaaatacacttttcaatataaaagagagaaaataaaaattgaaagaaaggaacattcaatattcaaatccttttcgttagtaaagaaaaatattcaaaattcttttgtgcttaataactcgaaggattttcttttgtgccttttttgtgagaggaaaatattctatttaaaagcaaggaaagagccaaaagttattgaagtaggagcaattaatattaacatatatttaatattttcattatataaattgagcttcttgccactgtatttctgtgccaagaaaattttatcaacttttctcgatattgattttccatcaacaaagagttttaaattatgttcaaaaataataataatttcacaacaagctatttttttttttatagagcattgtctgcccttaatggttgctctgtggcagttgtggtagttttttttttttttctttttaacttctcttttcagttttttcctgcttttttccccaaaatcgtccctatttgctaggattagtctgttagattcagttatttctgttacagtcagttagttggttgtacatttagttgagcatactatataaatgttgttactttgctttgtaattcattcaatttccaatataataagacagagttctctcccctgtttctcttgtaatatggtatcagatgcaaaattctgacctaatcttcaaaagaatttcaagcttcaaagaatctcaagcttatcaacaatggtgcgaccagagcaacttcatcagctaccatcaccgacgacaatcctgtgatcgatgccacaaatccagttgctccaccaccatctcaacattctgttggaaatcgtgactcaccaccattattaccagcttcaagacccactgttcaagatcgccctgcttatgaagaaatcagaagtccatactacttaagcaccgctgatcatccaggtcttgctcttgcaactccggttctcaccgatcggaatttccaaccatggaaaagagattttaggatctccattggcgcacgaaataaaactccatttcttgatggcagtcttccccaaccaaaccccaatgatgcccttcttagttctttgacccgttgcaaccagatggtcatgtcctggattatgcactcggtttccccagaaattaaaagtagcatcatgtacctagaaacagctgctgctatgtggactgctttgaacaattgtttcaactaaggaaatggccctcggatcttcgagttgaataaatctttgatctatcttcaccaaggcgatgactcggttagcacctatttcaccaagttgactggaattcgggatgaaatcaaccaactccgtccacgcactccctgcacttgtgcagcagcagcccaacatcaactccaaatcgatcatgaccaggttcttcaattccttacaggtttaaatgaatcatatcatgctgttagagcccaaattttaatgtatgatccctggccacctttaaacaaagtcttttctatgattgttgatcaagaaagacaatgcacactaggtactcgaaacaat

SEQ ID NO: 195286 - DNA, 1183 bp, Cannabis indica
gtccaaatccaactgtcaataacggataaatggtagtaaatacaaattatatttatttttttctttttctttgaacaaataaggaatcaattgttgaatagtctaaaactaaaacagtagacttggcaaaagcttttgagggcagtttggtcgtactactttactttgcaaattacaacattcatttgtagcccaacttccccaacccaattgttacccaaatttcagtttcgtttcttaattgaaggcaaggcaaggcaaccacttcattctgacacgtatttttttcttgttagttaagaaaaaataattaaaaattaataataataaaaataaacaaataaaataagaggatggagaagatgaaagagaatatgccattgttgtaatgctatgttcttcacagacatctcttcttcttttcttccttctttttttttttatttatatatattaatataatataattattaccttattcattcccgttccatctcttgctctctctcaggtacctcatccttcatttgatttctcattctctcttttgctttgaagattttgtttaaaacaatggagtctagtttgattgaacattgattgcttttttattgggtttccctacgtcggttctgttttttttttcttctgcaaatgcttctgccattgacctttctcttttcttttcttattttgggtaagttgaagatacaaaccctagctctctacgggaagttttggatttgtgctcttatgtcctttcattatcacttaattgagtgttattatagggggtctgtgtggttgaaatttagttgtgaatagaaacaaaaaggaaaacaagaaaagaaaagaaaagaaagtaatgattgtgtctctttcttatataccgtacccccaattttttttttttaattaatattatatttgagtaatgtgtgtgtgtgtgttggttttctgttcgaatatttttttggttccgctggtctttgaaataattgtgccacacacaattatgcaactgagtcgaaattagttcgatttggtaatcttttgttataattagttgaacatcttcatagagtggttatgattatggttatcatgttacttaataacaatgcggggttctgatttgttcgttcgagtcgtagtatgattttacgtgcttcgataagaaatt

SEQ ID NO: 195287 - DNA, 1381 bp, Cannabis indica
atattatatattatatttgtataagagtggttctagatcgaatcatgttatccacttcttacataataatctgaaagcatatctcgagtcatgttaggttaggacttaggaagtttttacataaattgagtttgtaatcatagcataattataaactacatttgtcaactttttaactgaatacgataaagtgcatttggaattaataaggaggaaagttgatgatcataattgtcttaattattttctcatcattacattcttaagttttttactactattcttattgttgattttattagtagtacttagtttatctttctcataattttgttctctttagttaaaaaaaaaaaaacaagtttttatttaacaaatagaaactaaattttttttttgaaggaatagaaactaaaaattagttggttgtattgataaaaatagtccttgtgtgggacgatatacttgatatacttagtttatattactaaaagcaatacgtgcactgtgcacttgtatgtataaattttgcaacaagtttttgacaatgttatcgggaaagtggtgtgtttttaggtcttttctctctttggttttattgacacattagggataatgtgttatttagtttgggggaaagactttttttgtttagtttttgtattgttgttttgtgtatgtattaagttaagccaatgagattagtaatgtcgtctacattacaataattctatattaaatattagaatatttctaatatatatagaacaaaattatttaaattgattttgcattaactccctgactgtatatgatcacaaatattaatgtgacgaagatattgatagagtatctcacctataaatataaggtcctagtccccgagctcttcactcgttctgtgaaaacaacaaattctatctaaagagagtagagagagcttggaagcccgattacgcacacaaactagttttcttttctttagtttcgttttcttttgtagatccaaagatcgtggagctcaaagaatcaataactggagattcaaaaatcgtgtggaattgaatctcaaagtattaatggctaaaagtattttgatcctttgttcatagtacatatatgttcgatttaattctgcatttcatacacgatcatatgtgcttcatgttttacatataataatctaacatttgctatcagaacaaattatatacttttgccttgattatattcttgtatatacgtgagtgtatatatatttttaatatgttaatggtcgattcttgtttaatcgttttggtacatattattgatatgattgttttcatccatcaattccatcatatttttaaaactaattttttcatatatatacatatag

SEQ ID NO: 195288 - DNA, 1349 bp, Cannabis indica
ttgaaaataaaaaaaaacaataaaacatgttcttacatatattgagtaaaactttagttttattaatcaattaaactcaatcattcacatattaatgataatttagtcaaaaaaaaaaaaaacaattaatcaccacatattttgtatattttgtatatgattaacctcaacataataaatttaatatgtggaagtccaaaataaaattgtcatagtagttattaataaaaaataaaaaaagcaattaatcaccacatattttatatatgattaacctcaacataataaattaaaggtgagaagtgaggactttttagtaatttaatatgtagaagcccaaaacaatattctcacttttatagtagttatagatatataaaaaaatgagatgaatttagaagaagaaagtctccaaaagtcagaaacgacacaagtcacagagaacccctccggaatagaaggattgcatgcaacaggtgttacgttgcatgaatatgcacacgtggcacattctcatactaccacgtgtcatcctcttctctctctcctcctcccctttccccacccaatataatctctaaatataatattctatatctcttcctttatcttctcgttattactcaaaaatttataaaggaaaaaaaactaattaattaaccaacacagaaagagagaaaatagatatatcgaacagaacacaatgaccaccggaaatgaaatactgaagcacctatcttctattgcaaacgacgtcgttcaacgttgcgccttgtaatatattattatttcacgttttgtttagtaccattttattatttattattattgatatatataattttttgttgttattattattaattatggtggtgcaggacagttgggatttcggtggaggaattggttgaagaatttgagagtagttttttgataataataataataatgaggaggaggaggagcatgggagttatggtgaggggtattcgaggggattggtggagtattgtggtgggaaagctgtgaaagaattttgtcaaaagattgatcaaactattggtgatggctcttttgctagatttacatttgatctcatgcttgcctgggaactcccttcacaagcccatcaacaagctcgtacggtatatataacatattattatatatcattttttatttatttgcaatcttgtttgcatattctttgacttattgggtttctataaatgtatgaaagaaaataaaataaataattatttggaatattattatatatagtgggaccatacatggaaattgatttattggtttagagtgggatcgatcgtcactgtgtaacttaattt

SEQ ID NO: 195289 - DNA, 705 bp, Cannabis indica
ggaaataatatattttcagcttataataccctgctagctttatttatttactttattttataaaacgatgggatcggtttatttgcgtcattttgttgtgtttgtatcagtgcgattacaactcgagacagcaatggcaaatacgatacgttgtatcaattagaatgcactaatacaaataggaagagagatttcttacaactgaagtaaattcatcatctatagatgttcataattttgaacacaaacatcaacgaaacaaaaattggaacacaaacactgcacgttttgtaaggtggtcacacaatatgcttaatacgtttaataaatgtgtcgtgtaaacataacactgtatgtttagcatacagaaacaaaataaatattataacatttataaaacaacctacaaacacattcaccgtatatgtggcttaaacatgttgatatggttatgacatgaaataccccgattcatttagaaatagatagacatccctccaagacttgtgaatgagctcagaaccaggtgactagtagagttttgttgacatcatctattcgcgcacacggggataaagcctcgttgacatcatcaatctgagcgaagtgtttttacatggacttgacgatggaaaagatcgaattagttagcataattgattatggttatttccctccaaaatccctcaaataagaaaaaaaaaa

SEQ ID NO: 195290 - DNA, 1990 bp, Cannabis indica
tcatgtctccatatgcaggtgctctttgttttttgcctttctgttgaaattgtctttacatttgttgaggaacattaactgaagattgttgctttgtgcaggtgaaattgtgcactgcccatatatcatcggtttgagcttaacttctttgattcaaaggtgtgttgagtatagtgtaaggcatcttttaattatttttgttatgctctagatcttaaaggagtgattgctcagtttgtttgtgaaagttttaaacgtagagttatatagtcatacttctccaaatttctcatactacttcatatacttgttagttacttatttatgcatttttaacacaagaagaaaaaaaaaaataaatcccataacataacaagctcagctgtgtcgtttcatgcattcttacagttttcactttcaaagaaaaaccattttcgaccaagcagatttcttatccatctcttttatgatcttcatggtctgtagaactattgatgctaggatctttttacagtcattgtgctatggaagaactgagttatatcaaactgagaaggaccctttacttagttgaaaccatttaaactcaacactctccatctaattatgccaatagtaagttcttttgaaaccctggaaaatggactgaacaaacataaatctctttagtgtatatttcaaaaagataatattttcatttgttgaccttggtcaagtttttgatatcccatgtcagaattcagcagatgtaaacactatgaatctcactctactaaaccctccattaattttctttagcttcctcttaccactcactattaatatcaagtgttgtactgataactcatcagagcttgtgagcatattaggagtcagcatattttcaatctaaaccttttgactgtcatattttggtaatgtgttaagaacagaagcactaacattaaagtaaagtgtttatacacatgggatccatgagtttcaaaagaaggtaactttcctatatagtagtttttaactatcttagttagcatattataaggtgtcattttgactaacttttagtcaaaatctatattctatctcaagttctcactaccctacatttcgattatcggtctaaataatcttctttttgaaaatgggcaccttgcctaatcctacaatatttgaagaacaacaagctatagcaattgctatataggaaccgaacccggaaaagactcaaacatcatatcttgttcttaagtgtttgtcgttgtcttcgagtttattcttagtacctacatagtaattgttataattttttcggtttccaaatattatagagtttaggcagggaagggatcctataatttccacatattatgaacatatgagaattcaagctgtaaaagctacaaaaaactcatcaccatttttctactgatttaacatatttgttgtttttttaaaggagaagtattactttgtctttgacttgtgagaatgacatttaaggcttcaagttttggttccttgtactctatctattctataatttttcacttttttcttgtcggcaaggaagaagtttctctttggttttccttattgtagcagtcaccacagttttttaccattaatgtcagtccttacaaggtacataattctggctttttcaccaaccccttactgtcgtaacaatacatacatattaacatcaactaaagattcccaagtctcatttctagtgcatatattatatattatatcttatatatatacatatcataccagtactatatatatatatatgtgcagtaagaattatcacttaccttggattccttcttccctttgctcattaagttttaccaaaaactttatgaatattaataatgtgattaaaagacattactatcttagtagctggatttctctttcgttgtagctttgtctccttatcaagttcaaaaaataaaaaaaaactaatgaactgattttgaag

SEQ ID NO: 195291 - DNA, 1075 bp, Cannabis indica
tttaaaacttaatacagtaaaaacatatgaatagtaaaaatagtaaaagtaaaaaaagaatgagtatttttgtaagatcggaaatatttatgtgtatttctttacccataatgtggatttatcccacttgttccggccccaagttcatgcatattggtttttccaacaagtatggcaccacagagtcgaagacgcttaacagagcatgcatcattggtacaaggtctttgttcgtgtaaccattttgttcctcctacatttattgtcaaattaatctacacataatattaataattttaatataaatttgcaaacaaatatacgtatttagaaatttgaaataataaggtggaatatacaaatatgtgagttgtatttttcaagataggtttataatgatggtattttcaaatatagaaatagttggtattgtccaaaattaagtaataaggacaattttagagtaactacagatattattattttggtaaaacctgatatagctattagctagcctgatttaatatcattgtgaaccttgtttgtctttttcatttttgaaagattaaggacctagttgtgatagccataattttcaaaaataccaattgatttactaatttcaatattaccacatttaaaggaaaatatgaatagaccggtactgctacctgttgttggatagggcgtgcaatcaatttcgtccttgatagctattagcacaccatctaaagctgaaataggctctcctaaaatataaaaaagttttttgtaatgtacgttaaacgttagaggtaaatcaatttcaatatgatcaatatgttatgtactgtatccactttactatttatgagtgagtgtatgacaatattaccttttgcatatcgaagtgttgactcttgggcttgttgtcgaatatctttggtgtcgtagctgataaaaaatgacatttctgaagattcatgtacagcctctataaatctctctgccacctgttgattacaatgcaaaattttattaagatagataatgcctaaagttgaaacactttaattacaattatatattaattaat

SEQ ID NO: 195292 - DNA, 3293 bp, Cannabis indica
tttttatttctgatgatatattttagtatatatacaaagggtaattcaatgtctggacagtaactgtcctttcttgaaatccattgagaatctttttagcaccttatcgatataatttacttgagaaagtgttaatgttctctactttctatctctatagattttgatccttagaacattgcttgtttctgccaaattcttcttttggaatttatcggctagccacttctttacgtctgataatttttctacatagtttctaataagtagaatgtcatcaacataaatcactacaacctttaatgtatttgtatacatagggttcgtcttcattttattcaaagccatactctttaatagtcttattaaaggtgatgtttcaagatctagaggcttgcttcaatctataaatagatttaagaaacttgcacacctttcggtctttccctggtagcacatacccttctggttgttccatgtaaatgattttatcaagatcaccatttagaaaagcagttttgacgctattttccaaatctcatagtcataagtggcagctatggaaagaaaaatgtgaatagatttaagcattgccacatgaaaagaaaaaaggtttcatcatagtcgacgctttctcgctgtgtgtagcctttagctacaagcctagctttaaaagtctctaccttccttcaaaatttctcttcttcttgaaaattcacttacatcctatgtgtgtaatattctcaggtggagttttataatcccagaatttgttggtacacacagaattcacttctcgatccatggcattattccacttgtctaagtcaggctcttccattgcttctttgtaagtcaatggattgtccttgttaatgtcagagacaagaacatgtgcttcatgttcatagcgaacaagttgtctcacaatcctcccaccacgaagatgtatatgggtttcctttttaggaactttggtaaccgctgccagtcgttcaactaatggtgctgaaattattggttcacaaatatcctcatttctgatttcctcgataaccacttgactgcgtagtttgtgacttttcatatatttattgagtctcaacaaccaaataatcttttttattaattacatgattactccactataaatatagaattgaactcttattaattatagaattatatttagtgagttttagtgaaatgttcattgatataattaattccactgattagccctccatgtgttgattcgtaattagttttgctcaaattagcgttttacctttctaattacttctttatcctttagtactattaattaactagttgaagtataatttagatcccatctaaatttgtgcacaactttccagtctcagaattgacacttaaagagaactaatattcgatccgttaggaaagtcgggattccataattgtagttcatattcccaaccattcacattattagattctctaaacaaaagttgtaagaatcatcttctctgagaaattttaacgagtaaatcaaagaaactaataatatgaacaagagtttatgattagtcagaatttaagctgatctactattgatgatcgttacgatatgaattaggtccatctgtattttgttggtgttcttatagtgtgtgttgagtaaatggtcaaacacaaatgctaagatgaattatttgtggtttaattacatagagggtacatttttatgaactagtgatggtctgacttcttatttgttgtaagagagtgtaccaataggtctttttttgtttttttttttggctaactgtgtacgagtaggtttcattcttttgttttgatatgttttcggttaaaatgtcaaacatagttcttctcttattttaaggtacaacctgtcctttttatgacaaaggataaggatgtggtagagtagatgataaactatgaaaggtaaagaaaaatctattggtactttgcaaaggcacccaaaatcttatttttttttaattattttttaatatatattttatttgggaaaataacacccaacattattattatgaaggttttattaatttgtttgattttttttttttgaacataatttgtttgattatagttatttatgttattttatcctttaaatggtctagtagtttcttatgaccttttaagttgaagcttttgctgaaatcatataactctagtggagaaagataatggtagctgaaaatatgtaaaaggagcttattgggatgagggaaaaaaaagttacacccaactctctcaaaacagaggcttattaattttgttacagaaccccacttttagtttgagtactcatcatcacataataatgtgagatttaattaattaaagagagcctcttctttggcagggaagggggatgaccgatctaaccatgtcccctagagcttccaatgaagtatggtggccacatccttaacctaacaaagagaaaaaaagggaaaaagaaaaagagaaaaatgcactaatgaatattaattggtccattgtgatttggatagatgatcttctcatcattaattacctatatatcattgtaaatgaagctattaaataaagaagaagaaagaaagcttttgtatgaaaaaaagaaaaagagccactaaaaagggcctctctttccaagtttattattgattgcaaatgcaaacccccatataactctcacttggatacatttttctttttaggaacaaattaaagtaattaaaatatatatatatagaaattaggaaaggaagatggataattgcagatagtgatgatattgataatggttgatgaagtagtactgaagtcatacggagacagaaggagaaaggccaaagtcaagtccccaaagctcaaatgttccattaacaaagtcatagtaaccacccttcaatgcaagagttttgttcaccaaaccatctcttacataaggataggtaagaaggtttccaagggatgtgttcactgcctcctgcaataattaatcaacattttcattattattaattaataataactaatcaaaaaaactaaaaactaaaataaaatgattaccttttcacagcatccacagagttctgagaaaggtgcactgcccaaggatgatttgaccttgttcttagcaggcaacccaattttaacccagtcttcaatgaagtccctgcatatatatttttcatcaatattaataatttattttagctacatgttctatatgtttttgtatatatctatacaagtagtgtcat

SEQ ID NO: 195293 - DNA, 704 bp, Cannabis indica
ttagagtagctcatttgatgtataagccatttgacaatttttagctgaatttttacatataaaattatgttgaagaaattgatgtgagtactagtcttagtattagattctcaacagaaaataataatggtagacttcataaaaaatataatagaggtagaaaagtaataattttgtgtcaaatatgttggtatactagttaggaccatttatccaactcaaacccaaaaactaataatagttaattatagaaaaggattaaaaaaatgggatttttcattacatactgacatttttaacttttttaattttaactgtaggatagaatttttttcaaaaataatgtgtactgtatttagttttcatggttgttctacggttattttttagttgttccattgttgttttaattgttctgttttgttgtttaacagttttataataatcatattagatgctcaatactacgtacactaatataatttttttattatgttattaaattaaaatatatgatgaacgataattaaatacaccaacaacaatttcaaaatttataatgtgggacacttttataattctatatgcacaatatggctacaatttactaatttagtacataatctaccataattattatcaaaatatatgtttgattatgtatttacgatatgtttggtaggatgcagggccggccagagggt

SEQ ID NO: 195294 - DNA, 1711 bp, Cannabis indica
cgcctggcttcatccggtgttgatggaaacagctctacataccttgacccgatagtcattttgtccttccccattgctcgtttagcctcctcaacggagacaaactccacatatgcttcgccagtagcttttccatcgggtctgcaagcaatatgaatctgattttcgacaactttaaattctgcgaagaagtcagctatgtctgatttcgaggcggaaaaagggaggccacgcatcttcaatatctcggtgtattccatctggtctttatcaataaaccttttgggtcttgatggaggaggacttccatgatagtcattatcatatattccttcgtaatttatctcggctgcaatggcattataataatcttgcctcttgcacctgaaaacctccacatatctacggcccatgttctgtcggtctcttcgcagagcgaaattaacctgtaccgcaccagcaaagacgacaaaggcctcacctgaaaaccgtccattcttgttgaccaacaacacgtcaacaatatccaatccagcaaaaaacttgaatatgtcaatatctgtgcagttgaaagggagccctctcaatcgaacaacaggaaacggaggaggctgaaatacacccccgtagccataaggttgaaagccaattccgccactgctcactgcgaagtacggatttgattccatcattctttgtctctttgagccgacctcgtacccgtccgaaaccccccctcttcccaacattgcccttatacccagaaaaaagagaaaaaaatcccccactcaagttgttaataaaccaaacccagcccacgttttcttgatacctaaattctctaaatcttttatactgaaatgttttatcatatttaccatctcccatataaaccaacccaaatgcatttaaaaacataaagaaaaatgtatcacataaaaaaagtaaatccctttctaccaaataaagtctcaaaaactgttgcctactgaacaaaacctacagaaaccagattaggcaaaagaaaaactagagcaagaaaaaggtcacaaaacataagatccattcttatgttgactaaattattatcaagttcaaaaatagcagcaaaaacaatgattgctctttaaaaaaaaacagaagaaaggtttgaacttcaaccaatatcctcaactcaagactatatcaattacactctaatgtgtcaagcatagtttcccatgaactaacaccaactcaaattagcaatcatataggtaagaaaatcctttttcaaaaacaaagcaataaaattattattcttcaatttcagaacaggtaatagaaaatataggtttgctaaacttaggttatcttccaaatccgattaagaaatcaagttcacacagcccaaaagagaacaaagaaaaagaaaaccacaaaattttataaataaattttaatttttaacagtaaagcctgttatcaatattctaaacctaaaatcaactcaaaacatcgaaaatccaaaataaacctaatcagatagaagttcacctgttcgtcgggtttattgaatcaatcgggaatggctctgaaatttgatttgcggcggtgattgactgacataagatttgaattggaaaacaagaaaacaatgaagaaaaaaaataaaaatttaaaatttaaaaatcggaataaaattgaagaaatttgattttgtaagtaacat

SEQ ID NO: 195295 - DNA, 1651 bp, Cannabis indica
ctctcaattacattatttatcatatagattcttttaagctacatttaaaagttggattatgatttgaaaaaaaaaagtattaagaaaaatagtgtggagaataataataataataaatatcaattttttatgtttgctatgaattttttgtagttacaagtgttttgctacacaatttttcttcttatatcaagcataattttttcattttcattttttctcccacattttcgttacttttttctttctcacaaaattcaacttctatatgattaatataatttacaaatattataaattattaattttttttatatcttttttcatttagttattctgaaaataaattctaaatgaatactatctatgaatagtgttattaagaaaattttaaacttctacacacgcttagttttattatcaaattaaaaaaaaattcttatttttatattgttccattgattaagagataaaaaattttgaaattgagttagatatttttgataataagtaaaaatattttttttaaaggaaaatataatatactaacatctttgatcaataaaatatttagttataaaaacatgtacaaataaaacaaatatcttacaacaaatatataaagaaccagctagttaatatatatctattctatataaatataaatatactcactatatcccaagactttcctatggcaagacgtggatagagtggtgcttttggattagcaaatactgataacacatcagatatcgacaccaatttgggctgcattaatgaaattattatttttattataaataattggtatgatatataaatatgatatctaaacaataatatattaatattaattaataaaaaatatataaattaattattaagatgatgatgagagaggagagtacttacagctgagaagcctccagaaaataatgcaaaagaaaaatctgatctcatattaatcaacaagaacttcaatttcgcttccccactcttcacataatttttactcgaatgatttgcgtattgaaactattcacacaaaaacaaaaataataaacaaataacattaaagaaattttaccaaaagtacttacagtcacacttttatttttactaatttttttagttctgttttatattttcaaggatttttttttacagatttttttatttatacttttacacaaaataatgttttcatatgttgcaatttttttttttaataatgaaaaatatttattttgctggtgaaatatttataaataatgttatttatgtaaataaaaataaaaaatatgtgaggatataaataaaaaaatatacatagaattaaaataaaaaaatttaaattttataggaacaaaaatgctaaaaatccattttatgggagaaaactaaaattattttaaattattttatacaaaatgtaattttatggggtccaatttatgctcagcgcgccacaggcaacaaaaaataatgttgttttaaaaacaatatgaaaataaccttttatatttttataaaacaaaaagtaaaaaaaatactgagtaaattcacatttttgtaaagtttttattatttttaagtaattataaaaatatacataaaataaatatacatgattaattttctattatat

SEQ ID NO: 195296 - DNA, 1202 bp, Cannabis indica
atgtgagaggcggtggttggttggcggagcttaaaaggtttacaaaggcaaagagggctacaattatgtgttcgctgatggcttacactcggccccatgatttgagcttctaccaacttacgtggatacagctaattggaaagtcagtacagtgggctccactccggactgtacactatgcatatattttcctccaataaaaactagacacgtgtaggaatcagatccttcctgatgtacacatctccttgagattgtaaccctttacaattatgtggggagcgcccccaatgaggagaagcctgactgtaaggtggggcccacacagtcaagttgcaacttgcaagcggaattcaccgttgatcgggaccgttgctgttggcggctacctcactttcactctgatctttgtaatgacgacaatgcccctacaatctttgatgaaagatcaaaatccagtcaaactgtaaaaaaaataaagggaaaaactataaccccatcagacggcttgaattacttttttgagtgattctgtgaccaattatatcagtagaggacaggtgagtttccatcattcatcataagctgccctcaacccctattcctccccgacatatttttggaattttcctcagtttttatttatttatttaaaaattaatttccattgacaaaaatttattaaaaattatataaaaaataataattgaaacgaaacagaaagaagtgtgccaattctaatttataataagagggaaccttttttcgtaagttgtatccatagcaccgtatccaccaatcatcgaccgccaccttcagctctgctttgccttctctctctttcttcaatatcatctctctctctcaaaatagatttttttttttcttttctcttattagtatttagattcattccttgaagactactagtttgctttttcgagtagtgttttcgcttcattcttagctcgcaatacactctttttcttttacgtttcttctttttattttcactttgctgctctgcctcaaaggtaaagcaagaaagaacagatctgtcccagcttttttttttttggtttttcaatcccttggattttcagagtctttttttttttttttttctaattattattcttttcttttttactatatataataaattgtgtactcggtttttattctaattaccggtattttcc

SEQ ID NO: 195297 - DNA, 1651 bp, Cannabis indica
aaatttcacaagactttctattcgaatagacaactacaaacaaatgggatgaaaaacaagaattactgaacgaaaatgatatggtcatttttaaagataaatagctcgactatcaaaacggtagaaaagctaaagcaaaaaaatagtcaataaaaattaaattgataacctaagcaaccatttatatttgtagaacatctccaaaataagaaataaaaacgaaaatgtattgaggcaaaaaagataatcaagcaagagataaactcaaaatcctaaaatggtaaaaacaactaacatataacttaatcaaacaaactgaatcccatatcatcatctgactcttcagctggctcatccttcttctcttcgaccttggcagcagctggagcagctccgcctgcagcagcagcaactggggcagcagcgacagcaaacttgctagggtcctgaaatgttcacaaaatattttaacaagatgcccaacaaaaaaacaactgcaagaatttagtaaactcgtacaaacagcacattaccttcaagaactccttaacttcatcagcctgtctgaacgagtattcagtagcaacagccacagctagaacattcttgtaggcattgatgaacatggaaggagcagcagcaatagtggggtatgaaattgccaatgccaatgaggtaaccatagctacaccagaagcaaacttcccaacaagatcatcttcagtcatatcaagaacctcagggctgaagactgagccattgtcataaacagattggacaacaagaccatatgaaaatggcctgatgccaagcttggcaagaagggcagcctcagaggaaccaaccttgtcacccttcttgatgagctcaactggggtgataatttcgacagtacccttgttaatcttagttgggatattaagcacctgttgagcccaagggtgttagtcataaattctaaggaaatacaatgaatgaaaaaatataggttaggtaagtgtgcagacctggaagaaagaagtctgagatggatcgagaccagtgttgccaggaggaacaaccacgtcaatcggggcaatcaaacccacacgagcaggggctccgacctattacatttgcaagacataatcaattaaattagacacactcaacctaaataaataggcaagactaagtaacaacagattcgcactttattctcggattcaaagcttactatcaacctccgtactttataacaaaatgaaattattaaatagaaacaaagatattaattaccatcatgaaaatgtggtatggaatacaacataatacaagaatcagtgaataccatacacaactaaattgatatccaacaggtaaaaccaagcaaaactaagcaacaatagagttgcactgtgttctcggattcaacacttaatatctaaaagtatttttttttaagcaaaaagcaatattgaataaaaaacagtgataataattagtcaatatgatttcatcgatttagacaataataaatatgtgagactgtacagaacatagcacaaaactacgcacacacgcataaatatatagcatatttacataaatcgcaatgattcctcaccttgtacttcgagacctcttcactaacttccttcaaatcaccctt

SEQ ID NO: 195298 - DNA, 1806 bp, Cannabis indica
tttttttttaattttcttttattatatgtatttctttttttcttcacttaattggtttttcactaaaaagaaaaagatacaaaaagtaaacgaagtaatacagaagagggaacacaatctcgttttcatgttttgctttattgctatctttttgacccacttcaccaaactctattactactacccagcttaattgctaaaatgttgcaattaccatagctaatcaagacccacaatttaaataaaagcatctaataattgtaaaacattacatggttttccccccatttttcatggaatttttttacctttaactcaattgtaacaaaatatttatccaccaactctaagaggtctttgagacaaacccaatagacacaattaaactttatattgaaacaaaaagaatattagaattgtgaaagttttgttggtctgatcaagaagaatccaaggagagattttcgagctctcggataccctgactagaagctttcttcatttcaagagctctcttatagggaggagcaattggaggctgtacaggatccaagctctggtaggtggttccctctgcaactttgggcagtggatatgaacggtcagaatcatatccactaaggtccccacaagctagaaatggaatataaaccttatttggtccttctagccacccgctactacaatctgcaatgtgacaagtaccaaaaacaagtcaccacatcaactatacattaggaatatacatctatatatacttataaatattggtcaccaagattgacaatactgctcagagatattggtcccctgttctatctctgagcggtgactatcagcggtggtgaccaacagcacaatccccatacaatcagtattgataacagatgtaaataagacttaacaatacaaacaaaccaagatccagttcaaaatgtactataattcagttcaaaatttcaggataaaagaacaatctctgtggttcagtttcatcccaacttagattggtccagctagctatcttcagggctcataaccatactatttagcaaagcaatgagttgtgtaacatcacttacagttctacctcagcatgattagtaaatttgaatggaatgaaagatggtctatgaaatttgaatgtgaacaatgggtatattacctaaatcatcggcgccagaaggacttcccaccttttctaggagacgatgtagatctttcgggttaaatccttcaggaggagaatagttctcgcaaactgcaaatgcctctgcatgacgcatgggagagaagaaatttagtacaaacagaagttcaaaccacagactctgcattgtaacatcttgtaaacctgaaggaactggcagattcacatttgcagatgtttttttcagatttatttaacatggttttcttagcagttaatgagtttagcactaccataatatcttaggggcaaagttttctctacttaatggaggtgccaacttcaaagcatgtaattgccaagggtagactctcacaaaaatctgtacaacttcgaaccaagagtttaaatggaaagaaagaacaaaacttgagtgtacctatactagaattgcgactgctttttggtttagcaaacgtcactgtaggaaagaataatttgagctgcaacaaacaagtaatttgaagttaatattttttgaatcattattcatataaattacaagtagaatctactacatgagtactctcaaagaataaaccctttaacaggtggaaatgattaaacatgcattttcaacataaaaattgacaagt

SEQ ID NO: 195299 - DNA, 1510 bp, Cannabis indica
aatcaaatgaattaataagttttattcgatgagtacaatccaaaaatataaatatgaattctaagctttatttttgggtattaattataattatcctccaataataaattgtttactcatattatacgagtaataatatttctagtatcgtattgggcatgaatgcatgatgatgtattgaagaacaatttcaggttaagatttcagattgatcgctatttctttgggagacaagagtacggaacttaggcaagcccatgatcataattattaatcagtgattcatataagttttacagcaatttttgtttttttatttacaaaacctattgttttaatacaatatatttcacgaaataattttaatagatatgtatgtatttatttattttaattgtatttatttatttattttaattttgattttaaggcaagagatagaaaataatatattttgttatttattattttcttttgaatagaagtacaaaaatacatttaattttgtgtgcaataattgaataaattttaacaattttcagtaaaaaaataatgcattgggtgctaaagtaaaaagaaaaaaaaaacaaaattactgaatttgttgttatttattactaaatattttaaaataatgataaatttggtatagtattactcttaaatttaactttactagtcaattaatttaaactaagcgaaatgtatgtatataatttttaagaatattgttagatgtacatacttattacagtgatgtcttggtgccctcttcttaagactgattcaagttaaattgtgatgttaaagtaggaggtaagcacatatgtacgtattgtagttgttgctaaagactacttgagtaaagtggtttgggtacatatgacaaagctggacttttcagatgttcttcgtggtgaagctgccactgtttgtttggctcttgaagtggcaaaggacaaaggccacaagtttatcctggtagaaaatgattctaaggtagtgatcaactctttcaacagtgttgatcctagataggaaattgtgaactattctttattttgaaatataatcatttcttttttttttggatgtttattttgcattacttctaaaacttgtaattttatggttcataatatggtcaagtgggcctttgtccataactgatttgggcgattttctatctcgtctatttttgtaaacatcttttgtaatagtcacgaggtctaatttttattttaataacgtttttttttgaaaaaaaaaagagactatcacttttaattgtgtgattgaaattaacaacatattattgtatataagaagtgtgtataatttaagtatgtcccaattgtttcacatttttaattttagttagtaaatagtatataaaatattttatatgtaaaatgagggtgtgtatgtgcattagcatattagtcactttttacgcatatataaatatattaatattggtccctaaaactaaataaaaacattgaaaaaa

SEQ ID NO: 195300 - DNA, 2944 bp, Cannabis indica
agtatttttgtaagttttcttcagaccgaaaggcccatcgggccatgaccgaacgtcgtcgtttgacagttggccgaaacaaagtatcaactatcaagcgctgttcttgttcttcctcatctttgtctgtacgtgattcataacgttaaacggccagaaccagaatcagtgcagtcctctactatactatggtatgttgatattccctcaatatctaaattgacattctttcaatttttcatgccgtttctggagaaacccttaaatatgtaattgactaagcattgcctgtgtgttttatgttttgcaccattgctctgattggagctaattagagtctaattcaccattcaactatatgatcattaattgaattaacctcattttgtggctaattatataagcttaggatgagtttgggtgaagcttttggcaaactttctaatgggattattttggttctgttttcagatgctcagaatttgaagacaaaacccaccttgctgtttttttttctcagcattgcctactagccatttgcggtatttactctttttatctctaatgttaaggttgttttgaaagtttttaaagagtgtttttttttcttctccgaagaccaacatgtttgataaaatgccacagagacttgaattctttaaatctgtcgctttttgctataatttggtattattgtgttatattggtgccgttgttttattaaggccatatgtttaacatttgcctggtatcaagagagcaaagtactagttgatcaaatttagtagtttctttgaacaatttagaattttataaaattttttccaaatgcgttttgaattttaaagaagcaactataaaaactctactttttaaacacaatcattgtttatagaattttaatttcagatcatgtatcaaacgtttccctttcttaactgtaggaaattactggtgtagtagtgaaatgtcaaggttccgagccatgtggcaagcatccctgaatgcgacgaagaaaggtaacattactttgcttttgcttgtctctccccattatagccatatgtactttaatgtatataagtttgtgggctgtcctaccacttaagaagcagtaatccgtgattcagtatgaagttgcggtataatgtactgaccttcattgagtatttttgctgacattttatgttctctttatattacattctgtctttgagtattaggaagccatcatcttataccatgtgagcttctcgttttttcctctatttttttataattaatgcttcatctttaatcctttctccaattaaatgtttcatttgggcattagtagtaggcttatttatcgattagggaggatagttaattctttatttttgtacactggtgttttcgcagtccttatattcttcctttctaatgtcaaactgtagctctcacgtggagtgctgaagatctgatgcctcccactgaaagacatattttcaccttcaattcaaaagaagaggttaaaaagtggcacttatattcagattctgaatatggaggtattatagtaaacaattcacttttaatcatctttctaagcataacattgagtacatattcaagtttgatttgaatcgtgctgttaaagccttggctaaaataattctatcaacgaaatttcccttttctttctattttattttgttttaatagagttggctttgctaatgtcattaatcaatatgcagatgctaatcacaaatgcaccctttgtatattttatagggttgtcctcggcgtctttggagatcatggatgctggaaagggactaaaaggtacaaaataaaagttaactttaagtcggcttcatgaaaggttatatagcaagattattgtttgcctacgcactttcattttatgtgattatgaatataatactgaaacaaaggggcgaagtagaccctgtagttgaactattaaatttctcagttaagctgtgtaaagatacggtctccattcttaatatcttttcttctctgttttgatgtaggagttttctctggcaatctctcacttgatgtcattccaggctcaaaatggaatatcagtcgaagtggtttctgtggaatgaggtcaaggaaggtgaaattatttccaaaaattataagtatatatcatatgtttggagtcttgattgattattattatacttttctacagtgtcaaagcatgatttagtttatgctttcacattgttaggtgcagcataacaatgtgtcattttgtgctttactatttaggctggtggaaacaatagcttgtcttgctttgttttctataatagatgtggatgagccattgataatattgataacatgaatgatacattaagttgttctgcatgtggtttgctttattgagattttagtattgatattttgagcaaaccttcgtaaaaatgtgttagagtttcctgcctttgtttaatgagaacatttatgaaaataaaaccactttccccccttctctttgattatactcttttggctcctctttttggagaggcggcacttggctcacaagtgtactttttggctcactatcttcgaatcacagatcttttggtttatctttttggaccggttattggatttggttcgaatactcgttagaattttgtttggttatgatactatgttaaaattgtaagattccgtagagttcaatctcaaaatcaattggcaatgagaggagtagcccatgcatcttatgtatggtttttagtttccacacattatcaatgtggaactctctaacacaataaaaactagtttttgttggtatattcccttcatgtgtttgtttcctttcctttggcagtttaatggcttcatcgatttggagccatttgacacagtagcaatgaagataaaaggagatggaagatgttac

SEQ ID NO: 195301 - DNA, 1211 bp, Cannabis indica
  modified_base (6)..(6): a, c, t, g, unknown or other
ataatnttaaaaaagattagatctcatagtcattataaaatatagcattcgggatagcagtaaactcttttatattttatatttaatatatatatatatttatatactactatagcttttcgagtcatctttttctcatagctcataaattaacaacaaataaattgattatagcatgtctttaagataaataactaattttttaaatggaaaaaatttcttcacttttgctttcaaggttaattttctaatcaattacctttgaaaaaaaaccttaaataatattttgatttatttattattttgtgctcataaataaaactatcatgttatacgataatatacttgtaaagctgttaaatattatatttttttttaaaaaaaaaaaaaactgttaaatattaatttttataaaaaacaacaaaaaagtggacataaaattcctatatgtttttatttatttttttcctaacaagattcttatcaattttattgattcaatctttagtagatttttttaatcaattttatcattttttaaactttagaagaattgggccttgaagtcattaaagaaaaaaattattataaccatataaagaagtaagaaaataaataaatatatttattatgtataaaagacaaaaacaagctaaaccagatttgaataataaaaaatagaaaaaaggaatgatatatctatttgaattcttctatagtagatatatatttaaatgtagaatggctaaattataataaataacttttagatgttgactgtttctgtttttgcattacatgtcataacatttatcatttatagctcactggttcataatttttatctatttattgttttgcacaaatgtttattttgatataatcaattataaaaatatttttcttgggatcattactaaaaaaaattaagcgagtgtttaaaactatcgaaaatatcactaggtattccctacgattttaaacatctgtgaggcattctcaacagcttttaaacgtaaaattgacgacgtttaaccactgcctatagtattataggccatagtttttaaccgttagcaattagttcaaatatgaatttttttaaataacgtgttttctcttgctccaataaaatgcatttttagatctggaaatgttcaaattttatacatttttaaacttttggtctcttttttttctctctctctctc

SEQ ID NO: 195302 - DNA, 1962 bp, Cannabis indica
ctctctctctctctctccctcctatattctgaattgagaggataagaggtggccttacatctgtacataacatataaccaatttgcctctcacgtgtctacttgcagagatttttggttggttgtgagtaattaagtttggcaaatatgaatgttgtcaaggaagttcctgttgtttaatggctggcaatcttggtcttttctgtcctctctataaactataaatgaaaataaaaatggttgttgaaactaattaatatatttataaggaaaaagaagacactgatgagatccaactttcaaattgaatgctcatcgtcatcatcatgttcatgttcatgttcatttcttaataagagtgaagacccacctcatgttttccattgagcaatgttttggctttgactttgcttcaggctcaagcatttatacatacatatacatgtcacagcaaagtgtatacatacatacatatatacatacatacataccaaagtaactttaatttccataaagctggttcaacaaacatgtaatatacctatatctatctatgtctttttgaaacgaaatggagggagacaagttattcagaaatgggcagaggagggggcagcaagcaaagcaaaataaaaccctttttacagatatctttaagcagtacaatagttctttctcttcattgttgtatgcatgtagttgattcaaaatagtgctccttattgggagtgcagcttacacttttggtaatggtcgcatcctatgcaaaattttcaactttacttgtcacgctttcctgttctaaagctttcatctttaaccctttatatctagggacacaacatgtaatattacaagtacataaaagaatagaatgtaattatgctcgtggtacacagttaagcactatcaagaacttaatactgtgtttggtgtgattatatatatttacatacataaaagaatagaatgtaattacaagtacgaaagagagcatgttgaaagcaatcactcacattaatagtgcttattgttggcatgtatgcattaaaattttctggtgaaatagtgtatatgaatctaaatgcaacctttataccatgcactatattggtgtcctcttggcttaaaagctagcttccaacattggaggcatttaccatgggcaatgtcttcaacaaatctagcattttcaaaagagaagatattaaaaataaataaaaagaaaaaagatcaccagggctattccccatgtgcatgcacctagctagctaccgttattgagagtttttgttctgattgtagtttatataaattgtacttcaactaatagtacatacagttgagtcttctgtatactttccagtgattttttgtaaaaaattatagtggcgtttagtaatatttttatttttaaattttttaatcataaaaataaaagtaaaatttttattttaaaaaaataaaaatgtgttctataactacggttgtttttcaattttaaaaacaaaacaaaagtgtgttctgtaaattttattttttattttcatttattgattttatttaattagggtccgaggccaagactcagggcggagtctaaaatattgattagaaaaaattgtttaaaaaaattttgaaagtgattttttttttaaatttaaattcttaattaaaaaattggaatgtaagaacagttttataaaacatgattttggaaaatagttttactttttgaattttaaaaacaaaaaattaaattaaaaaaaagttacctaaacacaccttctattagcataattgtcattaatgtttgtggtaactgatttttgtttagtaacttggttcactatagtttttagtttttggttactattctttctttccaaagtcataaacatctcgtgatttggagatttgtataagtaatttattggattcaattgtttgctaaaatttgttc

SEQ ID NO: 195303 - DNA, 1036 bp, Cannabis indica
aaaaaaatatatatattattaatataatctaacttaaattcatatgtattaacttaataaataatctctccctttcaaaaaaaaaaaatctaatatattttttataaataaataaataaataatctaatatgtaagtctccttcaggtggacgaattttggccacgagtgagtgactaaacaataaaaagccatttcttttttcaacccaaaacccatcacaatcaagcaatgttaatccgccacgtacttgaaaacatcaatccaatcaccaccgttggatcattctaaatccatagtgtttgactttactttgggacccacacaaacccatcctcaaagttgttctttctagtagtgtaatggtggggcccacttagccaccgccccctctttcatttcttctttttgcaatataataatatcctttctcttctccttcgttgcgcacgtgtgttcttttagcttcaaacgaactaaccaaatatatcacaattcacaaatagaaaatacacatgaccaatttcaacatgctttttttctatttatttctttttaattttattaactaaaaaaaagtgtattactaataataataatattaagttttttttttaatttttatattttaaataagttttttttagtattttttacaaaaatttacatattaattaacgaaataaattaaatcgcaataaaaatttacatagcaattcacattaaaactaactgaaagactcaaaacataaatttttaaaaaataatgtattaaataattcttcttctaataataataatattaataagaagaagaagagaaattattattttttgttagtaaatatttgttatgcttatgtatttgaggaaataaaaaaattacaacttgaaatacgtttggttggtggtataaagacttttcctcctttacgaaaagacaaagtataaatattaattaatagtgtttattaatatttatgtactttgtcttttgatgatctcttgattaatggtaacatttttttaaaaaaaaa

SEQ ID NO: 195304 - DNA, 849 bp, Cannabis indica
ttttttttttttggttattttttgatgattagataggataggaattgggaacggtgttgctcatgtcgttttatttttcaattttattttattaccaaaaaaaagtaacaaattaattagttaacctaatcgaccggttaaaggtggaagagcgccgcctggtaatggtgtctaaacggagtgggttaccgggttaaccgggagggtaaataactaaaaacggtaatcaccggttttaatcctatttataagggagtttttcttttttcactaaacatggaattgcactgaatttagaaaaggttaaaactcacgctcttatacatatttaattttccttttgggtaaattagaataaagttttttttaccttagattctatcacaacatgtcttgtacttcttttttttaaaaaaaaaaaaaaattgctgcaaatttattatgcttttttttcaaacattcaatgcaacaacattttttatgcttccaaatttattatatttttaatttttaatgatatgctcattaatttagtggttacaaagaaactaggatatcaattctctcatgttgacttaaagcattacaaagaagaatatgcaaaacatatcatattatattatgatgatactatgtactctaaaaacatctaaaattttaatactagtacgtaataggccaaagttgtagtggtaattcgtaagttggaagtttacatcaacaatattaaaatttaaatttattcaatatgtgaaaattttaaaatgtagttacaaaaatgagttttgtttattttttatatttttacgagtaattatactttaatacagggtcgtctcaaatattttg

SEQ ID NO: 195305 - DNA, 1556 bp, Cannabis indica
attataagaaaaacacacctgaagcaaggaagtgataccagcatcatgttgtgtaagattcactaaaagcataaccattaagtggccaatgctagaatctggcttatacaagatatccatagaagttttaactattccaatctcaaccatcttctctgccaaatcataattttgtgaaagattaacaagagcttcagctgcaggttccgaaatctcctgaaaaacccgacaaaccaacaacatttaaacatccaaacatcatcaatcatttaactcaagatatcaataatatcaaataaataaagaaaaaacttaaattgcatcaaaatctaaacttgatttttaagtgacaaagtcaattagttcaattcatttgtttcctaaatcataattttctttcttccggaaaagagacagaggtcacttattttagactgacccctcccaaattttatttgggagtttcgccaagcataagactaaaatataatagataaatacaaacatgaatcttatttacagctgactatgttttgttagtgtaaaatgagattctagtctctagtgaaatcttgaaaagctcagcccctcaaacccttttgacttaaaacaaccaggtagccacccaaaatgtaatctttccccaaaccacttcaaccccgttgtcaaaaaatgacaaaacatgatgaaagtatataaatttgaacaatcaaatccctaattatagtaaaaggcttttaagtttagtaaagcttaaatattagcataataataataccttaggagcatttaaaagtcgagaaagtgatggcaggagcttgttggcataaatggcaagggactttaagccatcatcagacccagttaaacctcgaactatatcaacagccgcctttgtcacctaaatacatgaaaattaaataaattagataaaaaaaaaagagccctttgtttgagtttagttttggagggtggattgtagaagaaagaagagaaggaaaagggtacctgtggtgatggtgaagaaaggaagtccactagttcttctagctccgtcgccattgttgtcttctgtaaatgttcttagtccgtttcagggtaatgtacttaattttgtttcctaatatacgacgtcgtcttgattttacggcaaaaacataaaaaagaaacacgacgtcgtttaaccatctaaaattaatattcgcccctagaaataatattaattgataattgttaaatttggtgattgattaatatttttaatataaaaaataattttattattaattttataggtaaacaaaataaaaaaaaatacataaatctataatttaatattataggtaaatgtaataataaactaataaaataataaaaatatcattaaaaaaaataatgcattatagtaatacaaatttacataatcttttgagtcagttgtgcttgaataaagctacatagatactttaatgtgctcataaatatttgaccctgagatgtaaataatcagaatgcattaacatggcgtacttctcttattcgaaaatcggagtttg

SEQ ID NO: 195306 - DNA, 1574 bp, Cannabis indica
tattctctctctctctctcttctgaaaagataaagttggtgaaaaatgaaagcttcctcttgtgcagatgatttttaattcctatgattgataattatggttttcatttctctctgttttagagcctaggaggaagaagagagaatctgacattccttaccgtgacgtaaatctctctctctcgtttcctccccaggtttttgcccctaaattcactctctctctagaaaattctttcaattgattaaattcgttatctgtttctacgaaatttcgtcctttttcttctcttctgcttaaaatagtcgtgggaagttgatattttctgggtgtttgattttggtttttacttttagggaatataggtctttggaagtattgctagaaaagccatgattccggttccgattgagtcgacattggctgaatcttcggggtcttcaagctcgaattccttttctcttcagggatctgtggatgagaatcgtcgtttcaatggacttagaagcgtaaagtggcgtataaatcttgggattttgcccatcgtcgtcttcttcgccttcttccattgacgatcttcgtcgcgtcacagctgattctcgtaggaggtaacttccagctcgaattctgctttaaaagattaaagagctgtttatacattcatcaaactttcggataattccagccaaaaacaaaaagaagaaacttgcggataacatataaaaaataggataaaaatattaataaaattatgaggacgataattttccaactcggtagagctgttttagtttgtgactttcttgaagggatttgtggcttgctcttctaatcttatatcttctgcaggatatttttttccttgaaaactatacagtgtttgtttcaactgttgaatatgtatgttttgatttcaaaggtgcttagatagagcccaaaggtgattatttttccagttgagttctttggcattgattttgttcattgtgtccattcgatgtctaagagtaaactgatttttttttttatttggaagctagaaattaaatggtatgctctattttggttttactgagtgagcagattggctgattattgtgccacttgatccaaattttcctacaagcattgttattttttgttttcactaagattctacatagaattaactgcgaactcgagcaaaatttaggttgtcagttaaatttagatccttcagatattgacttcacttttatcagaagtgttcttgcggtagatttttctcgatgaatttcgcctgtacatttcctcatcttttttatttttatgccagatatgctggattaagaagacgccttcttgttgatccacatatcctgaagaaagggaacagttcttcagatgtggtcattgacaatccactgtcgcaaaacccaggtaatatttattgttttgttttgtacccatccaaattaaatgcatggtaattaaaccattggaagccaattataccaataaaagtgtgcaagtattaaatgtccacatagattatgttttgctttgctggggtttacttttcttctttttttttt

SEQ ID NO: 195307 - DNA, 2094 bp, Cannabis indica
aaaaaaaataaaaaaaaaaataaaatattggatgattagctgaaaatgcactgaggaaggatttaccaatatatataatttaaaacatatacgttatttttgtaaattaaatgaccagcgttatttgagtaaataaaatacaatttacgtatttaattgtaattaatccaataattttttataaaaaaatgattaagaaagcattagtgcaagtttaattttatattcataacataaatgaataattttccttaaaattgagcatgattatatctagatattatgataataaattctactactctagatatcacataagttttcttacttataattaaataaatttgtaatccaaatagttataagaggttctaaattggattcttctttctctaatataagaaaaaatattaacaaactcaaaaatctctaaaatagtaattaaattcccattatttatagtttattgaatctaatggattacattgtaaaaggggatgaagcttgtttttttgttggaaaatattattttgcttatctactttgttattataaataattcatccttttaatttataataattgtatgtattttcactcaaaaaaaaatattaccaccattttatacttaatattaaattacataataagtaattgtaatatgtatgtatattacataaatatgcataagtaaagtaataatcatatatcttattgaatgatgtcttataacatcaatgttcttaagaaaaagatattagtttttttttttttttagaaagaattaataatctcagtatattgtttaattaatgagaaaattagagagcaaacaaatcatctctgcatattgttgtttttttttttaacaaaaattctcttgtgttattatttgtatttttaggggaattttgattatttgtttaaccacctaatttccaccttaccttataaagcaagaggtactatgttgtacggcagtataataaataaataaatatgtaaatttaaaagccatattttctctactttttattgttcaataaaataaaataaaaaaataataaagtacacgtaactacttttatttttctttctaatgtctaattatatcgaacacgctacaagtgctctattatttatttaaatgaaaatagtatcatgcttttacacctttctctcttgcaaaaaaaaatatcaaaacattttacttttaatcttttttgataactattttatttttttaatcttggtacatagaaaaagaaaatgagtcaaaaaaatttcaattagggaggatttgaacaagtcaaataaatacttaataatttgcatagttggtcatttggtctctatgttgaataaaattgagttaggtgggtggtttacaaattagaagcccaataaacaaagttcatatgggtactcaattatggtacgtttttttttttttttgtagaacttcataataaaaaaaacaaaatataaatgaataatggtagagagatagaataatcacaaaaataaaaataataaaggggttgctactgattttatcagtcatttcattatggggataacactagcagtgctttcataatcttacgacaaaacacaaaaacatgaaaaataaataaagttgataactttattctttacacgagttctggatcatgactcaaactcaaactcaccaaagatctaattttgagcataaaattgaatcttataatgggaccctttttttatgtgatcagttattttacaaaagttttgcatttgtcacgatccgctgagggtgggtggtttggctccgtttgtttctatagaaaatgaggcaaaacaagagttacaaaaaagtcatatatatgtatattttcttttaattaattaacttacctcccttttaattattattataatatggtgtagtaataaaaacatttttattgttcttaccaaaaaaaaaatatataattatcaacaaactttctttttttttaattctctctattttaatttaattttttcttctctataaaactctttcagatagagtgagaaagagaggaaaaagtaatatttttatttttg

SEQ ID NO: 195308 - DNA, 3400 bp, Cannabis indica
tattttaatttatttattatataatggaatgtgataaatttcacaaaggttacctttgaagttagatttttgttagaaaaaaaaagtaatgaaaatgtacggaataaaggggaatatacataaatacatttgaatttttggtataaaaagaaaagttatatagaaaaaaatgattaaaaaaatacaccaaatataaaaaaattaattttgtttttaattcttcatacttttcttttgttattcttttctatttacactaaaattcatctttcaaatttagtgtaaaatgtggcagaaacactacacaaaacagagaatagacaatagagagaatacactgtttaaggaatggtccaaattgctattccttaccacatatatgtgactttaaacttaatcacacgacagagaaatataccaaacagatgttaagtgatttctattttcatttattatattacaaaattctttatatataaattaggggaatcaaaatatatcatttttgaacctttattttttatttttagagtttaaattgctccaataagtactgcatgagtttgttatttaaatttcggttgcgatttgaaatcacccgttgatttattcgtttatttcctgtatagaaaaaattactttaacatataaaataaaaaagaaccctataaattattgctctaactagtacttatgtaagttatattttgtttatatccttttatggatattttaattgtcaacaaattatagtacactttaattgtataattttttttttattgattttaagaaattattaattaataataaattaaaatacaaagatgtatagtaatcattcaaattcatttgtttactaaatattatatgggagaaactagtgggcccaattaaattaaggagaaaaaagaaaagaaaaaatgttctcctcacattttcataaaaatacatttttctttcctaactactttatttttatttttattttgttaattaaaaattaaaaagacaaatatgtccttcaaaaaactataaataaaaatacttatactttttaacaagggcaatttagtcaaattttatcattcgcgttacctttcctagttatgtaaataaaataaaatgattctcatttttgtccccatagtttagtaaacaacataatgaaatattgtttccaattattttacatttttaattccttcatttatctcattaattattctaattctagttacagtttagtaaatgtgtgattaatattttagtcccatcatacagaatggtgccatggtattgtagtggtgggtctcatgtactgaatattgtgtatattttaatatgtgggaaattggttggtgcacgtaagtgtaaccgtgccatcaattaattttattttgttttgttttattttattcagttacaaaaatgttatttaataatataaggtacaattagttattaaagttgaaaatgacaaacatacaacaggtggtgatctcaatttgtatggtaagagggtagaattgtattttcacacgtttcttttggcgtgctttgtataataaatgtatattacataattttacgtactgagaacgctatttagtgtactgaagcataccaattctctctaccatgagagtgttaggatatccaacggaggaaaagcctttatctttttgacttactggtgcactctttgttagaggcttgtgtgtctcctatgatatagttttcttatcttgttgctctctaagatttctagtcatatcagcttaaaagtttttttttgtccgcgtatttattgaaggtggttaaaacagtggttgacttggatagttttgatggaggaagtgcatagttcggtaagtggaattaatgagatcaaccaggagggagtctaattaaggggatggtggaaatataaatgtaactgatcatacttcatctacggtagatgctgcaatcttggaagatactgtgaatacagatcctcaagcttcagatgaggagaagagagagggagaattggaagctttacatcaaaactttcttgatttaatgtccatcgaactggaaccggattttgagctcaatgcagaggttactagaactggtgtcctggcttgttttttttgaaggcaagggagtttcgagaaccaaagtgaaagaaattttccctgacatttggaagaaactcaaggggaactggaagttcaaaactttgaaaccaggcctatgggggattttcttagacttggaggaggattgctttgaagttcccgagaatagaccttggttgatcaatggaaaaatgcttattatataagaatggccagaggatggtctttggaacaatgttgatatgggaaaagcttatttttttgggtccaagtgatagggctccatggaccctatctgaaaattgtcaacactcctacgattgttgccaaggtagtggagtacaaaggttacgatatggctgatcaaagaaccattcaacataggggtttcttgaagttccaggtggagatcgtgacttaccaccaactatgtccagggttttatcttgatatcaaaagggcgaggaaagaatggattcaatttagatactataaattgcctaagatttgttatcattgtggatatttggggcatgacaagaaggtgtgtaagagatccttggccctggcttaccctcccgaaggtgaagcagtactagctttgaccgtggatcaaagcagagtcggctatttacaaatgcttcaacacgagaaatcagcttgattgtctctatgtggccagtggtgttcactccatacgtcccaaagctccgccctccgctggcaacttatcgggggaaccagtgtttaatccaaaggataaagggaagactcttttagggaactccaatacacgcatgaaaacaactgttaatcctggtatgccgaaaaagaaagttatatggttcatactaatcaaccaggtggtaattctaaaaaaaattgaaagtggtggaggttagtccaaaacaacctaacgataacggagctactaggcctgatgcaaatcagatttgtgaagataggcttattcaggataaaaggcccaggtcagtttctcctagcttgttgcattttcacttgttgggaaagaaggcctctgatgttgataacgagatcattcagaaatatacttcctcgcctatccttaacccacgtgatgagagggtttgcacatcaattatggctaatgttgggcctacttataaggaaatgatagaaagcccacatagtgatttgtgcaaatcaagacaaccccacaaacaccctgtgcccacccatttcccttggcccatttatgctagtgaaattgggttgactgaagagttaat

SEQ ID NO: 195309 - DNA, 1291 bp, Cannabis indica
aaatatatatttttatacatatgtaatgtgtttcatacttttaatggaagaaatagagcatgtatgatttgatattgagcctaatgactttttagtaatgtttttgttttgtttttatcagtgctttctatacttacaagacttattgttaacgttttttttttttattattatacctatgtagtatattatattagaaatatatgatagttaattagcactttcaatagtcataaaaaaaaatatcattattttagacaaaatatatgtatctactataaattttctctttttatttaaaatagagaaactggggatagcaatgccaaaagtcaaactcaaacacactaataatagggtagtgcaacaatgtacggctatgtattatatattattatgcaatcttatcgttcccacctgtccaagagacatatcataaccaaccttgcaattgacatctactagtgcacggaaagaaagagtggtgtttaatggttttcactgttatacaaattgttagggaaatgctgatatcttcttcttcggtattttgttcctatataatttaaaataataacttttaaataatataggccactttattttatataataatagtcactactggtatcaaataataatgtttaaattgctaaaacccctaattaatatttttatggtgatccatccaatcaacattcaaattgtattaaaattctttttggaagcaacttgagtgaattacttaatatctttgttaaagatttgcaaacccctgggcttattcaatatataaaccgcccactatactactaattaaaaccaatgggcatgtgagtggaaataatttataaaactaatgcaaattattgaaaaacgaaaaaaaaatgttttgagtggcggtataaagagtaattaattaattaatatggatacacttttaatttgcacatttaaaaacactatgttgtataattaatcttagttataatataatctctactttaaaattatgaatatataatataaattataagtttagtgtgcgtccttttataaatgaaccgcccgcaaccaatagtgtagctaaagtccatatatgttcaatcttgttaaagctattatacgtgtaaaaatagataaagccatcaaaaagagaaaataataaggccctgaccaaaaaatgtacctttggtaataattttttacttttaaaattaaaaaatttaaaatatttttaaatcatgttctataaactctttttatttttaatttttaattaaaatttaaa

SEQ ID NO: 195310 - DNA, 2000 bp, Cannabis indica
gacaaataagacctttataaagaatccataatgttttcttggtaataaacagattattgttcttcatctctgcaataacactctccatctcgtccaaacgcttttctgaagcatacataaccatcttacagtgatacaaggaccgacatattctccattctgcagcttctgcactcttaataaatttactagtttgtccacagcattacatcggaagtaactactaataatggaccgcatcacacttaatgtatgtacagatgtgttatacttaaatgcctcatctattgatctctccattgcttctaaccaatcctcttcagcataaaccctaatcagcaggacattcaaccaaggtcgataatccttatctggaataagctttaataattcctcaatctttttcagtctttctttgtcagaactcttgcagtacgcacatatcatagttctaatcaatgggatttccttttcctttacataatgttttattaattcatacgtctcctccatcttttccaaattaccagaatgcgcataccctcgtagcagtagcatgtacgttcgagtattaggctcaatagaactctctttcatctgttcaaatgttatttccacactatcccacatccaagctgtgagatatccagctatcaaaaaattgtatgtttttacattaggagacatatttaattcctttatttccctaaaagttgcttccatgtgatcaagtagcatcaaccgaccgaaaattgagataagaatgttatatgttacaatattaggactgcagtttttttcgctcttcatgtcccgaaacagtgactggcacttgtcagcaaaaccattgaacatataagcactcatcaatgcattatagatagtcgttgtcctgatccgtttgtttatagcctcagaaaacaattcagcagcaagaccaacattttttactttaccagcaagtttaatacctttggtgtactcttctgctagcattggaactccagatttggacagatttcttttccaatcaaggacctgaaacatataaaagtttagagaaagcaacgaatgtaatatgaacattatgcttctctacaatttttctttacaatggccttccttctctatatgcatatcatatttttttcacacatcaaactaataaaactcgttaagaaaactctttcaaaccaaataaagtcggttggcacttggcactatgataaggttttactcatctaactatgaatctccaccaaaagcaaatagatccaaatgggccaaaactacactaacatgcctcaatatacataattccacgcaactagaaccaaaacccaaatcaaaatataactaaaaacaaaattcgaattcccatcgttcaaacccagagccaattggacaagctaaatagtaataactaataagagccaaaatataaacccctaaaaatacaaaagaaatttaaaagatttaaaaatataaaacctttaatgctaaccgaggccgcgaatccaactgcttcagcagttcaacgactgggtaaccaacagtacagctccgaagtagcgtatcgcccttctcttccagtaacctaatagcactgtcagagtcatcgtcgatcatcaaaagctcatccctgagctgggtcaccttcctggtgagatcctcccagtgcgtcgagtcctggtgggactgattcaatgaaaacaatccaataacctccggcggaaagccggaagaaggaggagggtgggtatcggcattgaagtcacgaatgaagccgtaattagggaattcgttaacagggaaagcaaagggagttggagttttgcgcttagccgctgaggagaagcatccatggtggcagagtagttgcgattgggccaagtgagagatcttccagacccgcttcattgcctggtgataacgaaaggtttcatcctctgagggtttttgaagggttttgagtttgggcgaattgaagaggaagaaga

SEQ ID NO: 195311 - DNA, 1521 bp, Cannabis indica
agagagagagaacagccactttcaatcaaagaagttgttgctccattcttaatgtctaataatgtacttgcaaaaaccaaaatgattctgaaactaaaatgtgagcaaactcacaggaactgttttctagaaatgcagatgttttgagttcctagaaaatctatcaggtttctgatataataaccctttttgttttagcaaaaaacaaaagttatttagctgtcaagaacaagtgttatgctcatccaaatatcctagtgatgatgacaatgctgcaaccagcacaaacccaaatttaaagcaatgagcaagaaataagaacttataatctccattagaatagcacagatgttgcaatattttattagagaagcattttgtatccctcaccttcgacaccggagtgaaaaataccaagacctgcccaatagacataaccattcatgggagtcaagtcatacacattcagataaactggtgatcttcctggaccataattggctgactttgttttcgaaaacagacagaaccgagtggttgttttccccctcaaccgaagaggaccaatggatttccaccctttctttaatccaaatttcatgtttgtgaatgtgtaacaccagattttggtagtcaatgccaatctccagcctatatacatagagcagttgtcaagatcaattgattgtgaaacaagagaattattgtttatttgtattaaaaataaaaagtatgcagacttgttaacatgatacaaaccaaccatgttcatttgacagcgttcacgattaatcatttgtttaaagggcaaaggcatatgaaagaagaaaaggttacaaatcatttcagtcaacccaaaataaattaatatatatacgtattttttaatcctcattacaactttactaggttggcaaagcaaaattcatattcaacactagtgaaaattaaaataactgcattggtatatactcgattgaccaaattaattatatctactgttaatataaatcaccacgacaatgaaattcgccacaatttttcccaagaaaaaagaaaaacaagatgaaaaatatgataaaattgcactcaaaactctgtaacagttaccaaatttcaggtattgctttttacccaaaaaaaaaaaaaaaagcagtttcaaatttcccgtttaagtaacaaaaatttcagcattgtcatcaattagtgaaatgagctaatttgaggaagaataagaaacaagatcagctaaaagatgagacttttaacaataattatgccagatctacttagaagctttattagctaaactagatctatatgcaacctttgctgcaacttaaagtttagaacattattttgaaactaagcgatctcagttacgaagatgaactgctctagtttaggacagaaaaaagaacccattttgaaacacaacccattcttcaaaattttcaatctggttggagcagctatggtttctgagaaaccaaacatgaccagataacataattatatata

SEQ ID NO: 195312 - DNA, 686 bp, Cannabis indica
gacttgttttaactgatttcgaactaggtgtgttagccgatgtgaatccaagagaagccgagctacctgaaggctggttttgaggtggagaatacgtagcagattttggtgaccaccccaaacaaaatccatcccccttggaacaccccaacagatcatcattcgaatctttagatagttgtgccttagccatagcatctgctaaatcgacaggtttagccattaagagttcccgtcgaatttccaatttaagaccccagacaaaaaaattcatgaaaaggtgttccaaaaaccctgtgattagagtcaatagatcttcaaattcagcccgatactattccacacaacctaactgtgtaagctttgctatacgacccaatggatcatcgtacactgatgcaccaaatcggagttgcagagcttgaataaacgaatcccaatctacaaaggagccactcttctccatccattgaaaccattttgaagacacaccctccaaatgaaaaggaatcaccatcagctgtatattgtcatcgatgtgatggagatcaaaaaattcattgatcttttaaatccaatcatcgacattggacccgtcaaaccgagacactttcactcataaattcttaaggatggaattaacttcccaacattcagtatccatgtttgaacgatgcctttggatt

SEQ ID NO: 195313 - DNA, 1819 bp, Cannabis indica
accgtcgatgtctacaacgattgcatctgggtttgcaacagcagctccaatagctgcaggcaaaccaaaacccatagctcctagtccacctgatgtcagccattgacgaggtctgttgtacttgtaaaactgagctgcccacatttgatgctgaccaacacctgtgcttatgattgctttcccatcagtcagttcatcaagaacctgaatagcatactgaggtggaattgcttccccaaaagtcttgaaactcaaagggtgcttttgtttttgatcatccaactcttttgtccaagaagagaaatcaagtttaagttttgatttgttcttctcaagtatgtgattcattccatccaaagcaggtttaacatcaccacaaacagatatatggggttgcttattctttccaatctcagctgaatcaatatcaatatgaactatcttagctcgactagcaaatgcctcaagcttccctgttacacgatcatcaaacctaactccaaaagcaagtaacaaatcagccttatcaacagcataatttgcataaacagtaccatgcattccaagcatttgaagagacaaatcatcagaaagagggtgagatccaagacccattagagtactagcaactggaatcttagtgagctcaacaaacctcttcaactcctcactagagttcaaacacccaccaccaacatacaaaactggcttctttgactcagaaatcagcctcacaatctgctccaaatgagcttcattagggagcttggggagcctagctaagtacccaggtagcttcatgggttgatcccaattgggaacaacaagctgttgttgtatatctttaggtacatcaatcaaaacaggaccaggtcgacccgatttggccaaaaagaaagcttctttaactaccctaggaatgtcttccacatcaagaacaaggtaattatgctttgtaatagatcttgttacctcaacaataggggtttcctgaaacgcatcagtaccgatcatcctccttgggacttgtccagtaatggcgactaaaggaacactatcaaggagcgcgtcggctaagccactgaccaagttagtggcgccagggccggaggtcgcaatacaaacacctggaagaccagaggagcgagcgtaaccctcagccgcaaagataccaccctgctcgtgtcgagggaggacatttcgaatgctgctggacctggtcagagcttggtggatctccatggaagcaccacctgggtaagcgaagacgtctttaacaccttcgcgctcgagggcttcgacgaggacatctgcgccttttcgtggctcgtcgggaccgaatcgggagacgaaggtgtcggggtcggaggaaatggtggtgggggttggggttgttacggcagaaggagggtttcggcgagggagggaggtgttggtgagatggagtgggcggcggaagagagcggggttatggggagatgaggagaatgggagtatgaatctgagaatgggttttgaagaggaggtggaggaggatgagaaagtagaggtctttgtgaggaaggaggaggttggagcattagtggtggcggccgccatggttgagaaacagaatgaggttcagtgttgtgtggcaaatatttgatgaagatggctttaaacgaaccaccacaatcacaaaccttttctttattattattatttggaattgtaataatataattataatttttattgactcgactatatgatggactaaaattggtgggatggaggcacgatataaatagagcattaataacgattaataaataagtaa

SEQ ID NO: 195314 - DNA, 2016 bp, Cannabis indica
aaaaaaatttaaaaattatcggacaaaaaagatactaagtagccttactttttttactcatgttatttttttttcccttttgcgacgtttgttctggtatccgtgattggagaaagaaatttgaaattacgaaaatagccttgcatatttcaattttcaaattctcattgttttgtttggcactttatggatgtgtgtccatatgtggcaaatgttggaaatgctttgctagtttcgaagaggcaaaagcaataaagtgggctggttttgcgagagtctgttttcagtcagctttcaaaaggttcagctgcccaatcttgttctaacacgattgttttgttgattccaggagaatcaagggcaatcttggaatttaacacttaatagaaaataccaatcaactattcttttcttggctttccatcactattaaataaaatatttaaggatgagtagtgagtagtgttacctgttttagaaaaaactaatgattattagcacttgttagattgcatagtacattaaactactgaataattatcacatatataacaattggtctagttaggtccaatacttgtgacaaaaatctcatgccaaaagttgaagcaaaaaaaaaaaaaaaaactcatgccaaaaacaaaagtatataacacagtcagattcttctatctaccagtcaataaatggattaaacaaatctatgtataaataaataataaagtgaagtgagaacacaataatttaagaagtggcctatacaaatatgccgtggaaataccgatgattacgccatatgcttaaaaaattaactttgcatataatattttaggtgttaggtattttattatttttgtaggtagagagaagccattgttagatatcatgcatctaaattgaattttatatatgtaattaaatgcttaaatagagtattcttaattttaattttgttttgaaaaaattactttatatctcaattaaactttggattagagtcataataaatcatccatagctatcttacacttaaactttagatgagtttcaaatgtgccattaaaaaaagataattacactacatactgaaattttcaatttttttacttttatactgtggggtagaatttttttttcttctaaaatactgtgttttttttttaaaaaaaaaaaaaaaacggggaaagtttaatattgtgtactgtgttaagtttttcacttgttgtttctatggttattttttagtttgtttcactgttgtttttagttgttctgttttgtactaaaaaacacagaatatttttgaaaaaaattctgtgtgacagtatttttataaaaattaacctaaattttaatatttttttaagttttcctttaaaaaatgtctaaagaaacacgccaattgttacatgaaaggatacaggaattaattaataaattattaatattatctagctgattaatataaattgttagtatcaccaattgtgctattagaaataatttcacattgttaatgtgtagaaataaaataccattataattctcccattgtcaattaattttgagatgtgttctaattccaacacaaatggataatcaactaaatatccctaattttcaaacatttaatttattattcatttataaaatagttttacattttttttttgaatacaatcggtatctttataaaaagactagatatttgaatctctcacaggcttcataaagagactcattatcgtgttggaaaaaattattgacttctgatcccaacctggcaagttttgctggaggaaagaacttggaaatgaacttcacgaccagattctccctagttaccagtaacttccaggttcaagagacctaaagaagagggaaatagaaacaagattatttgatatagattttacttaacaatgaaaaagagcaagaacatgggctacaccaagggaaaaaattaggatttctcattcctaaatatatagctaccgaatgttactttttttctcc

SEQ ID NO: 195315 - DNA, 1091 bp, Cannabis indica
accttgaactcagactctagaccttaactcaaactcggacccaaaccccagatccaaagctagtctcagacccagacagggactggaatccaaacttgaactcgaacctagatctggatccagaatcggtgttgaagtcaagtttattgaaaatatatgataaatttacacaatttattagtacaagttatttatattaaataatactaatataacacaatagaatacacactatatcaaacaagtccataaagcatatatatgtatattcaccaccatagatagtgttttcattttacccggtaggtaatataaggtgggataggaaaggggataagatggaatggggtatggatttgagagtctcgaggaagaaataaataaagaaaagtccctttcaaacaaacacagagaccacttgtcctactaaacatatatatatgcatgcagttattagttactttcacattcctatctctctctctctctatatatatatatatatacataatatatacacacaaacacaataagaatagaatagaatagaattggtagtttttactatgctatatgaagttgtattattgtaaaattcaaagacaaaaagacaacactataatttgcatgcattaagtactctaataagtaataacaatatcatgactactcactcaattcttcaattctcttttgtccacttctctatgtgtttattcttttatataataaatagagtcagaaatcatcagaacacacaacaccacccaaattctcctttttttacttctcattctctttaataatttatatataacaaaatattacatgcttattataataataattacattattattattattattattattattattattattattattattatagaattgaaattggcaaggtaagacaaataatcccccgtgattcccctatctctctctcttactctgacaaaaacaaaaaaacactatacatatgacatacctaaccccctactctttaccctctactctatatctatatatatacatattgaaagtgaatgatttactaatattttttaaaattattatatt

SEQ ID NO: 195316 - DNA, 986 bp, Cannabis indica
ttattttattttatgttttttttggtttattttatttactgcatcttaattatgtattttttttattattaataatattgtatttatcataaatttatagactatgttttaattaccaaatacactgacatacagtttatttttataaaataaatcgttcaaataatcctaacaacttaaattaccaaaattaaaaaaaaaaacaataaataaaactaacatttacgtggtttgccacgtaacatccacctagtaataataataaaaatctattctctttccatcgtcacttttcttaattttttttacttaatttttttttttaatttgttttcacgtctttaatattacatttttttttgaaggcaataacaaaaatattcattgaaaataatcatgatgtcatacaaaagatttccaaggaaatgagaatatcttctaacaaaacaagttatttatctatccacataaaataatttaacctatcatttaaatctaatgacatcatcaaaagctgcacaaaacacaagtaatttgaatgtaaataaacaaaatacagtatacattaataaagaaattatttacatacatatgtataaacaaactatttagaataagtaaaaacaccataaaagaactttatctgtttagattagaatgccttcctctcttaaagtaaataggtcaattaacaacacgaaattttcaaaaatgtattccaataactcaataacttaaatacttccataactaataactttaataaatttaaaatttagtattacaaattttaatattattataccattatttattttttgttgttgcgttttttcaatatttttttttttttgtaaattagactaacaagctgcaagacaaacgacagagagcacaggcaacaacaacaaaggaattagagtaattcctcttaggcttcttccctcaacctatggcttccttgtcagcaatgggcgtctgcgttg

SEQ ID NO: 195317 - DNA, 2622 bp, Cannabis indica
ctgcctgaatactttggttggtaggttcttgtaggtcatccagactatgaagttacagggggtagtatggtttttaaaggggagaacttgttggaaatggagccagaggaccgctccgttgctggcctttttatgagtttccaatccccagttgagattccgggtgtgagcaatattgactttctgaacatggcttacaatgctcgaaggagaaaacttggtctgccggagcttggaccaatcgaggtatataactattggcaacttcattatcttttgtttttcatccagtaacaatctagaagaagacatcgtccttgctgaataatctttttttgacttgatttcagttatttactttttaatgtgagtgcatactaaatctaatcttatgcatatgaggtaaaaatgaaggacttgtgctaagtagtacttcttgatatcatgaaatggaattggaagtgtcaattagttgtaggcgtcttgatcatcatttttggtgagaaataacactgggtgggaataaatagatgaaactgtgttcttgtactttggtagaagaagatgaccagaactcattctaagctataatgtctaccttagtgctataacttcgctaattctcactatcctttgttttttgacccgaggatcattacttggatattcttctttcctactttgcgtatagtgaattttctttgaaagaaacaagattgtttgattggctaactttcattgatacttaaaacattttattgctttctgtgataagatgctgttctgtccttgcagttctatgcttacatatttcctaaacttgacctcgtcaacatgaagacggactttctcaatagaaatgttaatgaaggatttagtggtggtgaaaagaagcggaatgagattttacaacttgcggtatgttaattattgttaatgatttttcatgtttgctatctgacagaaattttcatgtactatgttctatatatttatgctcttgctttctggagaaggtccgtgttgctgctatgcttcactgccatatcagttttgaagttttgatagtgtactttacttgatgagaaaaatataaaaatatttaaaagaatgatattgtccagtaaacaatggcttaagcatcaaactctggtgatgctgtacagctcttactacttagttatgatgtttctttaacctattctagtagcttctccattatactgtgattatgtatcatctcagaacagtgaagccaaattatctaaagctattgtatatgcaaaaaaaaggaaaaaaaagattgcattgtcaagtcaagcttttaatgtttatctatattgttgggaaggaggggcaactgtctttagaagtaatatgaagtgtacacgtacttagttagttttaatgagtaccttcctatacgtttttgaaattcttttagtgtttgggtaatgaattcaactttttcttttcttttgatggacctgttttctgactttcaagtacagctgttttctatgatatatattcatgacattgatcatatcatttatggggctgtttatggacacttatgcatgttttcaggttttgggggctgacatgtctatattagatgaaatagattccggattggatgttgacgcacttcgcgatgtggcaaaagcagtaaacagtttactgactccaaaaaattctgtgttgatgattactcattatctgcgactgttggaattcataaagccttcatatattcatgttatggtaagtcagtttaaattattcaatacttttaaggtaggatttggttgtcttatgaaataaaaaatgtaaaagtttaattttaaaaacaaggaatctcttttgacatgtcaagagctgcatagcataggctggaagtgaacttttggtgtgttgcatatgaactggtgacgacttcttgtatcgcagtttgtctctttttcattcaaagtccgttaaaagaatttttttttttttttttacagtttctgcctcaagaatatgttattcctcattcaaagtttttcgtccattttgcttcctctttctatttttttttttaatttctatttgagtgaatgttacttggtttgattattatagtcacaatttctcggaagatacttgtttgggagaaaacaaacttaagaaatccatatatggtatttctagtatattgaaacagctagactttgatggtatcttggcatgttaacttacgattttttaacttttggatgtaaactgaaaattcttaaggacataactatatgaagataagtagttgttagtgatcaaattaaaattataaaaaaaagctattgttattggaatatgatgttctgctaatgctaatgtagtgttgttctcctttcactatggtgttgttattattacaaagcagtcataaacaagttattcaattaatcactcccttgcaatgtaattatttgcttctttggacaataggaggatggaaaaattgtgaaaacaggagacatcaacatagccaaaattcttgagaaagaaggatataaaggaatttctgatgcataactgccaagaataggtattcatgctctttcagtgcaccgagtc

SEQ ID NO: 195318 - DNA, 804 bp, Cannabis indica
tattccaagctcaaaccatttgtacaaccatacactaagctacataagttcaatgtgtttaaaatgtgcaattgagctaggcataccagacataatcaacaatcatggccaaccacacattcctctgccccaattggtgtcttcccttcggcttcctccgacgaaaactgacatcctccgccgtctcatgcgtccattagtacactttggctacttcacaacgacgaaagttgttattaatagccaaaataaagaagaagaagaagaagaagtagatgcatatggtttgacatcttcatctaaattactatttgtcaatataatggtaataacaagatcccaagcatgtccactattgtttgtttacagcttgatcaagcatttatgactccatggcattctcttggaaattggcttcgaaaagatgaagcaacaacactattcgagtcggctcatgagatgagcttttgggagtacacgagcaagaatactaaattcggtcaccttttcaatgaagcaatggctgatgattcaaaattgatgttgaagttggttattgaagatgtcaagcctgttttcgagggactaacttcattggtcgatgtaggcggcggcacgggagaagtatgtaagattctcaatcaagtatttcctcacctgaaatgctctgtgcttgaactatcacatgtggttgccaatttgcctaatgctcaaaacttgaagtttatcgagggtgacatgtttcaagcaatccctccagctaatgcagttctactcaaggtgcgttaatttgtgttgaaatgt

SEQ ID NO: 195319 - DNA, 1831 bp, Cannabis indica
ttttttgttgttgtttttgagatgttttggtggttttatttacatggagaagtgtttgagtttatactttatataatagagtaagagacaagtgtgagaaaagaaaagaaaagaaaaagaaaagatggggtatgcggttggaagtagttatatagctcttttgtgttgtgaaaaccagcctttttttgttccttaccttacccttggatccatgaaagctaacactagtaaagattcttgagcattgatattaggtaataggtattagtaatattagcattgttatttagtacgagcagggacggacccaagtgtattagtttgggggctatagccccactagcaaaaatgtagcattttaaaaaattaaatgtaattttttaaatttgataattatagatcaaaatacgtaaaaaaagttcccacaaaattaaataaatttagtaagaacaattataatatatataaataggtataaatatttttgaatgataaataaacccccacaaagtaaaatttctgggtccgtcactgagtaccagtataagtggatttttataattagttagtgatattttttaaaaacaatttaattataccaatagtaatatgagtattagcatttctcattttacaggttaggatcagaaaaattaaatacaggtcgaaaatggattgacacaaaatgaaaacagatcaaacacgacatgaccgttttaacatgaattaacacatttggcacgattttttttaaataaaataaaataaaaaattattattaataatataattatgtaagaaattatatatttagtgatttaattttaagtgaaaatattttaaatttattttttttaaatataattgagaatattttaaaattaataattttattatatttataaagaaactatatatatacttgtatataaggtttttaatagaatttattaaatttattatttttctttaatacttttaacttttttattaatagcaaaatagatcaaagtagattaatatgaacacaatataatttattatgggtcagttaagattgaaaaaattaaacacgagtgaaataataggtcaatacatctgacaaaaaataaaaataaatttcataaactataacacgaacacgaaaccttaaaacgctttacccctaaaattatatttatatataggactactactgcatcaaatcacatgaggtgtttcttcatcatctaaataatgtcacatacataacaatatattccttttaccttctctttcctctttcctcttttctcttttctcttttctcttttcttcctcatatcctgtacaaggcactgcttttcaaaaaaaagagtaaacatatacatcacaccaaaaggatcaaagcgccctaatttacttttaaatttaatgttttgtttcaaaacaaatctgttgctattcctcaactaatgatgctatatattattctcaaatttgtaatttttacaatagttattaaatgagaaaggttaacttaaaattcaatatcattattcatccaactaagtatcaggtttagaaagtgttaaatatcactggtgcctaataaaaatgctcttattaaattaagagaattactaaaagttattattcgtgtctaacacacttttcgatgccataccattgttgatgtaattagctatcagatcctatataatttagaacatctctaataggagttgtctattggagtggtcttgccacatattcaatatgattcaattttcaaaattaattttacgtgaagtgtggctcaatattaataatggtcgcatgacattttttt

SEQ ID NO: 195320 - DNA, 1999 bp, Cannabis indica
tgtgctcactcgcactgaacataaattgaagatataaatgataattttggaaatcatgttgtaaaaacatgagaaatagcccttttgagcctaaacatcgagtgagtcccaattagtcttagtgacaacatgagcttgaaattgataaataatacgcttgaaaattggaatggtgtttaggtgaataataataaactgatgcccaaaattagtccattagcatggaagggtgttaggaacaaaactaaaagttttttgtcacacattagtaactaaagtaaatgttcttgattataaacctagcattaatccgtgacccattatgaaatctagcactacttagctctgaaagtttgcctcgtttgattttgatctcattttggacctgatttttttaagtatttaataatacagtagtgtgtatattaatttattatgttatagcattaaagcattaacaataattaacaaattattccaagacaactcatccttcttttcctttatctatcttttcttttgaataaagcattttcttttctttttactttcagtgttttgaccttgctcaggaagcccaaattgaaaagtgatccaattttcatgcaccttcttgggagagttctcaacaacaccactttttttgggcttttttttttttttacttttcagaactgactgcaaaaaatagacatgcatggccctgaaaccaatgaatatggcctttaccatttagtttggcattttccaaagttaatatatacacttttatggctagagtatggataggaacaagcccattcagaaaaataataacaataataatcaagggtgggttgtgaaatacttttttaaacagttttttatattttaattaaaaatgtgaaaatactttcagaaaattatttttaaaaattgtttttatttttactttttaaaataaattaaaaatttgaagaaaaaaaatagctttcaaaaaaatttaaaacatgttatttatcttaattatagtatatttgtattttatttcattaatattttaaatcccaatgttaaactcagactcggattccaacccttgacctggacccggaccccgaatctatgtacaccaattagtttgatcgggttatgatgcatgtcataagctctaccaaatttactaaataaattttcttttaaattaactatttacttcactatgatgacaaatacaggtcaatcaactattattaatttattattcaataattataactaagaattaataaatatttttaatataaagattaaataacataaactagaaaagcaaataaagatagatattacgctattaagaaatagttaagattcaatttccacgctcaacaatcattcaagatcaataataataaaatttattccactttttcaattaaactattaacaccgcaaaaaatgctaaagcagtcaactttctcaatctccatattacaattaatcaaagcgaaacactcaataattaagtctttttaccaagcaatagatccacgaagcatgcaatctatttaacttaagaaaaacattaatttctatggagataaattaatttaggtaacaaatcaatgaagcatatagttcatttaacctatgttctatttttcatcacaatcaataatacatttgacattactattaattataaattatcactttacttggaatcctaaactattaggtgagaaggaattttaagatgattgaacaatgtaaaatcttaattagttgtactgttagatttatttttaggtttttttagagtctagttttggggataatagtttttatgttttatcattcagttttacacttatttttgcttttatgctaattttagattttagatgataaagagtttaactttttggtgaaaatatggtgtttctcagattttttgttgatgaaaatgatcaaaatttacaaaaatgaacctcgggattaaatttcttaacttggt

SEQ ID NO: 195321 - DNA, 699 bp, Cannabis indica
cgcctaatacttatgtcaacactctccttgatgactcgggtaattggaggatagagtctcttgagaagatcatgcacaaagacgacattccttggattgttgggattcaaacgagaagagatagaggggaagatgctctcatgtggcactatacaatgaacggagattatacggtggcaagtggctataatctcatccaaacggagaagcaaaaagcggagacttcaaacaaatcaattgcaagagggtggtggaagtcggtatggcaatcttccataacccccaaaatgaagaattttgtttggagagtttgtcataactggctcccctctaagagtgagttggttaagagaggaattcaacttgatagcatctgttcgggttgttggaatagagaagagactattggccatgctttatggaaatgtcctagactaaaggttgtttggcaaactgctggtttttggcatttgttccctaaggatatagaatttatgactgatctgctggagttttttatttacatgaaaacgaaatgctctacagaggaatttgaaatttttcttggtctgagctggctggtttggaaccagagaaaccaacgaatctttcaaaataaaaaacagatttcgagagttggattccttgggcaattgactacacaaaaagcctgctgcagagggatataaacaccaaaaa

SEQ ID NO: 195322 - DNA, 845 bp, Cannabis indica
aaagcaacaaacttacgtgaaatttgaagagaacttatttgctcaaatgatgaaataaagaggataaattattaaaataagatatgaagaagaaggaacaacagtgttgttgtgttctgtggtacacaaataaagtgaataatcttaatgactgtacagttagaccatttttaattatttaaaaacttagaaaaaggaataaagtaaagttacatacatccacttgttatgtcggctaagaacttttcttgatgaatatgaatttgctcaagcaaggactcgagattccttggcatcagtcagtactggtgcgagtaattatgagcattggactgcaccagccattagtttgatcaaagttaatgagggatttttgctgatatgggcagatttggtatggggtgtgtgtgtgtggctaggcagggaccaccatgggagtcttttagaagcttatccactttgtcccttcgaataagcttctaataagttgagttataactgggataatgtggttttagaatcggatagtcttgtctgccattaatagtgatctttattctttacatgccttttgaatttggattgttggtttatgatttgagaaatgttaaaccgtacaatggtgtttagtatcctccaacacatgtcaatatagttgttattctaactaaatatcatataataatttgtaaagaatatcgctattcaagacacgtgtaaaaattgctaggcatcacttattatttatatttaatgaaagttatggtttatttaaaaaagaagtaataataataaattaaccattaaggatttagtaataaattttctaatgccttttattagtg

SEQ ID NO: 195323 - DNA, 1603 bp, Cannabis indica
atagggctaaatactagtagtgtcaaaaaaaagagggcttatggccaaagatacaatgaaggccctggatgtaaataaagtagtgttctaaaaaggcctcagaaaacataggatatgaaagtagtgttctaaaaaggactcgcgccacctaggacatgttagtaaagttccaaaaaggccacatggcacatggcacaaaaatgtgagtaacgttctaaagttgaaaggccacaggctatgctgaataataaaacattgtctatgcgatacaaatataatgttgaatgctcaaaaaaaaagttgtctaaatgtgtgcaggggcagaaagagcaaaatttggagtcacgcgattgagatccatagagtccacaccgcccccatcatcagcatgttggtcggcctgatggtcaatgtcttggctggccacctccttcactggtgggttggccaactcctcatcatgtgtccccggtgatgatccctctcgataggtagcaacctattctgtctccattcgactctcaaactgtgcctttccacaggccaacgctctcttcgaaaaatccttactacccttgtacaataatttagctcgagggttgtgtaactagaagtcataagtaagttcggagaataggttggcatactcctccctattggcatgcttgccaacctcctacaacttcttcttatgatcatcaaggtcagtttgcagctgggagatgagggtagctttgggatttttcttgcattcctagcgccaagcatggtctctaagccaaaaaccattctctgtctctctaataggaaggcctccaacttagaattggctttgtactttaccacaagagaagcctccaaggtcttcgcatgctcctgaaaagcatctgaagatcttcgagagccatcacgagctgaactcaacttcatcagggcctgacaacaaagcaaaacaacattagtgtcaaaactgaaacactggctggcccatcaccccttgggactacaattgctagccagccccccacataagcttccaaggccggccaaccacatggaagaagccacctagccggccagccaatatagtaccaagaagatgaacaaagctaaaggtacaacttactagagaaagatcccaaagcctggcagagtaaagcctatcaagtccagagtcacctagatcttttagatcctcgtccaagcaaggaagagccctctctatgcatcggttggctgcctcagtagccctctatccagcaactgacctcgctcctctaatgggcctccgagaaccttggctggcagaccgtatcacaggtcctggtagagggtgaggcaatgatggcctagaagcatattcactgcatgaagtcttggccaccttagccctcatccattcagtgggctcatttgaagatcctcccgtaagagctctcaacctgaaagacatatctgcaaaaataaagtagcaaagtcaaaaagcaatcttaaacattgaatacaagaacaaaagcatgatgttatcaactatcaaatacaatcctcatcagatgaggaactatgaaagccctcgactataacaagttccatattataataa

SEQ ID NO: 195324 - DNA, 1862 bp, Cannabis indica
tggattggatttaagctattatgtgaattgaattagattcaatatatgaaatccgctcttagtgtggattagatgcactatgaacgaaatagtgcggctttaattgaataaacatccttgaacattacatataatgcaaaataaatcattaaatttaattgaaaaataaacaattaacatttcatttcgaataattattactctttgaattattatatatgttcaattttttgatatatataattttatgtgagttgttttgtattttgtttaattatagatattatttattatttttgtaattattttactaaattttgcctcaaatttttaattttctttaatgaaagatgtaactttatttaatcaattttgaaacaattacatcggaaactattctaaaattttgtctcaaatttttaatttttagtttaggtataaaaataatctaaagatataaaagtaatttcaatatagtaagaatgggaaaattaataaagtcatatagaagtcatatgctaggaaagagaaaatgcattgtgtcacttaaaaagaaagtagagattacaagaagagtggagttgagttcaacatagctcgaggaatagagcttggtaagcaaagcaaaggagaaagcgcacaaaggaataaggtatcagagccacgtgggccaattcgaagagagaatagagaatacgtggcactaattctcgcctataaatagagaactccaacattcaaacgggggacagattattgacgacactagccaaatcgtcattctgctaaattgctccttcgagaagtattctttcctcaaatcaaagatcaccgaccgaagatgaaccactcactatttaggagaaattgagaaataaagtaaagtgtaatctttgattgggataatcctagtgtgaagaattcgagtgttaatacaaatttattgttgagttaattcttagaatcaacagttagtgtcgtctatgggagtcacaagaacaaaaatgctgaatactaggctacagtctaggatgggatttaagaaagtgttggagaacgcgtagaatactgtggttataagtgaaggagacgcatcaaatcaaattgttgatccaaccgcctctttagcaatagaaatgcgagaaataaactaatggatgactgcacaaaataagcacaatgaggaaccgtaacccctcaccgaggagaaattgtaacaagaacaacgtatcgctgaggagaggcgtcaacatgatcaggatgaaaactcaccacatcattaggacgttacacagtatttacagaaattcatgtaagaaatggcagatatgcacgctcaaataaacaaaatgcaagcaccgcatgacactagacaaacaagtaatataaatcaagtaaggaatgaagagatactttaggagcatttgcaacaagtatgaatctctctaaacattgcaaaataattaagaaatgaatcataggtaatagcaattaataaaaagcttcctaaagagataggatcaattgttgcaaagaaaaaaggatctgattccttatcaatttttgaaaacgttgttggaataaagcaaacacctcaaaagtactttgatcaataagcaatgacaaataaaagaaaggagaacattgcattgccaaagaaatatagaagataccaccaattatgattcaatctcagcttttgaatccagtgtagtctaaagatgacttgttacaatggaaagaacatgttatgagggaggtcatggctaaaattggagaagggaaagtcgtggagctagatgatttaaaaagaggaagcatgaggaatttagctagatctccattcaccaaatggatcattg

SEQ ID NO: 195325 - DNA, 1105 bp, Cannabis indica
acgccggttctgaaatcaatcaccggtggcttcaccggcgcctgagaagacgatgtcaccgccgaatttggggaaacactgcgattacttcccttttttgatgatttaggcgatgttgtcgttttccagtatatccaaacagccatgaatcggagaagttctctaatgggtaagattttaggggcgatgattctgaggttatccacaaaggctcgagtcgcggctttggggagattcttggctaagtggaagccgagccgtccttgttcatcctcagtctgtaaacaacatccgtacgattcgtctctcgctccgtgatgtgtacggaccaagcatttgagtctgaacatcgatttatgctgtaacgatctcttattagtgaggagaatcgcacaaccaccggacctgaacaaacaattcgaaagaatcatagatctatcgttaccggaataccaattcggactaagcgattcggaggttacaactacagcgagtttattctgacacgatttgaaaacgtttctcactatatcaaccgagatcaaactcgcactgcaacccattccagtaagattataaaccttaatatcctctctcatcttgtaatgatttataatccgagaagacaaagaaggaacagtcgaaagcatcgaaacgttaacaacgagaacatcgatctgagacggagatattccgttacgtctgagaagtcttccaacgctgtcaaagaaaaactcctccatctcagagattccatcagcaatagtaggagaatcttcacgaccgtcgaagatgattctcggagcgtaagtctgttcaccgattccagcactgacaatagccttgaggagaaacttgtactcgatgaggcctagattcttggtccgcctaatgagttcgccacaaaactcggtgttgagctttcgatcgtcggttggtttgtagcactggtaatcgagaatgtagcaatgttggtctcttctggtttggtaacgtttccagatgatgaagatgaagtagagaagtggaagggaatagagtaaaacgacaatctccatctggtaaaacgacaattgatagtgagagaaagagagagagaaaatga

SEQ ID NO: 195326 - DNA, 2325 bp, Cannabis indica
ataatttatgttgttagttggtaaaatggctcgtttttaaaagttatttagtattttggcctaaattttatttgataattattgtaaaacggcatttatctaaatattttgattagatgtcttgatttttttttttttgtgactaaactcaatactcactctctactcagtaatagtctagagcgtgagatgttattttgcaaaaaaatattgaaaatagtttgaaattcaaaaaagaatggccagtatcgtttataaaacggttataatgtagttatataataggcataataagttaacgtgaagtcattaacaaataagttactattggtaacattggtaaccaaatagtattatcaaatgatacattcacacctttcaaaatatattcacaacaatctaaaacaaaactacccgcaattgaaggtgcacggaagtcaaaagttacaaaaaaaatgtttgaaagttataccaaatctagtaggaaaatccagtgactttggtcagaattaaaatgttgctatatttcaacaaacagttaacaaagttgtatatggtaaattacacaaaagcctatactaatgttaggtgaaatagtacaatagtgtaagaggcccatgcttgcttctaattcacaagctaactaactatgtatgtaatgtatagctccaattgtagaaagtacggtatgggcattgaaaagaatgggttactctacaattgtctaattaatgaatcttgatcatttatatttacaaattaaagatttgtactatttttctcctttttttttctttttattcggattactagcttagctagcaacaataccatagcagaaaagttgtacaaattagccaaaaataataataagagagagagagaggtcccacaaatagttatttattggtacttaagagatatagatagttatgaaatctgatcaatacaattacatatcaaagatttgtacttagtttattactaatattagtagtacatcatagcaaaagaaagaagaagaaagttgtacaacttggccgaaaatgaaaaaggaggtgtagttaagggtattattgatatatagtagatacaaaaggggagagatgaagtcatattaattacaataatgtaaatgtatttttaaaaaataaaaataaaacaaaattacccaatgtatatataaggtgacatcttactataatgtcttcaaaatggacatttattttgaaggccaaaatgaaatggagctttttgaaaataaaactaaataacatatatttcaactactacacctctaatgttgtactagatagtagttttacatgtatgtttaagttttaaccacaagttggatcccattttgaaatatatgattggttaaaaattaacttgagtgtaattgaattgtgagtggaaaataaaattgagaacaacaaaatatacgatttggaatttctctctagtggtaattgtccttagaaattattattagtttacttaggaatcatgctcttcttcttcttcttcatttttttttttggataatatagaaatcatgtttattcattttatttataatttaggagaatatatatgaaagtccactaagaaaaaaaggcaaatcagaactcattaaaagtgtattacaaaaataaagcccacaaattgaaaaatatttacaataggcccgtcatgcttttgcaaacaagattttcctgacaagtgacaactcttcttataatccgacaaagcaaaataatttgcaaagtatgatttgaaaaatatgtgtgccttctaaataatttttttttttttaaaaattaatataaaaaactataattagacaagcatgatcttaataatcacatcaccatctaaaacatatttagatatttaaaagatagacccaaatttcatcaagaggactaattaataaataaaattatttaagatgacgatttgtcatattttatttttcaaaaaatatacataaaatttaaaataaaatgcatcatcactgcattttgatgacacaagatctattggcaataaagatatatatgctttgactttggcactagctagccttgacacttttacaagtaatctacgtaagaataatattaaaataaataaacaattcgtttatactatcttaatttaataaaacctagtacctgcgaaatacaaaagtacttaaaactaattctcatcatccattttttttagaaaaacttaattaaaagtactttacgaattaattaaaatttgtatttttaaaattatatgggagtgtttgataatattttatttttaattttt

SEQ ID NO: 195327 - DNA, 1566 bp, Cannabis indica
aataataaacattcactatgagaatattatgtgagatttagcttcatacataattccttatccaatacaagaacttttacactaaatccacttccactagcatatccaaaataacaatacataatctatacaaaaaaagaaaaacaatacataaattatctctttttttaaatagaaaaaaaaaacaatacatatataaataataataattaaaaatataatatattgatgagtagcatagctgacgtgtcctcttacctagaaatatgggcaatgaaacagtccaactccttacgagaacttccaccttccgccatggaccgtcggagggccccaccaagctccgccgctctctttctcatctcaaccccttcatccgaagccatcaatcttctgaccccacatgccaccgtgtcagatctcgccacgtcatcacgcttggaccactctctaaccacaactccaatcctcaacaacttcgttaccagaaccgcatttctcggttggtcagaatgcataggccaagttcctatgggcactcccatagttatgctctccacgcacgagttccaaccacaatggcttaaaaacccacctgttgatgggtgccccaaaatttccaattggggcgcccactctcttacaactaacccaaaatttctcactctctcttcgtacccttttgggagttgtaactttttcactgcctcaaaaacgttacctttgtctgcttctctaagtacccaaataaatttttggttacttttttgtaatccaaaagccaattctgagatttgttcgtctgtgaaagctgttgtggtcccaaacgacacataaatgactgaattcggttcttgcttgtctaaccactttaaacacacgtgtctgtcgtttgacaaaaacgacaccggattaaaaggcccaactgcccagtgtctcttgttaggtaaaatcctatcaagtaaattcatgtaaggtctctccaacatacggctagtgttgtagagattacccgagttcaatttattgaactcgtactgtccggctatgaactccagaatctcggagttcatacagccttccaaagaaggaatatccttcgggatattctcgacactctcttctacttcaagcaaagacgtcgtttttttcatgccgtcgtaataaaataaaaagatagcaaaagccgaaacgctgtgaaaagtgtatgactcagcgttttgaatagaaacaacgtcttgcacaactgacgccattagcgagtcgtggattaccacgactcttcgggtttgggacgagagacggcgcaggagagccgcagtgggatggcgaagatggctagttgcgcggaaagaaggaaggaggtgagaagggaaggtttgttggagagatgggtttggaggtggggaaggaaaagatgggattgtgaaattatgaaagtgtatgtttggtattgagtttggatcccatccttggagtctagctttggcttggtggttgtggattgtggtgcctacgacgtggaccgggatgtcgtaggccgcgataaggcgggaaaggtggaag

SEQ ID NO: 195328 - DNA, 1823 bp, Cannabis indica
ccatgcaaaaacacagcagctggaggtgtactcatgagtatagctttgagcccaagctcaggattcacccaaagttattgcatcatcatccgtacgaatagcctcacatatttgatacaaaccatccattgataggttaaactgtggctgatatattttccttttatgggatatattcaaagttgatatcataatttttagaatcaaattgaccaatgtcacatgatcctttagcaatatcaaaccattaaccaaaaatctgcacaggtgagacataagttccatgagctgttcaagggccttcttttgcaaccacttcgattgtgtttctggagaacatgatattgtagacagcctaatattgtaatgaagagaataaaatattttatcagtcttcttttcgtctcctatctaaaactgctcttgacactaatattgtaatgaagctttcattaacttactaatattatactcatcaaaacacctaacaaatctttgccaagcatttgatcacgtataaaatctctgatacaaacatttgaaggaaatagggggaaataaatggttctttgcttttacctgtaacactacagtcaattgcatcatgaaaatgttcttttcctctctagagttcattttactgaagatcgagacaacagaagacaaccatgaaaagagaccacaattttcaaccagatgtcgagtcattttgtaacatttgagtgatttcttcaatatctgtgagacaaatgagaaagttctattaattagaaagcttgtaagcaactctgtcaattaactatcacaggatcttaaaaccacagaacatgatgctaaaaggcacaccttaaatttgttatttccaaaaagaaaagtaaaaaaacactcacaatattaggacaacttcacattcaaccaaatattgctatgaactgtacaagctatatacattcacacaaaaacaaaatgataacttactacaagctaaaaggtgcaaaagtggcaatgcatattcacccatacattttcttagattcgttaactaaagatcttttttaactttcaagaacatcaataactattttaattctttatgaccaaaattctttttctactttcaagacctcaatgacaattataatcctttacgtgcgtgcaaataatcatttagattggcaggtgatgcatatttctctctcatatcgttttttggatacaatgaagatctgaacccttgccctccacatccacacaatcacattcaaaccatttgagcccatcaaaagtggcatgcatgtttctcatattaatgcaatgaaagtataattttctcagtttagtagcaatagaatttgggccgtctatacaaatagggtggttaagcatgaatcaaggccaggatcctttaaataggtaccagaaacctttctgattcagaaattatacaactgactatatagttttgttccattgcaattacttagctttttccaattatttgtgtatagttgatctgtaaaggacttcagtacggtgtatatttcctttttcttgtatattatatgactgtactgtgactatgagctcacactattaatggagtagtactttccaaagacaaactcacaaattaaaatttgaaaacagtaattcttacaatagtaagtactaaagatcagacaataatcttcaacttttatccacgtgtctaagatagaacaatgagtaatgaaactgtcaggggcccaataaagaatcagatagaaagaaatttagtggggagccttaaagattttctacaatattttgtgataaagagtgtt

SEQ ID NO: 195329 - DNA, 3079 bp, Cannabis indica
tttaacgaatcagttagaaagagtgaccaacggacttactgaaaaacgtgacattgtgactatttgtaacgcccgaacttgaaaaccacttggatttaaactttaattatataaaccaactataatcatatatagatacacatgtaaggtttaaaaaactgagatcccgtattaaaactgctttcggtaaacgcagtgtatacatatatattttttttacatgtcacgtggtggtgacaacaaaagctaaacccaaaatacattaagatcgaaaccctccaggttataccgtcgcgatatgcacaatcattgccaagcctccaactcactgttcctccactttagcatttcccttacctacacatggtagcaaactaatgagtcaactgactcaataagatatgcaaaaaaatatatataccaagtaatattgacttgtacttaggccctcttgtgcctacttacaagacttaccaaatggtcaagaacgttcttaatggaagtacgacctctataccacatggactgaagtaccacctctgtactagtgttggtagggccaaattgtacttccagctgctactaggtgttgtaccacatggactccgtacttacttgtactcgtgttggtaacactataacattcctttaaacattatacattgtaccaacacactcagtattacaactattccagtattggtagtgtaaaacaatataaacagcatgcattcacatacatacacacatacataaatataatttatgctaatcttacctcgctcccaaattcaagcgtgtcgatcaacttgaatggaaaattcacgagctgaatgtaggtcttatgtcacattacataaacgggtaaataacttgaacaactcctccccaggaaccctaactcataactaggagtaataaacaacaaggtaatgctctagatatcagggaaacaccaaactaggctctaaaaataactcaaactggaaagatcaagttttttggggtcgtgcatgtgaaccgattaactggttttacaggtcctgtaaaatcggtcgaccagtttacactaggaatccccaaaaatacgagtactcagccaaaattttcccaaatgcaatcatattttccagaacacatgtatatacattctagaacgatttccaaacataaacagtaagaaaaacacccaaggtcataatatgccatagatgaacagaaccaaaattacccaacaaaaacagttcaaatgaacctaaatcatccattataactcacataaaatagccctaaccaagactcaataaaacagaaccaaaatccttaaattcaaccctaaacctaacaatacactcataattaaaagagtagagtttatctagggttacgtttaataaaaacacttcaaatcctagctaatactcccagaaaaattgttgaagcagctagccaccctctaatttgtactgaatcgaaaggataagaggaagaagaaaggtggcttctagactttttttctttaattttctatctttgcaaattatgtaatgttattattattttattattaaatcaagggccagctaccaagaaagggagaggacacctatatataccataaaattcaaaaagaccaaactacccttattttaatgtcgaactcaataaatcgcttaggggtaaaatggtctaaaactattaccctgcctaataataagaccgtaaattaaaaaatatttactgggctatttggaaatattattttgtttattttgagggtttaatgttggaatattattcccttagtaatataactaccttgaggagggtaatattaacaccttaaaaaaaagtatgcttgaattattcacttctactatattaatttgaatagtatttttaaattaataaataaatttaaacaacattaatattatgatttattataaataaaatattacgatacgtatttagtctgtgagagtagtttttttctctctttttaaaagtgagttacttttatgttattaacaataatctatatctgcattatacataaattttatgtgaatgttgtacataaatgacaaatcaaaatatatggaaatattcattttaattgataaaaaaatacaataaaatttaatatttactaagtaataaatatatttctttgttgaataattattttgtttttatgtataattaatattaaatggatataataaaaaatatttttatttaatttttaaaataatatataagattcttgtattcatgttaaacagtgtaattcaattggcgagaatatgattatatattaccctacacatccaaacacaatttacatatttttctacaatcacattctccttcatgatattccctatgatcaaattattgggtttccctttcatgtgcatgtgacctggtcgatctactctgaccacgcgtcctcgacccacttgggacggtacttgattctgtttttatgggatcttctcgagtaggcctatgcctctaaaagagatttgagacacggtccctactcaagtaggtatacatgtatctcttttgttttggtttggctcctgtgagtgcctcggtggacgccctcacccgagttatccccttggattcctcacattatggtgggtgaatccctggtcaccatgttgtgtttgtttggtatttgcattcaaacaagacgactttggattgttaggtggtacatttccacaatcatgttgccgcgagaagttcctggatcattgggccgagtttccctagtgttagtgtttcttggattctatggacctcttgtatccactagaaattccctcgtattccctggttgatcatcctgtggtcgtcttgtggatgtgtttggttggttagggggtgcatcactgcgtgtcgctcttacagttgcaacctcgcgttccaactcaacatttctctgatttaattttgccaatctctgttggagttttctattttctaactccaccaatggcacatatcttgtaggatcgtacgcatcctgactacgtgtttcgggaatttcatcaccagttta

SEQ ID NO: 195330 - DNA, 1787 bp, Cannabis indica
taagttttattgtttttttttttgtgtgtattctaataagagtggtttactatcgctctattagctagattaatggggttaataattattctggagggtgacacaaattttgtgttttatattggtttattatgtcttattaatggatcaaagtagtttaatttggcggggacgatttaattactctctttagtcgttagatatgggaaatatttagattgttattggcctatatttcgtgatccaatctataacatatagctggctttgttatttttcttatttacaatttaaataattatggaggttacaatttttcaatttttattagaaaatcattagctgatagttattagtaggtgaactttgttagatgtccatttagtttgaaaacttagtatattatacatttctttgatatgcttaatcgttggcttattggacttagttgaggttaactatattagaatactcttctatatatttttttattatgaagggctttggtaagtttattattactattgattttgttatggcagctatatgttcatgtaatagattttgtttaatttacctattagtggataattttattttctcaaaaaaataataaataaaaaataaagaaataacgaaagaaagaaatatgagtacttaaggtaaacaaaataatatgtatacacatatataaaattttgtctcaaaatcaattaatgagtattatattttttgttataaaaaaaagagtattatatttttatataagtagtatatacaattcccatcatattattattattattattattattattattattattattattattatgtgttgatatatacttaagtaaaatttgcttactaattcttcttttagttatttcttatatatatagagaggtggagtttatattgaactaactagctctttttctactcttctccaaattgtaatattgatgacttgattaatatggatctttttcaaaatgataaaataaaaataatataccatttaaatacgaattataaaggatagcaatagcatgcagctagcaaatttagaatcaccacaatgtacttcaattaattaattccaataaagagatgtaattattacaaagaaagaccataataataataataataataataataataataataataataataataataataataataatgaaaatgacttgaaggaacaccatatgaagttgcaaacccaaccaactacattttgccgtacgtacatgattgatagtatataccaaacaaatgtctaaattaaattaattaaaaaaaaacactaaaacctaaaacccaccaattgggttaatcatattatgaatgaatgtaaccagaaaaagcaaccacaatcggtacgattccaatacgaataaaaaaagataatttcactttttcctgaaaaatattaataatcatatattttatgtaattacataaattattattatatataatattagtattaattgtttgttaatcataaaataaaaccggcaaaccaattacctaattgtggtcccccggcttaacgatcaactttccacaccctaaaactctagccattacttaacttaatctacttataatttatacatataacttttacaaattcatatttatataatatgtgttaaaaagtgtaaatgtatggattgtggacctaaaatagctgcgtgtgaaaatttgctagtgaagaaaggataccaatattaaagggaatatgtccttatactatactattt

SEQ ID NO: 195331 - DNA, 1265 bp, Cannabis indica
tattctgagcgatagatttcatattgataaccccctttgccctatttgtgggaacaagaatgaaaccatgaaacaccttttccttcagtgtaatttggcttatcacttatcgcggtctttcccgcggggcatttttgctttatcatactatgggatccatatgtgggttgagttaagtttatctggaatctaaaagatagggacattgatgtgaacgagatgatctgtatgcttttattgtggtggacattatttggcgggcgcaaaataataaggtacacaatgataatctaggcaacattaaacattatattaattctatttccttttgttacactaattatagagctactatagtatcattcccactcattctgtgacccatttggatgtttagcatcccccttcgcttgactggatcaaactgaattgtgatgttagagtaaggatgaagtatatgtgcattgttgttgttgctagagatcaccagaggatggtttgttgggtggttacatcaagacttgattttacaattgctatgtgtggcgaagttgctacttgttgtttggttttggaaaaggcggcagagaatgggtgcaattttgttattgtcaaaagtgacaatcaaatggtgatcaactttctcaatggactggagtccatatgggaaattgaaaaccactcaagtcaccgtttaagcacttcttctttatttgcgggttgtgtgttttctaatgtagttcggtctcgtaattttttggcccataatatggttaagtgagtttttacccacaatcgatatagttgtttggatgttaaagacatacttttagacttttttttgtaatgacctcatggtctaactttcattaatataaacgcattttcttaaaaaaaatccgtttaaaataaataaaatctaatctcaaaaccggtttaaatctttaaatgaaaaatctttctgactaacaaaaaagaaacacaattttttaatgtagtttattagagctgtgttgaacattgcaaaccacaaaatttatgccatgtgattaataaagttctaatataattaaggtgaaaccatattttagttatgtaaattaaaagacaaaaaaatttaaagtcacaatattttatttgtagttatcactatataatatatttaaaattattttcatcactgtatctcacttatagtcgtcactacatttaaaattattactatcactgtatgcgtatcttacttctattggttattacattca

SEQ ID NO: 195332 - DNA, 1071 bp, Cannabis indica
gctagtaatagatacgattctcttcaatccattagcagcataggactaaatagaaagaattattcttattgaaactatgtcgtaaattttatttgaaagacaaaaagatgcgggaatatgtaaaattttcgactatacattcatgaatgtacaattatttttctcaaaaacaaaatgaatgctcaaatgttttcaactattacaggtcaatttggatgatgttacatagtcaaggtatactaaaaaaagtctaaaataatctataatgtgttgttgtcttttcagtaattgggcttggttcatattaaccatatattttggaaacatgtgatatgatattactgtaacatacggcactatcactagttaatggttcattgatagtactatagatattagtattctaattcaatgtggtgtagaatattataataaggtctttcgttatattgcttaggtccattcgaaatgaattggagtcgagggcttattatctggtgtagcttattaagccaaaactggttttgctgacacagtgacaagtaaatcccctaagcctgagcttcaatgtgaaactaaaaactagaaaaacaaaaggacaagccaaatgggtccaaaaccaaacggatcaacgctctcgccttagtggatttcatcagacaaaaaaagcaggcctagaaaagtttggtcaaaagatggtaaaaaggaattcaaagaggcacaaccctgtagccaatcataaaatctggtccatgcctgcagattttgtctcctaaatgctccttttcctcgaccctttcaattagggacacaaaatcacatccccagtgaaatttcgaacaagaattaccacaaaaagcaattaaaaataaagtctcccacaagaaaatagtgtcaaaaggcaaaggtgaaaacctcctctcgatccatttttttggataagtttcaacagtggatttacacaacaatggtaaaatataaatgaaaggtactgatccgcgtacatgcatgagagtcctttcacttaaacagaaaatgatcaaaaggttgcaaatccacgcctaaatatat

SEQ ID NO: 195333 - DNA, 1829 bp, Cannabis indica
tgcgttgatctttattcttcaatgcatctagacccttcattttaacattaagtatcggagtcccttcatagcttttaattaaactctttatcttcttctttgtctaaattccatataattgtagaagtcatagtgtatagtttgcaatctacattttttcaacaattaataaagattttattaaaataacagtgtataatatatatataaaaagaaaaatgtaataataaaattgtcaatttatttacatatgttcaatattcacttaattgtatacacacaactagttcatgagtgtttttacagcaaaagaaaaaaactacttcatgagtaattttattggtcaaacatcgaacttcacacaaattaacaattagtacgtacaaatattaaaaaaaaaacatgatttttattttactttatagactcacataaacacctatatatgatcttacatgaatttaaaataaaataactgtagtacttgatgaagtacaatattattcccgtgaatcaaatcacatgaaaagaatttcaggcaatatacatacaatttggattggaatatgattttgtttttttccaataataatttattaaggcaattaataatcaaagtaattaataattaagaatgaccatatccccaatacaaaggcatcccatgaattacgttaggtgctatatataattaaactattcttcttgatcttcactagtactattactaattaatgatattattatcaattaattaatcaaattatttacacatgaaattattattttgaataatattgaaatagtagacaaggattgaacaagttcctaggttggccccataaattttggctttttcccaaaactcaatatatgttgcctttattagtttattttttgatatgtatatattaattaataaatataaacaggggtcgtaataactaataattatttattttattttggtaggaagtaccaataatttagccataaatgtaacctcatatactatgtaatattattattattataataataataaaaatgaattaatgagattgatataattctccgaggagtctcgaaaacgttgaaggtgtggtctttgaataattacacttctcttcaaacaaatcatacttactcaacccattaataattaattaatatacatgatgctacctaattaataaaaaaattgttaccgacagttaaatattatattaaggaagtaaaacacacacacacacaacatgaatattggtgatacccaatttatacctattagctaggctagctatatcaaaccctagaatgctaaattgggcaaatatatattgttattcataaatttgttaaaatctttagtggtgaacgaaaacgtacaccacatagcttttgctatccatcttttatattattaaataagaaatgctaaaattggacactaataattaatgtgttatatatactagctagttagagaaatgcttaagggcattaatatatattcaaataataataataataataataataataataataatgaaaagaaaagatataagtgcaaaatatagtcaattacaaaattaatttttactgcaaataaaattaaaaataattattttattcaaaaaaaaaaattaaaaataattaaaatcgaactatagttttttctctagaaaaacaataattgttttaatatatattgttaataataatgacaatgcgaggtccttttaaagtctatcattcatgccatccgtaattatgctatgaaattgtttcgtttgccgatgaaaatcgtcaatgagattcatcaa

SEQ ID NO: 195334 - DNA, 1510 bp, Cannabis indica
aaatataataaaccttatttatttacttttcacagaaacatggaccaaaaatattaaatattaagatggcacttttattaggcatctgataacataaatgttccaacccaacactaccacatcggtaccgcactacttattgctgtttagattgcgactgtttcatctcatatccccaaaaaatagaaaacctcaaaaccttccatttgccaactaatctgatctcttctcttcattttctccaaacccaccctccccttataaataagtgcataagagagtacccttttagtttctaaaaaaagttttatacccacaaacacataaatataatatacatatatggagctcatcatcaacaagtctaccttcattctcatctttattctcttcctctttgccactcatccttacttctcaacaggtttgtttgtgtttattacaatgaactatatgttgtcatttattagcatattataaatatataggcactacatttagttgttggaatgattttattaattaggagtataattaattgtatatataggggctatggtggtgcatagtgaagagatttatgaaattgattatagaggtcctgagacccactcatcaattcctccacctgatcactctcgtgggaagcatagggttcacagacaaagctcatggggacacccaaataaccctaaaacaaagaccacttacttgggaagaaaggtataactcttttctttcacatgaaccatatatggtataatttattagtcatcattacagcttagctctctagaattttttttccttttttcgtcctggcactgtatagtcatgtagtatataatcctggccttgtggacaggacaccaataatgtcataatcaagtagaagtatgtatagtactatataaaatatgaaagagtcactttttatttatttatattatttatattattctgttttgactgtttattgaagaatttttttcctcctttttctttttccacttttctgattttgcaggccagtaagatacacggctgaatgagatgtataagaaagattgaaagaagatctcccttcttttctagtgttattagtttttgctaaagtgatgatatattattgctattaattaatgctctctatagataattaatgtgtagggattaattatattaagatgtcatgatgaatcatatatattagcaactaatgtttgtcacattatatatatatattttgtatctctatttctataatcttgtaataatataattaagttgattacatatatataatagaacagaagtactaaaataataagtacataaataaataaaatctcttgtaatatggagtacactatatgcctatccctttattagtttggattttttctccttcacattatttcatgtatgaaaacaggctgtgtgtgcacacaaaatatacaccaaatggcattatacgtgatgtatgcatataaatatataaaaatatgtt

SEQ ID NO: 195335 - DNA, 2078 bp, Cannabis indica
catcagattcaagtcaaacatgtgcctttctcatgcttcaatttggctgactgcttaactaaacctatctccagctccttgttcagtagtattcgatccaaactcagtgttgtttctaaagctacactgagtttgaggggggctgtcaaggaatatcaacagtccaaggagtttagttaatttcagttagtcttaattctgttagtaactgttcctaatctgttaggatcataactaactcttatctttgcttgattctgttatgggttctgttatgagtgttgtatataaaccatgtactgtactcttttcattcaataagacagaatgcacttcttcatttctctctgtgtttcaattgcttttacttcttgattgtatcttttacagacttgttttcctttttgttaattgtctcaaaaagtttttacaaagttacataagagcttttttataaactttagagtggcttttggttagaggtaataaaatggaatagaatgaaaagaaaataatttttattttattcctttttaattttaatttctcgcaaaatgcttaagtctttcaatatggtatcagagccaaattggccctagttaatagctaatgtatttaccaactttggtgatctttcaaacaccagcaacaatgacgtacaataacctggtctacaacaatccagaaggaaggatgttgatgactccttttttatctactttagtcatggtctttcgataaaattcaatgactacaattatctactctagaagtagcaagtccttgcatcaatccatgaaaatcgtctccagcattacatttagggacataatctaccgtcaaagtttcttcatgatgaatatcgtgctctcaataagatcaactcggtgtatctcaactaggaatctcaaggatcagttcatagtgtcctatttgctctcttcaatgattctaagcttgcttactcaaatggtaggatgtgattttgtaagttagatctgattaactctgcagagtattttactctacaggtgagagctaagattcttgagtttcaaactaagctaccaaatctttagaaaggatctctatctctcattgaatatcttctcaaagtcaatgaatttgtggatcttcttggttaagttggagagctcttgtcaccaaaggatcacatagaagtcatatttaagggcctcctgagtgaaattggcacttttgtcatatccactaacactaggactgaatattacacggttacagagattaagactattaagaagagtgaaaaggaagttgacatgacaactcgcatttccattctagactagcaagatccagttcttaaagctaatctcgttaactatgggagagccaacttcagaccacttccatttccactctataataggttttacaataatcctcaagcccaaagcaagagaggaggctttcgtggctatgatcctcaaggtgagaatcctaactatcagtcatttggcaataattctaatttctttagaaataatagaggcaacttccactcatgatcagcttgaggggtatatttttcactcaaaagcagacctcaaagtcatttgtgctttaaaattagacacactgcactaagctgcttttacagatttgataagaactttacaggtgttactagtagtcctcctagttctaacaatccatctcaagtgcatgctaatgtgatgaccaatacaactagttggatacaaattggtaccctaactcgggtactaccaatcactacacaccaaaaccttcaaacattgcttccaactcaaattacaatgaccctgatcagatgtttgtgggagatggaagaagtttacatgttaagtatataggtcactcattagttatttctaatatctttaatccactattgattctaaataatttacttcatgtccctaacataacaaataacttgttgataattctaaatatagcataatttttacatttcccataagagatggtcttatttatggaaattatgggtcaagtctactttttttttagacgttagccagactccttttttt

SEQ ID NO: 195336 - DNA, 737 bp, Cannabis indica
attacttattaaattaaaatatacaagagccaatattaaattagatcaataacaatataatatataggtatgtacttacttacaataatcattcttgaatttctcatattatatttattataaatatctagttatacatttatatgttgtaataaaaactaaaacaaaggacaaaagagtgtgacaaattcacatgtttgaaatttggttttaagagagtttagttggagaatatgatggtgatagtcaagtataacaatgtcataatttttctttaatttcttgaccctttatttatttattttgttttaagtattagtttaccatatccacgttctcttatttttatttgcttatgaccttagactttgtttttaaatttaaattaattcatgccctccaattatgcatcacctcaaaaaacaaaagtcaatcaattgcatatttttctatcaatttaatatcttcaaatgcttttattctacatatttaaacacataatggcatgtaatagaaacattacaaatttagaaatgagaagccaaaacagatgaaagcacaagttgtttttttttaaaaaaaaaattaaatataaacttattataatttaagaatatacttatttgatactttgtgtttttttaaaatattaactttggtactttatgttttcataaatgcttatatgatatcttatattttgaaaatgtatattataagatatatatatattttta

SEQ ID NO: 195337 - DNA, 2156 bp, Cannabis indica
taattcacagtgataattaatcatcttacaaactaatttgaagctttgttaactgtttttacagactgtggaactattattagccatcattgaaagttcacaagaagtcatggaaattcttctatctcctttaattaagatgggtttaccaagcacattgctgagtttattggcttgtgagatcagtcaactgtcaaacgagaaagtacttgaaaggtgtattttgttttaaattagattacttaagtctgtcaataattatacgagtttggttttgatatcttataacgagtatgtaaagtaagtttttgtggaagatatatatattttccagttatgatttttagtggtttttgtgatttactgtagcaaaatgtgtttggatggaaaattagacttgtttgctcctgtctaatgttggtttttaagcaatatcaggttgtcgattcttgatgtaacactacgtgcaattgaagctatatctgtcattgatggacattctcaagagatctcttcaaacaaggaactttttcaactggtttgccaattaatcaaagtttctgataaagctgaggtacactatcctgcttcattttccattgctcagagttaatggtcttctgaagataatcacatattctgaactagtttgcttataccaagtttttgcaactatgttatattttcttctaacactgctgctttttggcattaattacaattgtagtgtacagtactaaagtgttctcttatttagataggaataatatattaggatattagtggtgagattgattgtgtagtttagtttccagaatagtttatgtatacttgtgtataaatattcctttgagaagaatgaaatattcattcaaccattctgcaattattattgtttgttttcaagtcagtatcacagagctacggagtaattgtagatggtattttatgatgctgttattatctgtaggtcgcaaactcttgcgtcactgctgcagttttaattgcaaatattctgtcagatgtacctgatttagcgtctgagatttcaaatggtacttttggttatatatacaaatatatttttccattacagatggaatttcttatgatcaagtgttaacattttggatgcatctagatttgaattttttgcagggtttgctcgatatatttccttttgcttcagatgatttagaagcacgaagtgcactttggagcatcatggcagggttactcctccaagttcgagaaagtgagatgagtttgccggctctatatgaatatgtttctgttttagcaagcaaatctgatctgattgaagatgatcttcttggctatcaactagatggcctaaaatctaatgctagaactacagctgtatccttggattaacttctctgtatcaatgctataaggcggattatagcagagtagttgtagctttatgaaatcgccaatagctctttctttttgtcatatcaaatagttttgtgccctttactttgaaacagcttagaaggataatcaacatcttaaatctgtggactgcatcaaaggatgagcccgaagagaatggtcaaatggcggctgaaaatcaaacagccaatgtagatatcagtagattgttggattgttgcagaaggcataccgaatgagtgagtgcttccccactattaattttggtacacttatgggtggtagtgtactggtgacattcttatgaatttttattttcccttactaaatgctaatttttctgaacacacaagtaagcaatctaggaggagagaatgacactgcaattgattgaaagtacactctgatggcgaaattgataggacaaaggatgcatctgtttccagaatttgctgataaattaatcaaataagccctggtatgatattttgttactatgctaaatggatgaaaggaattttatctggtactctgtgcctgtccctaccctcggccatgttatgatttgttaaaacagatgacaaagcagccataatggctcgagaagctgcaatgagcgatatgtgggggcaagtacagaaccatgtatggctgcttaagcctggcatgttgcaggtatgatactcatgtaccaccaggtctaaattttgaagctgttaattggcactagaatgtct

SEQ ID NO: 195338 - DNA, 1472 bp, Cannabis indica
tttttttctttttttttttgctgagtttgtcgttatactaacttttcatatattatataagacatttttgggacatttttttttcccagtgaattttcgttattatttattgggataagtttctcctaactttggtggcaaaatttcgtataaaaataattttaattaaggaatgattacaaagatcaatcaaaatatattttaaatattttaaaagtaaactaataaatcattacaaatataaaaattgaacccaaaaaaaaaagttagtaaatgtaacgaaaaagatttaatatatctaaaataaaagtttttttttttttttttaacttaaaatataagtttaaaaattatgtaaaagaaaaaatatacataaatgattttcaaaaaaaaatctatttttttagttttgaaatatattttaattaatttttataataattaaaggaatttgcaacataagtttttagttgtatagttttatttttgacgataataataataaattatattttaagaacttctaaaaatataatttaaatattattaccgttaaaaattaaatttatatattaatctgtaatcgagaattaaatttaaaatatttatgctgtaaattattgaattaaattattttgaactgatatggtgttgatgaggtgtattattttatattttagatttttagtcaaataaccattgtacttgtatttggttttttcttctatcttttttctaaattcaagccttaatgtccacaccaaataagtcatatcaatattttccttacaataattaagagtttccataattaatcagataattatgaaccaaacaaaattctttatatagttgaagtctttactaggtaggctcaagccaattcaaaatgagacttccaataattatagatattatttatatataaaataaaataaatcttatatctaaaaaaaaaaaatctttaattttttattattttaaaattataattaaaaaaattatattaaacttggaaaaaacattaattatattggttttttaacactgtccaaaaatattgataaataaattaaagagaagtcacattaatataaatttcttgtatctaatttacaataatgacgatactatttttattaatgtgcgacattggctgaatttgacgttttttgacgtttttcgtcttttttttttatgcatttttaaaagtaattttttggttattaatagtgttgaatagaaactaattagttgcctttacataaaaaaattcatttttatattatataatttgagatatattttaattacctctaaaacttattgatatacatcttaataattagttatttttaagttatattattgtagcttataatttaaaatacatttaggtaatcttaaaattattttcgaaactaatgaatttttatttaatattacaacctaccatttttatataccaatta

SEQ ID NO: 195339 - DNA, 1341 bp, Cannabis indica
aatccattgaaagggaatgttatgaaaaccaattcaaaacataactctactttgtttcaggcaacagttatacgagtaaccaaattccaaaagggaacagaagaggaatctttaagcaatagaacgaaccttaaaatcaaccgaagggtattgaaacccaatagtgttccccccagacaatcgagacccacttttggatccagaagctgattttgttcgattcaagctttcagatttggacccaaatttgttaccggaactgggatttttccctgaaattttaaaatcatgaataatacttacaaaggaaccacaaaatcaatagcagccccatttttctgcccattaaccagcagaatcatcaatctcgatgaaaaataaactctacccgaatcatccctatcccataactatatgttatcggaaatgaaaaacatcaaaactttagattttcccctttcctttctatttactcgacccaaatctcaaatgctcatcatcaaccccaaagagaaatatatatacactgagaagaaaaatgagaacctcgagaaggcgatggagtgaaggaccaatcagataagaaacctccatcaatgaacaaagctcctgatcctcctcctcctcctctttttcttccgccaccaccgctgctcttgctgccactattgttgggtcttcctcttcctcttcctctccctcctcctcttccttttcctcttcctccacccataacttcgttttcttctgtaacagaacctagaatcgatgagttcgcgtggaagacgacaggaccctcttttcaagcttgggaatttctgatgggcagtctgatgatctcgaccgtcacagcgggagcggttggatcacgaccgttgagatcgtgctgggtctagttgatgatatgtacggtcgtgatgataccacttgagtgcactgcaagtatatacctttttacttggtacccaagcatttaaattggaatatccaaaactagggtaattctaaaaaaatgtttttaagaatagtaaattaagtggaaaatgttttaagaatatccaaaactcacttggactactttaactctgatcatcgagctatatcagttgtgttatccaatgcttcaatctctctacaatcatcaaagacacagtagatttcgtttcgagaagttatggttatcagaccctgaaagcaaggatataatctctaattcttggctaaatgatcaagttactgaccctatttgtggtgtcctcaacaacttggagtcttgtgctcgatcactacagtcctggcacatcaaaaaatatggccgaatgaagcataatattactgctg

SEQ ID NO: 195340 - DNA, 832 bp, Cannabis indica
cttcacatatgaccacagaactagattgatcgtcattcgacatctttgaaacagagaaagattaggcaagaaaatactgatctaaagaacaagagaggaaagcacaaagctgatcgaggcaccagctctggtttaggagttcgccagagaagaaaacaaaaaaacacgacgaacatgtcgaagaagaatcaagatctagagaaagcttttctttcccgctctgataccatagtatggattagaaagaagacgagagaaacattttattgagtaaattgaatgaatgaaattacatgaataaaaaacagaataaaaccagcctatattctatatataggttgtgaccaaagatcaattaaactgacttaattaactaattagtcttaatttgtgaattagttaataacaagaacaaggagacgaaactaacattataactgtaactactttttgacagtagggacaaatatatagtaacggaaataatagaagcaattcttgttaattgagtaataaaatgttgttggaaagcaattgcttgatgactgtaattactaataagattagacacaccaaagaagagagtgctgataaaactagcattaatgcatctgatatcccactcttcacctcctcaccatactccgtcgctgctaaggccaacaaagtcaaaggaaatgagtaagcccaccatgccacattgaatttcctcattgatttcttgaacaatgtcggtcttgaaacctgttgtaccatcaattcacttattcaaagttattaaaataacccaagcaaagaaaaaaaaagttattaaaatagcagacacatatag

SEQ ID NO: 195341 - DNA, 867 bp, Cannabis indica
agagagagagagaagcaatggagagagagcttcaggcctttttcagcaagagttttctccgatagtgatgggtaaagatagaagtggagaggaagaagaaggcccttcgtgcgtggctgagatcgcggcctagaatccggaaatgcaaaaagaattgggagaaacaaagagagagggcgacaaaagagagagaacttggatgagagagataaccctaaacctaaaagtatttataaaaggactagggaaacccttttatcccggaaagggttcccttttacctcgtttggtttcagcaaaatatcaaagagtgaaaacttaattttttcgtacccaaacaaggcccttgctccaaagtgtagtagaagacccactaggagtgtgtttggctagtcaataaaaaaataatatttaacctttttcttagtttaatattttccttttgatagtgttaaaccaaacatggcccttgtgtcttatacaaaagtggggtaaaaattttcagcttactttttatcccactttttatttttctaagcataaaaaatgagataaaaggttccatttcttgtagtgacaaaatcgtgttctatagttacaaattatctatttctgtactgactttattgtacactgtttaattaattgattaattaaataataaatttgtaattataaaaaatggaatttcattggtgatctcatggtgtttaggggaggaatgaggatggagtgggagaaaagtaacaattcaaaggtaggaaaattagaataagttggctataatagaagataattttgatggagagagttgagatctacgatttgagactaactttgatggacaccctaaaaaaatgtaaaaaa

SEQ ID NO: 195342 - DNA, 589 bp, Cannabis indica
acaaatgttgcattaacataagaaacagtaagattgggcttggagtagtgattaaggactggaatgaaaatgtaatagctggtttttcagtgcctataccagctcaaactacgcctattatggcagaggttatggctctaagattggccctaatctggtgctgcaacattagaattccacttgctagcgtttatacaaattttaagcagctggccagaaaagttaatagcccgaagaaggaactctctgctcttgctgacgtcattgaagatatcaaaaattccttgtcttatttccctaatgtttctgtaaattttcttccaagagattgtaatactcatgcccatcaaatggcaaaggaagctttagggctagataaggaagtagtttggaaggatattcatccaaacttaagcattctaacttgaacttatcagtcttatctttaggttacaatcgtaaaaaaaaaaaaattataataaataaaagacttttcaactgataatattcattggtggttactggaaaagattaataatgtggcaatataagaattataaatggttaccataatttaattttaaattaa

SEQ ID NO: 195343 - DNA, 1359 bp, Cannabis indica
cgaggttttttcatttttacactttctaaactttttttttttttttgtattttttacggaattctacatagaaactcctattgtaactggcactgtaacctaaattgcaacaaaaaaatcgtataaaaactctattataactagcgctgcaaccactttagaaacggtaaatttttttaaaaaaaagttaaaaaacagtaaaatgatttaatttttttttgggttaaataaaatgatttaattttgaaccacaaagatgagaggagaggagaagtacttagtatttagtatagtgtaatgtagtaccatatcaagtgggtccatataatatcattaaacgacatcaactcatactaaaaaggaagaacagatctagactcatatactatgaacatttcaatccttttccatgtccatgttcttaattatattacatatatttttagcattaatgatatttcgagaaaatatatgaaaatagataattaaatatagcattacgatttaaaataaggagaattaattaggtaatggatcagccagaaatgaataaaatatagtaaaatgatggagtattgagatgagatatatgatatttaggtcaacactttagagagaagaagataaaccaaaaccaaaatccccaaaaatcttcttcctttctatgacttctaaccctttttcttctactactactatactattactaactcatttatatctagaaaacccataagtttttattttctctcagattctctctctcattttctctcttcccaaacacctttttcgcgccaaaaataatccaatgccactctctaaattacatctggttaacgaaattagctcaatctcgatattttaattgtcttagatatgggcgtggaaccgagctccagccacttcacggattttagaaggtaatttttcgattcgggaaaaccctaagtttattttttttgtttgatttgttttgatcggtgcctgtttggctgttgctaatatgtgtttgatgcgttttattttgagaaactttatgggctggtttgatttactttgatctgattttatggtttggtttggttttgatttttttttttttttatttttttgtagttttcttttttccggattttccctgagaaacatgagaatggaactcggatatgatggggtatgggttttgtcgaatggatcttagttgatatatattgggtaattcagcaaaaaagaaaagaaaagaaaagaagtttataaagtgaagcctgtgaaagcagacatgctatcgttttttcgtaatattaaacaagttgtatatgtagtagtcatgttgtaaggtctttctgtatattgtcg

SEQ ID NO: 195344 - DNA, 795 bp, Cannabis indica
tactatgactcgagactactcaactttgaaatgctatcttttgccacatgtcaaatattaatgcccacgtcatcagggaaatttttttagattaacaattatgtacattatacccctggtaaacgttagtattgcatatttatggcagggttaatgattagttactccatttctagagtcttgaatatgccttagagagatcaaatgatattttcaatatcatcccatagtctattccctaaacacttttagaatgtttaaacaattttaattctattagtttatgtcattaacaaaatctaagggtgacttactcatgtccttagaaatatggaatgaaagctaagaacataaaactatgatttgcatgcctattagctattctaattagatttgagatgcactatgtaatagtcaagctctaaaaattttgattttatagaatatggctatatcctcaaatcccaaataatttagaaatgttgtagtagaagataaattttcaaaattgattctagtatatatttcatcatcttctacaagtgtagatgatgaagtcactctctttgttgaatcagtgtaattcgtattaaaacaaagaggagagtaccactcttgttctcatcaaaaacccacaatactacatcgtagtggaagagtttcatagaacccaactcattatgatttggaaattgaagttaactttttttttcttagctgacttctttattttacctttttttttctcttctttttttatttatctttttttcttttccaacttctctctctctc

SEQ ID NO: 195345 - DNA, 1501 bp, Cannabis indica
aagggaaaaaaaaatgaagttttataagatattaccatccatcccaattttcagtccaaagtgtgggtttgttataggaatttggcttataaccgtcacagtagtatccattgcatgcatctatctgtaaatgaagaaagcaacttatgaaaaacatcacattaaggtatcacacgttgtaaaatttatccgccactgctctggaagtttcacctatccaggtccctacacattcttacagccataatatataaggtcagacaaatttaaaacaatggctaaagaccttacaacttcatccggagcatcagtttgcttgcacatcacccatggaaccctagcaccaaggcttaaagccatctttgcagcccatttaacatagtcctttcctccctgcccaaacttcccttcaatgtttccatattcattttcaatctgataaatatgcagtaagaacatacaagcatatgtgaatcatcttaacaattaaagaagtagaacatggtttaaatgaacttttaatctcttgtgtatgcaatgctcaaattttaatgcatccaacctgcaacataatgattggaccaccttgccatgaaaacagttgttcctctcgcatcaaatccacaattttcttaacaaaacgttgcatttcatcctagcaaaaaagaaaggtaacatcaaaatattatatgtataaacaacaaaatctactagaatgataaaaatcgttcaaaagaactagtttttaagtgagaaagtcaacaacggataaagttttagaagagaaagaaagaaagaaagaaactgaattaagagtaaatctcattactcacagccaaaaaattcattgtcagtcttcccaatttcaatatactggaacaagatttaatttcttgctcacactctatctcaaggcgccctaacccaacccaaaaatgacaagcaccataaaaattatgaatttctctccttttaattactctaaactgacactatggcttggatgatgggtactcccagtgctatatatataagaataaccaaaaaagtacaaacataaccttgcaagcatgggaattatacaagttttataccttgaaaggagcattgtctgttctgaattctatgccggggatgtcacgcagccatactgggaaacctctgcatgattatcaattttaatcaagtgacactccagtaactattacccttctttttttttttttttttttacaattcacattgtcccttaagaaggtagtaattacctagttgcttgtaaaatattaacggagagaatacaaaaggtatatggatgttggtctacaaaaatgtgataaaaaccagaaatatttcaaaggatcaactagaaaactcaacaaaatccttaaatataagaagaacaatatagttatattcctttgaagtaaaagccccaaagaacctgtaaatggttaaataacatcttgagctagttatctagaagtcattttaatagaga

SEQ ID NO: 195346 - DNA, 1800 bp, Cannabis indica
atatactggttctcgctgaattccagtgtcaggtcaaatcaatttatgttcttgcaagttagcaacgtgtagagaagacgccaatcaagatccctaactggaagactactcaagacttttgcaatttccacacgatcgagctggcctatttatgaatataaacaaatgttgtagtttataaaatagataggagaaaaagactgtatataaaacaacgacgtatgagggaaacagttaaagtctatcctaatttctagcaatgagaatacatagagctacttcgatttctaatctccaatattagaaaccatgccttctcctccattgacatcacattagcccatttactaaaacaatagaaactattgtcgtggccaaaattctttatggttcttgatagtgggttccccttgcgtgtattccatatacatcgcatagaatccaaggatgatcctatagcagtagggagtaagctagaaaggagatacatcgtaatatgtcaaaatatctttgacaaaaggatgtaaaggaactgcgactccacagcaaaaaaaatagggattgaaaccatgtccaccttgaatcgaataatcgttggatgtgtgcaaggatgatgaggacgctgaattgatattggtttcgtacacctagtattgatcaacttcaatttctagaacgtcattaagttagatttcctaacccacgaaataaggtcctcacaagaaatggttcatccaaaggtatgtccttagcagtgtttgcatggactttatcatttcccctttcgtccccacgagtaggtaaatcaaagtcttatcctattttctcaacttttgcatctaggatagcccttgggcaaatatagatcccctaagcaaatatagcggactcgttctctcgtatctcgatagcgacagctgcctctagctcctaaaccatacgacctatctcgccagttgaccacgagccctctaggtctaccctctcacgaacttcatctttagataaagacgtagggataaagctatcacttttttgaggttcacccacaaaagcttcacctttagatccgtacatctggctatccgagagatcgctcacttgaaagatagaagatcttttcaacgtgcagtgagtgcaatttaagagagaagtgtcctcacatgggtaatatatttaaattaacaaaacaacaaaactaacactcgagcctcaaaaagtggttggattttttctagtgtcttaaggatcacgcgggtatataaaacttaaatcattgtaaaccacccaaccacttcaaaactctattagttttggatcatggttcaacaaagaaaactccaaaatagagcagaattgttgagtgtatcacagtgacctaaggattatacgagataataaatattaaatctctgtgatacagcaaccattgaagaatctttagtttgaagctagtcagaactaaatatacgaatattcaaaatgttctaaccaaaagtttgagtattcaaagttagtcgcaaagcggatgcaagtattcaggttacaagcaagaattgttccagaaaaaatccatatatttcatttcccaaatctatcttattattttcatgtaatttctacccctaaataccccagaaggtacatggttatgtaaggaaaacacattaataaagaagttatgtgagaaatacaaaccattgatccaaacgcttattcttgtagacacgattatcactttgaaaaataccctggccttcgaaatagcttctcgcaaagaagattcaaacttttaggaaa

SEQ ID NO: 195347 - DNA, 2256 bp, Cannabis indica
aaccaaatctctaaaaattaactcttggagctcaaaagcttgctcttatataaataagctagatctaaggtatttatattttctgcaactattgttttcggttaatcttgttagatcatatagttgtatagtaccagataggataagtgttaattgagtctgttttaagagtctttgatgatctattgttgttgtgtccaccatatgatgcttatttatgttttttagagattttaaactaataattagttccgctattaataatcattaatagcggctaattattagcggaacaactaaataactttcaccagcaaaaaaaaggatttattagcggctgatacctccgccgctagctaatatctaatatgttgtagtgttagttacaactgtacactaagttgttaattatcaacttatatagcattgtataaatacttagcttcagttcctttcacgaatattgaagagaatcatattgtacccttacatatagcaaggccagccacaacaaattattccatgcaacatcttaccttttttagattggtattcgtcgatggctaagagtgtatatagtggagagttttgtcttgcaattaatatactgttccagattcaatcgagatatgtaacatctagtactttatagacagatattatttggtaatcattttaattgtactatatatatatacatattcatctaaattatggatgcaaatactagcaacttgcctcttatgtgtgacaacccaatgaatacgataaatcagtctagatagagtccgctttatataataaacatataagaaataaatgtctttcaaaacaataaaactttaaaattataaaaacaatatattacttcttctaattatataataaggataaagattattcaaaagttgtctagctagtttcatcatattatttgtataattttattcatgatgagtaaaacaagaacaatttatacaagctaattataaatttataacatattatacgtacatgcgtataaatatatcgtgtattaaatcaattatacttttctgggtgtgcacgtttataattaaattattaaaatacctgcaaattaaaaccttgttaatcgaaaaatacaatttcagggagcagccaatgatcgaattatgagaaccaattacgtaatatatatcatttatttttaaaggaatatttgtatataatataaaaatatatatggtgtagtgcggtgatgctattacataaaaaatgacataaacgcgtccaccatagtagtcgtaggtatgtagtggacaaatcccattataccactttctgttgtcttttattatcttagtttcttttttaagtatttgttggccatatattgtctagttagtgtgatcacgttttttatggatggtttccaatgtttatatcaaattttaatatgataatacactcttagactataatataatatgaaaataaattatctataaacgatattaatacgaaataattatagatatattgaaatagtatatgcaatcaaatgattaaaatacttatagtcattaatgtttaagattcaatcctttcgatagcttctatatgaatttgggcttttttcgctctctcgactctcttcaaatgaaattttgttgtttgcacagaatgagtgaagtgctcgggaccgaagaatttatatttataagtgatatactccatcagtgtctacgacacattaattgtcagaatattttgacaatgaattaaaaaatcaaaatcgggtaaaaaatatcgaaaatctcaccatatataaaatattgcataattaattttgtccagattcaatgaatataaaatattcatttatctcaaaattaattgtttttattttattccataaataaaaatattctaatagtctcccacttgatcagtatttggactaaaatattcaaactcaacgttcctcattatataataaacataagaattatatcgatgagtattatcttctatgtattacaatatatttactatataacaatatactttatgtggcaatatacttcagcgaataaaccctaaactttatgtttatttaggttctctaaaattttctcaaatgtaaaattaaaatgcgcataaatatgagaaaatatcaaaataagagtttcattaataataatttcatttgtacaaattacatgaggagattaaatgccatgttctctacatgatccttgaatttatgagatc

SEQ ID NO: 195348 - DNA, 1729 bp, Cannabis indica
ttttttttttaaaaggatcaataaaaatatcgtaagtcgtaactaacattcattaatttaaatagtttttgagccaatataataagagtgatttatatattattcaatatattaaaaaacgacaataatttacataaaacgacattacattcagacaacgccttttgttaaacgacagtaatcgttcaaaaagaaacaatgctgaaacgatattaaacttataaaacgacaataaaatgaaaaacgacatatattttacaaaaaggacaggaattgcattaaaccacaatacatgaaaaacgacaataaacttgagcagaaacgacattacttagagaaaacaacaaacttggccattaattccttaattttcttgaatctattcactcctatcagtctatacatcataattttttataattcaatttactcagagattaaaaccaaacaaatcagataatcaagaactaaaagttagatcacttcattaacataaattcttttaaacaatacaataataaaccaaagagtcaaactacttaaaagttcatatactaaaaaacatattctaaatattacattaaaaatttaaatgaagaactaagagatagcctttactatatctaaagcaacagacttattaatttgttgttccttcaacttttgaatctttctcttcaaaagaatgagtatcattttgttgttgacaatttttggtgaaaccttgagatgatgatcatgatcatcatcattatcattactacaaaagtaattagtttccaattgaatgactctttctttgaaagtttcttgaagttccttctttatcatcatatccacatcacaagaaaatggtaactcgttactaattaacatttcttcaatcttcttgtccatcattctcatcaaatctttcagctctgaaatcaatgtttcacattttgatttcaactcctctgggcttgagttgaagtcctccattcttgatcttaaccagcttgattttagtacacaaacacaaaataattgtgagagagagagaggggttatgaatggaaagaagtttagaatgtaagagtgatatttataggcatagagaagagaaggtagtaagtagttactagttagttatgttcggtattttcttatgggaaattagtatttaattagttttaaatactatgtttttagataagaattttgttcttacataaatatgaaattataatatatgaataaaatataagaattttcacaagtatttagttgcagtacattaaaattaaaatcataatatatgaataaaataataagtcggtaatggatacaaaatcgcgggattgaactctcttattgcctaatcaaattcttgtggttggggacaaatttgaattatatacacaaccaatatggtcaaaatctctttttggtatagttctcacatcgcagcctttcctctctggtgcgtctctttctcggcaacggaagatgtctctctttcttctcagcagcgactgcgaggactagatcaccgtagctctcatcaacgattcactctctctcgctcatcgccggcgtcgatctccaccacctcttctctccatttccctcttctctgtttctcccctcaaccacgatcgctacgccctccctctcatgaatgtcctccaagttttgaatcattgtttgaaatcattagcaaggatttagtatttgcttctgtttcagc

SEQ ID NO: 195349 - DNA, 920 bp, Cannabis indica
  modified_base (878)..(878): a, c, t, g, unknown or other
aatagtaaaattaagattgcatagagagaataaaaccccatttcaaatatatatttttaaagaaaaataacactcataataagctaaagtgggaagtgatattagaagcattaaatgtctaatactagtgctagtaccaatggagttgcactttctcttcttctatttttgttttcatcatctttggtttcacaaaattggcaagttttagcgtctccatcccaagaacaaaccatcaaacgacatgacccattgcgtcgtttcaagtactacaatggaatttacgatgttagaaacaagcattactgggctgtgcgtttctatttatttctttttcatttttttttttaaatttgttcaaatatacatatatttcacatgacatttcatatatatacatagaataacagaaaaaattgataataattggtttatcttattatttaatttttctcatttttttcagtctacggcatttacaggagttcatgggtatgcaattgcaggagtatggttagtatgtgggattggaataggaattttcatgagtgtgaagcataagaccatgaacaattggccaattaaagacttattggataattactatcttctaaccttctgtatgatccttttctttaccattcttgccatgtaagtcccatatcaattattctcatcatataatgtacgtaatatctatatataaatataattgtttttttttgtttttgaagaggggcatcaagtttggtgctgttagcaaaccaaagctcaatgaagaaaaatggaaaatttaaagggaaccatattgagtagtggaggagaggttagaaggagcctaaaacatgtaatgaaaagcaatgacacatatgcaatancttttggtggcttacgatccaactatggcttcaactttgaac

SEQ ID NO: 195350 - DNA, 1085 bp, Cannabis indica
aatttttttttctttccattcagataaatatcagtttttgattttgaaaggaattctgtctgagatattattggagcaagatttagatcttttactcattttccttttctttgtttctcaattcaattgtaatatgagttgaatctatttcagatgaaatttttgaatctatacacaaaaatagctcatgtacaataacatctaggattgaagggcttgaagattgtggttgatgaagtccttagccagtacgatctacttgttacaatattcattctgatcagagatattcaatccttgatgcaatgtagcagagtatgtaagttttggtactccattatcaattcttattcaacctactttcgaaacaaaaagctactccattattaatcccacaacaccactctttacttttatagttagaagaagctatttctattttgaaagaagaaagccattttatgaatatttttctagtgaattatgatttctccattattgtggatcgttgatatgggaatgattcgagatgctggattaataatcgatcatgatcagatcaagaagatcaggtacagaattatagtagtagctgctaatcattatggtattgctcgtattgcaaattatcaagccaaacattttgttcagagattggaaaatggacaactgattggtacgggttttcaattcttaagattgtattcaaccatctgttacttacaacaatgataataccttatattggctactcaatcattacaatacaaaatatatttctaaaataatgtcttacaatgatttgttgttaactttcctttcaaccataaagagtatggatgttttgaacttgacttgattagttaaaggtcgactaaacctctggagacattataaggagaagaagcattatgagaaccacaaggatttgaatgatattttggaattaaaaagtaatggtgatgatgaatggaatttggtacatgacttcaagattagagttccagatgatattttggaatgtataatgccatatttttaacagtgattatttcacattctttagatttgacaattctttttgc

SEQ ID NO: 195351 - DNA, 967 bp, Cannabis indica
tcaaggaattttgacaggaaggcttggcgagcaacttgcttacaattacttcgttgagaaagttggtaaacatgctgtgagatgggttaatgaacacaacgaaaccggactaccttacgacctgattgtcggggaagagtatattgaagttaaggcaaccatatctcctcggaaaaactggctcaagataaccatgaacgagtggaagtttgcgattgatcaaggcgattctttcagtattgcacatgtagttatattggaaaataacattccaaaggtttcggtgtttaagaatccagttaaactgctttatcaagggaagctccacctggttgtagtgatggctgaaaaccaagaactctaaatggttgcactcgaaacgggaaagaggtatttcgatttctgttttcgcctccaagcaccaactgctaattttaagtttatgttggctcaggttaactgtagagaggaaatgtataacattcttggaattaaccactggtggaagcttaaaaggtatggcagctttgtttggtttccatgtattaaattccatttcaaggctctactttgattccatcttcggattattggttattcaattggtggtcgttccattcatctaggggagcatttgacttattttctcattgagcgaaaagtacgaaataaatgagattgatttttcgataaagaaagaaagtactattccaattcttttccgataccttccaagaaaaatcccgaatcggatttcaaattgacagcaaagttttgaagagttgtaattttagataatttattgtcttaggccatgtgtatatctttgtttactagtttttattatttgttttttttcttacttagattcattttaatcaaggctataaacaaatttgccatgaatttggcattcctagtgtcttttttccaagtaggcctttgtacattttacttactgagatat

SEQ ID NO: 195352 - DNA, 846 bp, Cannabis indica
tttttttttccttttcttttaataacctttttgttttctttctaaaacctgtttagcaggttcaagttcaagaattgagtccctgtcaacccctacaatctttgggaaacatgaagcgcatagttatttatcaggtagctatccttcactcctcagaaattgaactattaaatagatcaaaagtttatactttactgacttctcaggttgaagttgagtcaattgaaccatgtaattatggtaatcacccaaaatctaaacagattttggaagtttgtgggtgcttaaaatcttcttggtttaccactatttagggcaaacacgatcttaatgtgacttcattaataattgtaagcacgtgctttggttttaagccactcctgttactttttgcagaccaccaccaaagttggtctttggtctcgccaacaaagattcagatgcagaagtgtgacaaatgttcacgggaattctgttcacccatcaactacagaaggcacattcgagtgcaccatcgcttaaaaaagcttgataaggttttcatattgcttttatctgttttcatgctttcaccatttgactgtgttattggatctggactgtcttgtttccttaataagcatgacttcgatagagattgtttttgctttgatatctgcaattataattgttattcttgttacttatgttggctccatggtgcctgatagtgtttatttcttgtaggactctgctaaaagtagggacatgcttggggcattttgggataaggtatgtctttttcccctgccattgctttttgttttttttttttttattttttttgttagaatttgtcttttatta

SEQ ID NO: 195353 - DNA, 897 bp, Cannabis indica
tagttaaaaaataataaacaaaacaaatttctctaactatatattatcacaaaaacaaataaccctttttctcatttaaggatattattgttaagaatatttaccaaacttttgactattcattaattttgaataatttgtgagattattttagagataaataaataatttatttaattttgattttttagggaaagaaaagatagagaagtagccacgtacccgattaaagaccatgaaaccaaggtccaaatcaacaccgtcaaaagtaacagttttggcatggcctcccaaataatcttctttctcatacaaaaccacttctttaacgtcgtcgttttgacccaaaacgtaagccgaaaccagtccactaatcccaccaccaaccaccgccactctcatcttcttctctacttattaattctgcattttcacttaattaacattttattctcttcaaaaatattaataacaataaatatacaaaatgcagataacccaagaaatgaaaaattataaatacagattcccaaaaaataattagatcttgagaagggattttcgatattgattattgaggattaacaatgtcattgtcatagaaaataaaacttaggatataataatgtataaaacagagataaaagcagagagagagatatataaatatatacctgaattatatatggaatggatgtgtttttgaatgtttaatctttgttgtttgattggatttggggtagaaaataatgaaatgtagatacatataattgggaattgggaaatctgtttcttcctctctctctctctctttctttctctctcttctttctgtttctgttaacactgctctctctggtttacaaaaataacaaggaaaaagataagcttatacag

SEQ ID NO: 195354 - DNA, 904 bp, Cannabis indica
tgctgctcaatcatctactcagggattttcagggctcgggtctcatgctgctcaaacatcaactcaagcattttcagcatttggatctagtgctgctccaacatcaactcaagcatttccagggttgggacctggcggtaattcattctctggaaaaatgtcagctgactctgttgtccagtcaaatcgtaaggaattacatactagtgttgagacagtcaaggggtcacccgtgaatgttggtttcactggtttatcaagaacttcatctcaatcattttcaagtgctaaatccacttttcctaaggaaactgatgctagctctctagttgtgccttcaagctataacgacagcagcggtggttctgaaattgctggtttcaatgctaaaaacagtgaaatgaacatttctggaaaacaagtccatttgaaggaaccagtgggtaattctacttcacacggtacttttggtaagctgttccagagttcaggacagagacctgtagcaacccctggtaatattgagtcattaccttctattcgtggatcacaagaaaatgccatactttctgactctgccaaccataagcaacatcagaccaatgagaattatagaaatcttcagcagtcgggaatactgaattctgaaccaaatttttcaaaacaatttggcaatgtaaggaacatgacttgcgataattttcctctcatatgtttctagttacttgtatcatactgtttttcttctatttatttgtttttttttttcttttaataaatgagatcagacctaaaatagatgttgggtttcgggtaggatttattgggtttaaagatatctatcattgcttcagctgttagaatattttctttcttccttttagcttttcaaatctgatttatt

SEQ ID NO: 195355 - DNA, 1054 bp, Cannabis indica
gtaatggttgttgcttccttaattgcacaagcatgcaacaagctgaatgcaataacccgaataagctacatcattcattattattcatttccatccttagaaggaatatgccaaacaaatgtattgttggacttggacataagacaactctcagctcaaaaatacaagaaaactccctccatctaacaaggaactacacctcacaatacgtgagatgccctgaaaatttcaaacttcattatttctagctcaattgctattccctataagatgattagctcaatcagtcattcaaaggcaacctaccattatcagacaatcatcccagctccaaaagacatgccaaaacatgtttttcccactactccttcatgtttagttcctaaatacacaaaattccatcttttcttgttttctcctctactttttccaaaggttcaagactatatccacaagttacttacattaacaatcattcgaaaacacagtctccaagctatcattttcagcttacttaaaagacaatagcaattcactacctaattcaaaacctaaactttaataaagaactagaaaccaaaacaaaatacaccataaattaagatactttaattcaaatccaaagcttaagagatcaaaaaacacgaaaatggagaattaagaacctgtaggcgaagaccaagcggcatgaatgacgcttcgttcctgaacattggagcagaatccaacggtgatcttgttgagatcgcctcgtaggaccgaaccggcccagactgaagcaccatcgcagacggtaacctgtccggctaaaactacatttggcgcaacataggcgtccacggccacctttgggagccactgcccaagcgggatgatcttcctctgacctcggtagtcccattggactcgatcggccgatggatttacggccttcccagcctcagtggcgagtccacgatgaaagatattctgctgagacgagagagtggttaaagccttcttagagaatcgagctagagccgccatgactgcgagagagagggagagagagaga

SEQ ID NO: 195356 - DNA, 1154 bp, Cannabis indica
ccatttatctgcgaatattaatccatgtaaacaaataggaacacgaagctttgatgtttaattaaaataatttaattcacttttaagaatttataaggcgaaaaggaaaacctttaggggtggtgaagaaggtggggagttttgttgggatgcccaacagagaagctgaattcagcagagccatctctctgttttttgccttcttacgtcttgaaatctgttaatagtgcgtgacaatagcaaacgacattattttaagtgaaaaattccacgtcgttttgaagtaaacgacagttaactaaggcaacgacattttcatgtcgtttagagggtgacagtttgacagatttatcatttattaattttcaattttttcaacactttttgatattttttaaggaggaaagttctctagaattattgttagctaatgttgcaaggttcgtatttagattttcaaatgcatccttgtctaaatttataggactgtcaatttatttgtgcatgttgttcgaatgcaaaaacaacttacgtggtttagacattatttatttagttttgtagcgccaactatattgaccctagtagcggaccacaccacaatagaaggcttgcttttaaaacatagcgctcaaaaatgccctaacaaacctacatcggtagagtcatgctagactaaacaaaattggcataagccaaggtcacaaatgaaacagtgataaaaaatttagtaataaaaaaccaaacacaccaagaacgaccaaaaaaaaactagaaaaaaaaacattcattagccatagatctgcactagaatggcacccaaatcctcacaaatccttctgtaaccagcccccaaagatgcatcaaaatcacctcggagcaccctccaccacattttgagccaccaaagcaccccaagactccaaaaaacttggaaggcacaagcagaagacaacgaagaatttcttagagcaacaccaatagaatcacccaactttagcatttttaccctacaaattatccaatgacattgatgccaagagagagcattagtttctttataaaacattattattttataatgtcatttgacttcagtgacaagtatcaatatataggcaccttcattgaagctagccttatgtgaaattatt

SEQ ID NO: 195357 - DNA, 2144 bp, Cannabis indica
agagagagagagagagaacagaagagagaggcacagagcgaaaatggtgaaattcttgaagcaaaacaaggccgtaatcgtcctccaaggacgttacgctggacgcaaagccgtcatcatccgtaacttcgacgacggaactcgcgatcgtccctacggacactgtttggtcgccggaatcaacaagtacccaagcaaggttatccgtaaagattcagctaagaaaaccgctaagaagtcacgagtgaaagccttcgtgaagctcgttaactaccagcacttgatgccgactcgttacacactcgatgttgatctcaaggatgttgttaacgttgatgttcttcaatccaaggataagaaggtcacggctttgaaggaggcgaagaagcgtttcgaggagaggttcaaaactggaaagaaccgatggtttttcaccaagctcaggttttaaatcaatgtatggaaatggaagattatgagagaacaaaatttggtttttagatttttgggtatttttctaaacgaatgtttttgtttcttgctcttttttttaatggatatttttgagttaaaaaatacttattattaggttctattttgatcttaattatgttgttttgtgttaaatcgatgaaattaattttggtatttatatcatatttgtgctagggtttgtggatctgctcagtttattttagcttaattaattttgaaggttgaaaaatcctttttttgataatgggtttgcattttgttacatttctaagtatttgtttcatttattggttcttagttgatatgtatgagattatgttatagatatgtatatgtatatatagtaatctttagaaaacaatttggattaatgattgaaatctatgtatactattatgcatattttgtgcttgtttgagtttgaattagtgtgaattatagtgattcttagtttatcgaaaaagtttgtattttgttgttttgtaatgattgaatacaagaattgtttgttaaaacatgtgtgagaacatatatatatgtataaatatattatgtatagatattttgttcactaatacagagatgaaaacaatatatagtaatatactttttttgttgcctgtttgaatatgaactggtgtgaattatagtgattcttattatgaatacaacagttatttgttcatacataatgtgagaacacatatatatttatatgtatactacgtgtatatatattgaaaatgtgtgttcattttgtttgaattagggaagatagtgaattcttagttgagattctacaatattgattgagttatttgttgtattgtgatgattgcgttgttcatatatgtatgtgatcatgtatatatatatttagatatagatatacattttgtttagtatgattattatattggttcttgtttgaattaattaagttaaagaattctagtgattcttagttgagcttctgcaagtagaactattttttgttcatatatgtatgacaacacattataatgttgatatataagtattaacattattgatagaagtaatgttacattcttttcataagtttctccaatgtatgaaaaatcactctttgtacaaaattgcatgtttatataagtgaaacctttctatatgaatgtatataataattaggggtgttcattggatcacatctaatggatttggacccatccaatccaattatttattggatattggatctttccatccgatccaatccaattgaattgagtcattcgatcgtgtccgatccaatggatgtattggattggattggttccatccattggatgctttaattggtttttattagattggattggatcccatggatgaatccaatccattttaaccactatttaggctaatttcattaaaataaacatattaaacttaataatctaacatagataataaaataatatataaaatattaaataaaataattaaatatataaaattataaatattaaataatgattggatggacattggatgatataaattggattggtatcggttatctattggattgaatgtctcattcaacattctaatccgattcaattggatttttaaaattagtctatctgatctgatccaattatgta

SEQ ID NO: 195358 - DNA, 716 bp, Cannabis indica
cactggaaaagcaggtcaaaaggaaaattagaacgaaatcaaaacttcgaatgatgagaaaaatgcaatgaaaaaggttatgctagtcttgaatccgtacaaaacattaacatatgtattaatagtgtataaaatcaaataacaagacagaaaaaaaaaaatccccaatcacacatatacatatcgcgtatggtgctgcattgacaattataatgaaattcaatcctgagaactcaccatcgatggtgagagcggaagctggagcagaagattgagccctaatcgtaaaaaataaagaatcaacccccaaaacgaagaacaaaacccttgaaatctccattttattttctcaaataaaaaaaaatctgttaaaaaaagataaacaataagaagatcaaaacacaatctctctcttcgacgagaccagaggagaaaagggtcttcgttggcgagagagagaagagtcggagtgggagagaaaggggcaagaagcacgaggaagagggagagagaaagaggcgatacccataaacagaaaatgagggagacgaagccaattttatggttttattatcactttattcttccctttttttctttgtttttttattaagttatatttgcagcaaaaatcccaatctaatcattttgtttacatttagatccctaatcttaatatttttgcattttaatttccaacaagttaatgaaataat

SEQ ID NO: 195359 - DNA, 738 bp, Cannabis indica
tttttttttttaattatgtactcctatgcttttttctttgattcttcacttgtctgccccattgttatttttaaaattagtttttgcataaaagaaaaaaagaaagaaaagaaaatggaaaggaaaaggtagtaattgatagaacagtggagaatgctatatacgggtcttaattggcccagaaatgttgtagtattagtagcagtagtagtagtaaaaattattaatgagaaacgctctgataattaatggctcgcaacaactttctattttatatgctaggttgtttttcttctgatcgaaaattaatttggaccactactactagctagactttactatcaacgattaaatttcctcacaaaagtagaagaattaatttaaccactttacatatatctatataatttatttattttttaacatcaacgtcttaccttagaaaaaaaatactgaattcttctatttgagcattattatttattattcataacaataagacaacaacaccaaccattccatcaaatagatccagtttggtaaataagttggtgtgtatagtataaattaaaatatatgaaagtagctttattatagcatttctaatggtggttcttattttttacttaaattttagttaaaatagttaaaaaaattaaaagtagagagtcatttttattatttttgctctaattatgttctttacagtatttacttatttaaataatattttataat

SEQ ID NO: 195360 - DNA, 2565 bp, Cannabis indica
tcttcttccaagtatatgggtgaccaataatctccatatcaattaagtcataatcactcaaagcttgtaaaaagccttcgataagaccccttggatatcgatttccaccacgtttgtcttcttggcacactatgttattcaaatccccaattgtgcaccaaggatgattcaaacgggtcttgagttcgcgtaataaattccaagtttgccaacatagttgccttcgtggttcgccatacacaccaataattctccaatggtcttgggtcccactagtaacaataaaatcgatatgattttgcgaaaaccatatatataacaatcattttgatttttctaaaagaaagctatgccaccacctcctccttgggcctcaacactaaaagccccatcaaagcccaaatatcttccaacccagtccaccctattcttagcacacttagtctcacacagaaaaataaaatcgggcctcttttgagaaactatctcttttaggaattgaacagtccacaagttcccaagcccacgacaattccacctgaaaagattcataatccttggtgggcctgtcaaccagaacccgccccacttaagtttttccgtaagagtgacacgttggagttattcatcacgtggtcatcaaaatatgcagcatacacatcatctcctatgaccatatcctcttgtggtaattctccattaattcccattgttactctccttcttttttgttcaataacaagttgtttatcatcctccttaccttcataatctcccattgttgactttccatttatatcacctttcattccttccccatccatatcaccttaattgcccataatcttatctcctccatccattactccacgatttgctcccataacttccgcccctgattgcacagaagtaatgcttgccgccggtctgctagtcaccagagtagcagaggtctccccaatcggctttgtagccatttctggtcttaaccacctagcaccaatggaatgtgatcatctcctcggagccactttcatttcgagattatacaccttagtaagaagatgtgtaggtgtatcaaacgccttcttgcagaacctctcgtagtggcctaataatccacaaacaaaacaaaacattgtcaaatcttcatatttgaaagtcacattacactctggcccattttttagctgtagtttccatcctttcttcagctgtttatcaacccaaatctgcacccttactcttagataatctctccttccgccagtaaagttattcggatccatcttcacatatgatccaatgtaattgcccaaatccttcaccactctttccgaccgaaaatcaacaatcaaaccatgtaattgcatcaaaaaatccacctctgcaggagtaatacaacatgggttttcccttggtttaagcctttcaaaaatcagaggaattctatcaaaggtccaaggacttctttccataacacgatctatatgcatgtcatgataaaactagaataagaaaagattcggctctaattctttaacaaacaaaccgcgaacatgacgccatagagaagccattttgtgttgcattgcttcaaagtctagattacgatccgtcaaaaaatgtcctacaaggcaccatcgatcatcgaattcaactgtgtcaaccgtatcatcttcatacatcaaaaaaccataatcatcatctcccaaactcattgcatcatattgttgatccatcccagcaagaagactttgaaaacaccaataaagccaacccaaatcagatcacaatataataaaaaccaatcaaactcataagaacatcatacacttgtcaaaagacaagacaatttacaagttttattagtttgttattttttattattttttgagtacaagttatattagtttttgataatggggtattatgccataggcaaattacccacccaaccacaattcctcgcctctacttttttctaggagaataattagtatttttttattctaaatttttttacattgtcaagttgtatttcttattatactatatcactcattaataatactttttaaaatacaatatttatagtaatataatacttttatgacattttatttgattttattatgaaacgaatgacacgtaaatggtagtatagatacaaattaaatacttttattttacattaataattaatagaataaaaaattattttttatataatatttatatttttaattttttaatcattaaacagaaaatagtgaacggttttttatttgtacgtatttatttatcaactatcatttactatcacctttttcataaaattggatagaatatattggagtgactacattactgtaaaagtaaaagttatatttaacgagccgtatattataaagcgcacaacttagtagcataaaatgttcaataagaaaaaatgttaattattctttgtataatatgcagggattacaatatagttattggggcagcaatattcctccattgcgtgccacacattgtttccatctatcatttacaaggtagagg

SEQ ID NO: 195361 - DNA, 1011 bp, Cannabis indica
cttgatcctactttttttccatgactatcttgagcatagtatgcgactacaccctgtttttgatcctcgcaactttatgtcgtgcgaggttagctctcctgaaactttatgctagcacgtcaccatttttcacacgataactgggtctacatatcaaacatttatgagactatactcgtacttttaagcaaaaattttgcactataacactacatatgttaaaagagcatgctaatagacaccctctaagatagaacattgcaataatagtttactaccattggtgcctagtatcatggacgaaccattaacgatattttataataattttaagttaaattatgtgaaatccaatacttaattcaactaataacaatataatattttacaaggtgtttaacatttcattataaaataacactttataaatgattaacaattttctataattattattatagtaaaataactatgatttcatattaaataacaccaataatagtacatcatacctgctacactatattaaaataaacatataaataagtactataaatatatataaaaaaattagaaggtttaatcaataaaaaaaaaaaaaaaaaagtcaaaaataaacactgcatgaatatacaatatgatataataaaaggttttttttaaatcacaaacataataaaaggttaaaacacaaatttttcacagccctacctttgaataacccaaattattatatataatataaaaagttaaaaaaacattagtcataagttatcatgccactattattattaccattattgtaattattataattaaatatgaagtctcagataatataacttaatcatcagtataaatagcaatcctattataaaatcttacctaacacatctcttattccttgttttggttcgtggaattggagtctctttaccactttctttacacttgtttgtttcacacatgaattccacttataatccttactcttatgacactcctattaaa

SEQ ID NO: 195362 - DNA, 1986 bp, Cannabis indica
acatataaacacattacaaaaaaaaaatccacaaatgagtgcttgtcacttgtaacttctctgacttctcagtggtaattttgcatttttaatctacatttttctgtaagaaagagtgtattataaatatcaagaacgaaatttacaagaaagaggggtacagggtatccgcaagaaacaaaccaaagcaaaaagagcaaaaaaggggtcagccactgttaaataaaatgattcttgaaataaagccttgtaagtagtaattttatgttttagatcccctctctctagctaaaccaatctatagattagaattccataatgtttttaagttcctttaactttaacatacaattagattgtacaaaatacaaggaaagtaaaaaagttgacatggatatgaacaaaattaaacataaatattaaatatataattatatataaagtactcacaagacttactaacataaatattaaataatataattatacataaagtactcacaagacttagtccacggtacaaagaaccatggtgcaaaaatggccaggctgcaaccccactgtatatttcataatagcagactggctgacctgtcctctcaagttctccctcatccctctcattgatctcaaacttaagcttttcagattttcgttcttcaagctgcggataaggacaaaattattcacatagaaaagtaaagactgaaaagtggtggaaatcgggaaagaattatagtaaaccaaaaactacaagagtgaaaacaatagcatacctcctctgtttccaacctctcatattcttcagaggtctctatttcctctagaacatcccagtcaagttgatgtgggatatcttgttccatatttccagtcccatcttcagagatgttcttgacattagcagaatttatcagctctctttcaatggcataaacaacgctcaagttttgaagcaaaaatccaccctcgtcatattttagattttcaccatatttcaaatcaatttccttctgaaacaactcccattcccataccctagaatgaagctgagacaccggacctggcaggaaagaatcagaagggaaattgagcacattctctagaagtcgtgcataacccagtatacattctgatgccagcatgttctttgcaaggcgcctgccagaggaggcaactgtctgagcaaatctcgaaagttttccatttgaaataaggagtgagaaagccctcattaaagcatctggattatgctttgaaaagaatatcccgtgaactccatcaactacctgcaatttagaaggtccttcaaaaactaaataaaaattatagaaaatccctaatcttgtaaatcatggtatctatttttcttaaattaaaacagtaaaaatatattgataataaaactcacatgtttcttcaagacaggtaaatcaggtgctacaactggaatttcaaaagtcagagcttgaagaagcaatggtggaaaaccttgaacttgttgggaggaatcataaagaacaatgtcagccattaacagcacactcttcacgtcactgttcaatccaaaatgcctcaaagaaccatcctgaagtcctagacgtgcggcaacttcctaaataaaggttcaatcaataaatcaatgtatcccccagagcaaggactagaaacttctgtcaattgtcaattcaacacaccagaagacaaatatctaatcgcaatgttcataaagagtattatccatcctctgatcctttttcatcaccaaactgccttttcttttttatctttataagaaaacaaacaattattgacaaaataaacattacactggggaatgagcgatgccattaaaatttaaagttttttaaagttaaaataaaataaaattaataatctcaacaattcaaaaagctatttaaaaaaggttctctcaaaaaaatattgtgaagcttacttgccactgccaggtttgcataaatttaa

SEQ ID NO: 195363 - DNA, 3087 bp, Cannabis indica
aaaataaagcaaaataaaactacttgcagatataaagttacaagctaaaaataacataaactgtcaagcaaaaagtacgaacagatgacatagatatatatatgagaactggcaagcaaatctgtaagaaacaattatgtctcattccaaggcagccgcagcagaaccgatttttcaacaagatcatttgcgagcttcagtctttttctgttctttcgctgcaaatcaccaattcattaataccaatatgcttaatatttaaataagcaaagagaaaactacaatgttcttgataattattaccggctttttcttcttctcgcttttttgcagcgtctgctctttgttgtcttataagggataaacgctctgcaaaagcgacacatgcaaaacattagaaataggataataatatagtaatagcacaactatcccatttctgcaattcacattctctaaaacttaagcatgttcattagactgtcaatgtgtaagcatatgtacagaaagagtcagaagcctcacaccatcattaacataattatattaggaacagagtatgtatattccaagtaaatattaaaaataataacttgagtgcactgtgtacatgcacatctatatatagttagatcttagaatttccgaagacatttaacatcgattacctaggtctttccttgcttgttctgttttcccttgttcctgtagtcgcatatatcgttcatgagctctctgtttttccaattcttctctgcagaaagacacaagaatcaagtgcgtaaaattccttacgacataaatttccaaacaaggaaaggaaatagttctcattgaaaggttatattgatatttccaacttaaatcccacaaattgacatattatatccaaattaagatatacttttttcatagtgctatcaagaaatatacaagacaagagtaggaaggaaaatgaggataaatttacctttcacgtcttgaaagttcagttgttttggtaatctgcacaatacaatagcattacatttctatacaagtacaccacagacaatgtgcagtgggaaagttgttaacttacatcaatatctctagctttcaaggtctttggcttcaccaaattaggattttcaatctcaataattccttgagtacctttacgcttctgctttcattattgaacagcagaacatataatttcatcatgagttccgtgcataaaacagtcaaaaacattgaaatagctctcaacaatgacaataagccaagcgaacctcattgtttccatctgattcttctccagactcctcgccggaatcttctgcagactcttgttcttcctcatactcaacttcttgctaataatatcaaacagaataacatgcttaagccaaaaagattaatcaaaataagcatcgtggaactaagattaactacaacatacatagacatgtatattatatgtatatatatatatatttgcatttatggttgaagagagagtaaagacctttttgaacgtgcgagggcgagtagaagttccagcaactgcaattatatgataaacaaatggttatagcattatgaagtctgatagtacaagcttgtgacatgtatataagaatttcaaaagaaaaaaaaaacaagataatagatacaatggattgaaaactctcccccccatctcatgcacattggctttggaactcttttactgcatcacatgcgcataataaaagtacaaggaaatctaagaaaaaaactatagatattaaagaatacagaaggaagaacaaacacatcagtgctcattatttagtaggaatgaaaaaaagagaaaatgactactgacaggtacataacaaagcaaagttttgaaacatagaatcgggtaccgaggcgttttgccttaatcccacaaggtgtatgcctcaaggcgtgttgaggcgtccgcctcaacaataacaagaaaaacttcattaaatattatagaattcataacaaacaacacatattaccatatcaaagtcatcaaattcatgaaaattactagttaagtcttaaaagcataaattaaatttataaaaggtacaaaattcaattgaaaatggtggaagttctaaacatataaagaagactgaagacatttgcgaggtaaatgaggactgaggagggagggacttggctgagaaggagagagatgagagattccatatgagaggattagggcttttagggctatattttcctgttttttataataaaaatctgtttcaaaagacccaaactaaagtccattagagtcatttaaaagtatgaaaatagctattagaaaagctttaaaaaaatagccataatcagcccacaaaaaaacaggcctaacacaagggagaacaaacacatcagttctcattatttggtaggaatgaaaataagagcaaacgactactgaaaggtacataaccaaggaaagtatataagatgagaatggagtaactcttctagtgtgtgatatgagaaaaaggagatgacaagtatgtagaaactaatgataacatccatacggcataaccaaaccaattcgtcaactcccaaaatcctttccataaaaggatcacactgtttatcaaattatataggctatggagaataataattgtccaaactacggactaaactttctctccaattataaagaaatacaagaatatgtacaatttacaattaaacccatatctcccaaaacacctcccatcatcacacaagaacactaaaacttcatccactaagtctttcacccccaccccctttgtgtcccttatacctcccacaaaaaatacagtagttcttaatgaataaaatcaacaaaaatcataaataaaaggttaacttttactagcttatctcacgattatgagctctaaaaagaaaaatcatgttgtgaaccaagaaaaccgacaaggcgaaacacaaatcctgatgtaaaaatggttcaccaccaaaaaacaaaaagtaataattacaataaagcaccttcaagataaaatacaacccagatcatcctaaaaaaatcagtatcagcttccc

SEQ ID NO: 195364 - DNA, 2019 bp, Cannabis indica
actgtattatacaaactttctcttggtatcagagccaacccaggcacacgccaatgtcgactggcctccctcagactccctctgcagccaacgatgctgccaacaacagccccatccctgcatcgagtcaagcaggggtcaccaccaacacaacacaagctcagtcgagctatgttgcaaattatacccaacccttcagcacactaaaccagccgttccctctcaaactcgatagaaataattactccctttggaagacaatggtttcgaccataataaggggtcatcggcttgacggttttgttcaaggcacccgtgtgtgtcctccggagttcattcctgcagaagcacaagaagggcaagtcgggtttggagtgcagctcaatcctcaatacgaacactgggttgtgagtgaccaacttctaatggggtggctatacagttccatgaccgaagtcatcgcaaccgaggttatggggtgcacaactgctgctgctctttggaaggctctcgaaaacctctatggagctcattccaagtccaaaatggacgatactcgcacagccattcagacaacaaggaaaggtaacacttctatggttgattatcttcgacaaaagaaagcttggtctgatgttcttactctagcaggggatccttaccccgaagctcatttgatttctaatgtgttgtcgggtcttgatgctagttatttaccaatcgttttgcaaattgaggctaggccaagtaccacttggcaagaattacaggaacttttattgagttttgacagcaagatcgagcgtctacacaccctcaatgaaaacccaaaacaccttgctacaccaacagccaacatggctaacagatctgataacaccagtagaggccgtggcaacaatgcttctcacaaccataatcctggacgctcgaactactctggtaacaaccgtggcactggccatcgtggaagggggagaggccggtcaagcaacaacaacaatagacccacttgtcaggtgtgtggcaagtttgggcactcggcggctgtttgctataatagatacaatgatgctttcatgggttctgacccaaatctcagccaacctcagtcgaaaaacccaccatctgccttcactgcaactcctgaaatcgtggacagcgatgtgtggtatgcggatagcggagctagcagccatgtgacatccgatggcagcaatatgagccaaaagtctgactatggtggtaaggataagttggttgtgggtgatggtcatcaaataactatttctcatgttggttatagccatattccccacaactgatagttctaaaatctctaattctaaaggatgtgttgcttgttcctgagatagctaaaaatctcataagtgtgtccaaacttgttacagataatgatatacttattgaatttgactctgaattttgttttgtgaaggacaaagccacaaggaaggtgctgctcaaagggatacttaaagatggcctctatcaactctctccaatctctcccgagcctaccagtcatcaaaaccagtctttgtgtgttttaaataattctgtgaggtctgtcaatgttgttcagcatagttctagtttaaattccaagaatgatgtgtggcatagacgtttaggtcacccatctcttagagttctcaggttagccctgaaatctagcaatgtaaccgtttctcatgaattaaagacaaacttttgtgatgcttgtcaatatggaaaatctcatgcattgccttttaaaaactccaataatagggctgtcaaaatgctagatctaatccacacggatatatggggtccatctcctatatcttccaacacaaactttaaattttacattcacttcattgacgattatagcaggttcacttggctataccctctaaagcacaagtctgatgcacttcaagcctttgttcagtttaagaaccttgctgaaaaccaatttgaaacaaagattaagtcaatacggagtgatta

SEQ ID NO: 195365 - DNA, 1178 bp, Cannabis indica
tgtattttcagttccaaccatggatttttgtagcgatccagcttcttcccaatagctttcataatctcgtctttacgagatatcctagcttcacctctttcaatattctttatgatacgatcataatctacaagtcatatacagacattaattctaatttcaaacccccataaaaaggaatggctagatgatagtctacagagataatgctaatctctgatataatcaaaaccaacaataaactgtcaaatcacttaccattcaactccttgtatctgtccttgaaaacttttgcatatcgttcaacctctacttctgtttttccctccatttccaaagcaatactttttatgtcatttcgaccatacttctcacaagccctaatgaaagtattgaaatctctcctactccaagaagaaaagccctacacacaaattaagtttaaatgcaatttcagcaaaaaataaaaaagtttgaatgcaaaaggctacatggaaacctcatcagagttacataatccacttacatcttctagaagtctttccttttcctcaagctcttcagcagtcaatggatctcccacctctgaaattcaatgtccagtcagtcattggggacaacaaataagttagaaagaacagcacatttaaacaaaaatagcaaattaccttcgggttcttcaacatcaattgtatcttttatctgattcttttgatgtgtttgctgaaagtggtaaaaaaaaagtaattacaaaagttatcactatccccaaatcctcactacaccaagaggaataaagcaaataagaggcattgtcacattaaaactcaccataaggaatcgtacttctttttcatatagctcgctcaatctttgagtgttaaaaaactgaaaatcatgcctagataaagggaaagaaaattaataagagtaatgctaaatacacactcaaattgcacacaatgatgtgtattaaatattagcaacttattttttaagtagagaccatatcccttttaattggatagttgagattaattacacatcattgtgaataaaaagcgtataatttgcatgtgtacccaatctttcaattaataaacatctattaaaaggaacaggaaaaaaacacaaatataaaaacagattaatttgaaaggtgcttacaattgaggcat

SEQ ID NO: 195366 - DNA, 2266 bp, Cannabis indica
tacaccagaggagcaaacaacggaggagactgaggaggaagtagggcggagaggggaggagagaagaggcgggagcagtgaaagcaaagaaattcaaacaaagaagaagataggtaggaaaaacagttgaaattcaaaagaagacagttaaaaagaaaaacagaaacagacccaaacagggcactggatttgtatatacccatatatttattagtttagctagtggatcttttctctatttcgacattttagaagtaacttttatttttggtattgtgtatgttgttagtaattgggatcatttataaattttaaaaaaataattgaataatatacaatatttaaaataaaattcaaacagtaaattaaaaaaaaattagtcatatatgtaatatgaattttatttttaaattactaaattatttaaaaaaaaaatttaaaaatggacaagttaacctaaataatttaaaagtctataataccaacgaaataagggatgtatcaaaaagtgagtatatactaatagacattgccttaaaaatataagattatttgtaccatggaaaagaataaggcagtaagttgacaggtagatattttctttaagttggtatataattttcttatctttttctctcttttctcaaaccataaagttcagtaatttttagttatcgaaataaaagaaaaactttatcaaaatttttcatggattttattttatttattagaaaaaaggggcacattatataaatagtagtgaagagagatgaggagcagtccaatctttctgttcactgtttaaccctttctgctcattgggccggtcgccgaatgataggctggttgtcccacatggcatgtcttgtggcattcaattggccggtttagtggattttggggcccttctttctttctttctgtctttcttttgtttttctgaaagagagggtatatgctattttcattatgtttaaatgaatcaataatccaatgagtgcatattcaccaacactttttatgctctcatcatatacaatacaatatataataagattataagccactcgtttagtgccacattcatatatttataatgcttctgtcatcctaagctaacaaaaacaatgagaaatgttttctcctatgaaaatttatatatataaataaaatataaaatggttacatgatacgctatactttattatctccttaatttttttattttaattttttttattcagtttataaatattaataatctaattaattatgaaaaatattataactaatatatattttttcaaagtattttatataatttatagaacttttttcaagtatatattaaaatagtaaaaatattacacaaatatattgagcaggctctataaacatttaaacatcccagcaacaaaaatttacgaaaaataccttttactcttaccatttagcagcacagaccactttcattaataatgacacctttcagtaaccaaattagcagaccaactgaaaagaaaccaagccagacggagaaccaccattgatttcgtttacttcacctaagaagaaaaccagaatcaatccaagcacatgttgtttcatattgatgaaaaaatgtggagaaaaactagttcaaaattgaaattcaaccctgaattccagtttaattcgcagaaaactaatcctcctaatatcaattttcagattcataaaaagtagatctccaacaaatagatctggagcttttaagcaatccaaatcaggtataatctaagaaaatgtatcaataatataactaaaaatttgtttcattatatttcgttgttatctaaattttgaataatgaatttgttcataataaatcacgaatataaagtgaattcacatgtagatcgagtcacgtacgtgcaaacactgttttggttttttatatttcagaaatgttgcatcacagttgcataaccataaatgaattttcaaattctcaggtacatgacacaattccatttcccatgttttacaatggatattttgataagggaatgaattatgtaaattacgaaatcagtggccaatttatctcaatgagctgcaaatatgatgaactagtacacaactagaaacaagcggtggaatgcaactaaggaaatattcaactgcaactgaaatagagagaagacatttatttgaattccttaaatttgtatgagaactcttacagcatgaaaaagctactgtgatagattgctattaatttccc

SEQ ID NO: 195367 - DNA, 2499 bp, Cannabis indica
atatacctgcatgatgaattgtccagcataagtgcctgtaattgctgagctttggcctgaggccaataaagcaatagcatacacaattttgcttgattttcccaacacattctgcattttgttatctcattattaaaattagctcaatccacaataattattttaattatttttgttaagatatttttttaaaaataagtttcaaaaaaacaccattaaagaacaaagaactcaatgaagccgataaatagaagatatcattgacaataacatcaaccaaaataatgtttttaatacagtgaggatatccataaatattttattcaaaagtcaatttaataaaatttataagggacatacatataagaatttaaaccatagctagggactaaactaagaaaagattacattcatttttcttaaaaaaacataaaaattgaaggcaataatgtgtggtttgaaaatttataaatgaagttaattaaagttgatcaattaagttagtttatgatataaagtttagtattgaatcaaataaattatataatagtaattaataatgaaattaattttataattaagaattaagattaatttacctgaagaaggaaagaggcagagttgagagtaagatcactacatcgatcagaattgtcattggagagattagaagcagagcaaacagtacccgaaacagatataacagccacatttatcaaaaatgccacaaacaatgcaaatccactctctatcaagaaatatctacatgcatcctgcaattcattcattaattattattgcaaaaaaatataaataattaaatatatattagtgaacattacatattttatgagtttgatgaagagattaaaaaatatatatatctagagggaaataaaataacataaggtaactagttacccttttggttattacctaatggtaactagttactcaaaactaagttatatttttgtaaattttacttctatatattattagaacaacatacttacattaacacctcgaacagaattgggtacttttctagagagaacaagagctgagtgaagaaaaagattgtgcctgtaaaataatattagttatattaatattaatgatacttatattgttacgtattattttaaattaaaatatgtgaaacttgatattataaattgtactgacggcattataagagcacccaaaagagcgatggcatcaccggtggctccttggccggagagcttaggaataaacatgcctttaaggacgccggacgccggaggtttcacataactcatttctccaaagaaacaagctgccattacgaacactaggattgatataagcagttccagctttcgaacctgttcaaattattattattactattatcgttattttgagtaagagacaaccagtcctgagattttgcgggccatgaaaaaaaaaaatctaaaatattatagtgtatgaaaaaattactaaaaagtaaatagatatgtgtaattttttttattaataacttttacaaagtacaaattcaaaaaattatttactctaaaaataattataattcaaaattacattattttttatttcctttgttattgttggctgattttttttattaaaaataatgaactaattaatgaaaaaaaaaagatatatatattatataccccatatcgttggagaccaaggagtaggagagtacttgaaccagtcaaaagaactcctccccaaactggaatattgaacaaaatattcaatgcaaatgctgttcctataactgcaaatcaaaacaattatgagtatatctaatcatcatattaatatctttcttcgttaaaaaataaataaataaaaaatctttcttcccatatgtaaaaaaaataggagatattatctcaaacattattttttttattttatttttttaaatttacaatttgagtttctaaaatagttgcagcgctagttgcaataagagtttttatacgattttttgttacaattcaagttgcagcgctagttctaataggatttttatgtaaaattttatatatataaaaaaaaaagaaccaattttaaagtgtaaaaatgaaaaaaactccagaaaaatatctttccatatttaacatatatacatattttttttatttaatttacttattaaaaggccagatatattattgatcaacaactttaataaaaagacaaacagaaggattcataaataaatgaaaaaatagatattttttttataaaataaaaaaaatgaaagacagtcatatagtaataaattaataatggagagtttatttcacttctaaatttataaatacatttattttatataaatatacattttaattatatatttttatttttttctatttatattcataaaaatataaatataaaaaaaataaatttaaattttaattaactaaaacttaataactataattttaaaaaaatttaaattaaaag

SEQ ID NO: 195368 - DNA, 1242 bp, Cannabis indica
tttaatttatttttgaataaaatcaaacttcattaacgactaaattaaccattacaatatttttgagagaaataattaatgacattacgagaagaaatgtcatttttgtcaccatatttttgtgatggcaaaaatttggtattacgcggtaaaataaaatttactactggtgtattagcaaattaacgttggtattagaactattgccaacacaaaatgaaaagcgctgtcaaaaatgacttttcccagcgagtaaatgcgctggtttcctagcgagtaaatgtgcgggtaaaagttaaattttagccactgcaaatgtgcgctggtaaaactttgacctttttgccagcgcagtttgcgaaatgcgctggtaaaagttactataatcagcgcagtagcgaactgtgctggtaaaactgacattttttgtatttagcaaatcgcttaacagaagataaatgaacaactactacaaaaataggcttttatctcaatttgtaggggcattttttcccaatttgctaaattgaaaaccaaaatatatgaagaataaaagctaaaataaaaagccgaataaaaaaatccattaaatcttgattattatagaaaaattagaataaaaaagttctttttatcacggtttttaattaaaaactgggatcgaaagttccattttatctaaattttttcataaaaatcgaaattaatactaaaaaaaaattatagcatttcatcattgttcatcgatttaaccaagacaatagtgtcctttattataaaaaaatttctataatttgatcaaaagataaaaatatgttcatagaaaaaataaaacttgagatcagatctcaaattacaatatcaccattaattaatgaaattatattgaaaccccaaaaacaatacaaataagacaaaccataaatatcaacattacaattgcaatataaatggaacaaataaagttaaaaactgttataatgtcaactcaaaatatttttcattcttaaaagtttcttcaaccatgaaccatgaagcaccgtcgatggagacgaagatgtaggagagacatatagcatgggagagagagctttggggctttttcagaagggttttcgctgacagtgatggacgaagatagaagttgcgaggaagaagagggcccttcatgcgtggctgagatggcggcgtggaatctggtagcacagaaagaatttggacaaacagagagagagagagaga

SEQ ID NO: 195369 - DNA, 2022 bp, Cannabis indica
aatttaaaaaattatatatataagtcatggtcatagtcactactagtgggtggggtccaataacacctttttcttcatcaccatccacaaaattattatccctataaattatcacaatatattataggataaccgtttaagtaaaagtattaaaaatgattttatgtaaatacgaatagattattctaaaaaatacgatacacggtaagcccgaaatatacgacataatatatattaaaacgatattataatttattaaaaataataataataaaatataaatttatcaattataaataagttagaaaaataataaaatttaaatataatattgaatattataattttataattaattaaactattagaatatgaaaaaaaaaatattatatattaatttatttatagggtgagatataaaaatttgagtatttataaataaatattcaaattctaatagtaataattttttagtatgattatatataaaatattattgatattaattttgtgggatctaatattaatttacactaatagcaaaatgttacttcttatggcgtttgacatcataaggtgttatttctcttccaataatattgggcattgctatgactaccaagatatctagtaccactataaaataacatctaataattagttagcgattctttattatttttattaaaataattagtatattttttcctgtaaaagtaatgaaaattgagtatttcttcaaatgatcatcctcataatcataatgagattatggagagagaaattaattattcataatgaaattatggagagagagatgttaattatgactgatatttgccaaaaaaagaataaaaaaataaacagtcttcaacgttgagaaaatcatcatcaattaacaaaacattcttattgagcattaatggtgcccaacaccttttaatacgcggtgcttcttgattgattagcgatattttataaaatttattttttttaagttatatgagactgaatacttaattataccaataacgaccgaaaaagattttagaccccaatagtattttttaataatatcaattcatcctaatactatggtcattaattgtctcaaacaattactgtttttttaataaaacaattactgttttttttaaggtaccacgtggtagaattactttgtaaatcttttgactcgagagagcttaaacttagaagaataaccaatcatttataaaattttacatacatatctttaggaaaagtaattagtaacaaagacaatgaatattgataaaaatgccttgtggccttgattgttgactataattttgttttgaagtaatatattcttgttattataatttaagagggactttatgatattaaataattgaatattcatagtttgtatttttttttaaaaaaaattggaatataataatataatataataaaaatagtaatagaaattatattatttatataataaactttgaaatgtattcaaaaggtaagcttccttttaagtactaatatgttcaaagatactttctaagctagatttgaaattttaattgagaaaatagtgcttagagtacagttatggagttctagaaactttttttttcgttggaagaattactttgattaattcagtattgattacatttcatacctattggtcttaaataatgattctttcaaagaaaattcttcaaaaaataaatctcatatacatatagaaatttcttgtgaaaatgaaaagagaatttattagacggggcaaggttacttcaataatttatatgccaatgaataaatgaggtgtgtttcaaagtcaaacaaatacaactattaaaattgatttggaaatttgattttctatacttagaaaatcttaatttttttccctaaatgcatacttataatattggtcatatatgaccacattcataatatcccacaaatacccctgaaaaaatcaaaaactcatattatccatccatggctgcctcatcc

SEQ ID NO: 195370 - DNA, 2103 bp, Cannabis indica
atcttatttcctctcattttagtgcacaaatcacaacacttttaattctatagtagtacagaactacttgttgtttattagaactattcaaaccctaatgttctaactaagaatatgacaattattcatagttaatcattaggagggaccttactctcaatctcttttgtaggtagctcttagagaacctcaaaagtatttttatctttcttcaaagctacttgaacatcagtttttagcaaggtttatagatttggatcccttgtctctttggtcacttcagggtttgccaattttgagtgtctttcatttggcgcaaaccattcagatgtttccctatttcagtggaaggaccctcataatttgtggcagctgccaccttaactgctggatcattcactattgtagaatctacagtagatcctgctacttgactcttgtcaatttttcctacatcagcctttgttgtagcatcaacaaccttgactatagatactacttttactttccctgagccatttttttttcctgtaatctaccatactatgaccataaccattgcagttcttgcacttaataggcaaccattcataatccactccctattccaccaatctaccttgctcagtgatgtaatgaatcaatcgagaaggttggccagttatatccatttcaaccaaaaaattagcaaattgaactcttcttctttttttggtaaatttgtcaactatatttggtttgactattgtgcttacaagagcagttaagatttttctcctctaatattataatccaagatcatgaagccttattcaaagaggaaccgatcaaaccagactaactacattcaaattcgtcaaccaaagtcgaacaatgacaggtttcctattaaattggataacccctctttcaaggtcttaatcccaagtagcatcgtcattgaacttgacaatcgtatacccttccgtcattcgaacaacttgagcaatgcctaaattttcctagatccttttcacaaaaccctcaaacactacaaatggtggattagcacccaaaaccatacaaatgactattgatctccaattcattgtctgaatttttacttctttaccatcaatttgagcaatttaatttctctccatccttcagcataagctcagtgtatgatagcttagctgaagtatagaaaatattacctaaagtaaatttttgtcatttcttttttgtagaggtctagattcctcctgttcctgttcgtctattcatcagcttggcgaatttttttattttgacattttcaaagatttactaattcccacaatcttagagttactcaagataatatcccttattgaaattgcttcaacaattgctctattgcttcatggaagcatttcgtctcatgttctttatcacaatcggaatcttgaatcagtggtggattgatactggatgcgggctttcggatcattcgcttcttcttcgccatggaagagacagagagagagaagaccatacatgcctttgtgaataactatttgttactcgtttttagtttctaatttagtccctcaataaattagaaaaactacttaagatatttgtatatgtagcacatgacactttaatacccaatgacccacaattactaaaattattactttatttgggtcaaacttacacactaatacatatgagcctatatttagaattttaataatccaacagtttatttttctcaagtgtgctaaaatatatatagcaatacctcatatttttatcactccattagaaatgctctaagaccatctctaatgggatatgtaaaaattgagctatatttggcacaaaaagtggttttgtgacatttttatatcaacttttattattgtgctttatttcataatttaaatcttgattaatttaatatgttatttaatgttcacttaataatttattaaaaaaataaaataataacaatccaaaggtaaaaaaaaaataataataataaaaatgcaagtgatcatttaatataaaagagcatattaactaaaatttgataataaaatatttaaaactacataatggtaaatacaaaagcat

SEQ ID NO: 195371 - DNA, 1089 bp, Cannabis indica
taaactaactgttacatctaacagtacccattgattaattattatcattttagcttagctattactaggtaactagttcctaagttgcagttttacttttcaatattctcacccaaaaaataaagtggtcctctcctcttacttttgtaatcaacttccttgtttgtggaaagtattatacattttattatcatttcatttgactataatctatgatagcacactcctctaataagccataatatgtatgggcctacctttctcatataaggaacttagcatcatataagatttaatttaatttaatttttgtgtaaatgacatgttttgctttcaaatatatcataaataccacacattttgttttgaagtttacatttgaattgatttcctttattccccaccacaatatggaaaggtcattttctactttttccttttggaagggacctattatgacttcacttaggtccaaatgagatattgagaacaactattcaagaaccatttcgttataatatgcaacctcaccaaatgacaagtcataatagatgggggaaactccatcaaatgggccttaaaatatctcaaaaatatatgtccatttcaatagttttattattattgtaataatatatagttgtagactgaattacccctgttgtgttaaaagaataatgaaatgcactgcacccatataataatatgggaaattaagttttgagccacataatataattatttatttattttttttttttaaagaaatcgaagaaaatataatttaagagatgtctatttacgaaattaggatatctttccaacccaaaatactctctctcttagtttgggccagctaaaccaacatccaatttgttgggttatgtaggcccatgaagttttcttccacttttggaaaaagttgaaaaataccagtttcattattaagttatcataaatacccctataagtagtttgattagagttctacaaaattttgatgagcgaattttgttgttgtaaatgatacataggagtataaatggtattctaattataaattggggtatatatttaatgatttaaaaa

SEQ ID NO: 195372 - DNA, 1261 bp, Cannabis indica
atattctagctttcctataataatctaataaataattatactattttcttcccttttttttcatcctctaatacatttggcaatattttcttagcggcttatatgccctataggatgttttgttaaccattgcttgaaagattttttagcgtaaatatctcaaactaatttattgattattttactagttttccataaatagggcaaacaaactatattaaaggtttttaaagtgtttccttattatggtctatgtatataagagacgcttaactattatttttttatttatctatttttgttgacggtaagaactcgtcactatgttaaggccaaaaattcattgttcatgtgaaagtaagtaaactattgagaatgattagctaataaattcaaagttaatcttgaatgaaaatggagatgagttattgaatccaaatatggtgtttacaatgtatttacaatcccttctcttaaggaaggaagctctatttattgaggcactattggccttggtatacatggtcctaaaagaaaaaaatactcccagatttgtacctaccaaatcaatgttataggtgggtagtggaggtagtagtggtcgggtgtcagttcgtactgacacctatagatttagtctccactgtcctttgtacatctactacttgctcaggttttgcagaagtgtggaggctattttagatggttcccaccatgtgtattgtacatggtgtctcacaccttgctccttcatgccttttactctcgcacaatgtgtctcgagatttgttacacagtgatttgtattgaccttactatagggtttgtggtgagaggtcaataatggttctcgtatcaaacatttttgaaatggaccccgtatgagcgagtgaatgtgggtagcgagtgacaccttgtgaggggcccctcacttgatggttgtggggtctgacaaagggggaatctcgtggctgagagggaggtagtgagggaaagccttactcggtgaggtgggtgcatgagggagttccctcacgggcatggtggagggcaataatggggagccctagcaagtgagatggagggaagtgagagggttccctgacaggcgagagggaggtcagggagggggagcgtctcacaagtgaataagggtgtcagtctttatccctgtgttggtgtgagctatggtcagtcttatctttgaaatttctgtttatcttattggctctaagcatttttggttcatagtcttcgtgtg

SEQ ID NO: 195373 - DNA, 1163 bp, Cannabis indica
tttttttttttttttgtagatgacagtcaaaaagattattaaatcatactaatgtatgtattttttttcaatttttttaagcaaaatagtaatggattaataataaagtaatgtatgtggctgagaaaaaacatattgatttatttttaattatttttaatgaacaatcaagaagtcacaagttaactgattttgtcaacttttctatctatcattttctagaaaataaagtattatttcttctatccaaactaaaaagttttctgatgaatagattcgtcaccgatctatcttggctacgacaaatgacgtttaataaataaaaaaaacaaaacaaagtatatgtttaatgaaccataatttataatttatatatatatatatactacattcatatgtgcatccatttcaataaataaataaataaataaataaaaatctatatgcatgtgctttttacaaaaataaaatatacatggaatggcaaaaaagaatttaaaaagagacgtatatgcatatgtatcactgtgcatcaaataatgatatttggttgaaagtaataaaataaaatgaaatagaaggaaataatgtttattttattattttgtttaattgcattttaatggattgcaatactattctaatgaaatactttttctactattttactagaatacctattctattttaaaataaaggaaaagatcattccatgttgtaatatgagaaaatatttaataaggtttttatgccttttaaattttatttcataccattattattctcattctcattcatattattatttttatatttttatttcttataactaaacgccacttaaataatgaaattgattatatatattacttattacacattcttagaaatcgactaatacttataaataaaactattttggccatcttatacgacgttgattaaacaattaacaatgttcgaaatgttattggtatatactatcacatataatatttctccagtcaataatcggtggcttcaaattaaactaccccacctagctagcttgtgtaaacaaatcaaaaataaaaaaaaaaataaagatacatgagtcatgtatataagctgtggatttggttcagaatatcgacgtggatatcgacatggataatcatatatat

SEQ ID NO: 195374 - DNA, 2482 bp, Cannabis indica
cttaccaaattcacactgacgaatgaaatcctccctctatttatctattcattaaggtgtagcctagaccccagccacagtataacaaagcccccttctagctaattctctactaattccctgctctatcatgaagctggggaattatgcttgtctagcactcagtcattatggttagagagagcggagaatttttgaaggtgtacagaaaatttaaataatctgtggatatattaaagttctggatggctttgttagtagtaagtaaaatacgttgctgttttgtctagggactgtcttgtttattactttctattagtcataaataataataataataataatagtaataataataataataatagtaagtgtgtttacctagtgaaaaaaaaagaaaatttaaaaagaaaaaaagacagatgttaatatagtaactgctcaacaatctttgtgtgagttacttgctgcttgtgctatttatttattcaaaattagtttattgatcaaaaaggcttaaattttaatgcagcttgtctttcttgttttcactggagaagcttggggttaccttggcagccgaagatttttgcacgaacttgatctacaatctgatgctgttaaaggcctcaatacctcattgtttgaaatggtataagatctgtttgcgataatataagtcgtatgctacttgttgttgatttcttcactgttatggtgttatttacttatgactactcaagaaaggtagctcaaatggtcaagaatgtgatttgttcttataatgtctgaggttaaagtctttcctaggtctatacacaaatcgatacgtccaataaatcttgtcatatgagacattacttacaatttcttctcttaacttgtgcttgttgcattttgggttagatcactagttacgtaaaatttaattttatcgatgtttacagtaagtaattagtttgccattttgaatttcgtagaacacttctttatgcctcaatactccattttaatacgaaaaaagagaagttttattggttgatgcgtgtgactcactcgcgacggtttcagccaccaaactctagggttctacagatcggcagctgcgcggttcgttggtgccgacggtgagagctcacatgctctctaaatgtgttattcgagaaatatgaagaacaaaccctaattgcaaatctcaattttgggatcaatcctaatttcaaatttcaaattttgctgtgatagcatgtagaaagtggtgaatgaaattgcatattattcaatagaataacaagtattcatatacaaaattagagaaacttaataagaaacaaaagaaaaatagcaaactaagtaattgaaataatttctaccactaatatacagttaatgtatattctaaaatatatatatttttaatttgtattgtcattgtaaattcaatgttggattttcatgtaaataatttgcgtctttcccttttctagccacacatgattacaaatctattggtttatttatttatttatttatttttcatttagattatcgaagttggaagtgttggaaaaggcttcaatgaaggagtcactagctttcatgttcacactactggggtgagaatttttttttttaaaactgatttcataaatacttatgtaactatgtgatgacattgtttattaatctagtataagtagcacatatcgtgtacacgatgggcttctactcaaatgtatttattctaagaggaagaagaatttagagcttattgagtaacatgtatcatgtgtcttgggtagtgaaagtcatgggtaactcaaatgagagagaatgtaattattgcttttcaacttgtaataataggtgctgggagagagataaagttagaccccatattagtagggtgtggcagagtatatattgaaaataaaagggataactcattgtattgagagtagtcttaagtgagatttggatagtatttatagaggtgagtaaggggttggtggtatgcaaagaattgagtatttctctatttgcatcatggggtgatcctaggcttcttgaaatgcccagaccctttcattttattgcaatatccattggctgccatagcctaatatcctactgttttgtactgctattttgttattgtcctctactaaattctactgctcagatgttggttcacatcaattggtattagagctgagaggttaattcacatcaattggtattagagctagtcttccagtgggtatggaggttaccgaggacaagaatggcggctcaagtcgattacattgccaaggaggtagcacttggttaaatgaaagtgaaattgaatcaagagaagactggggtggaagagttgcaggcgctattgaattaggtgtttctcaggaaaatgaggatactctgcctcattcgtggtattcacattggttgttcaaacactcaaatcttgatagagacatgg

SEQ ID NO: 195375 - DNA, 825 bp, Cannabis indica
tttttttttttttttcaataaattacatgggaatctgaatataacttactgtgaaaacattaaataagtttgaaagaaaaaccttaatatactttgcttttagtacaaaattacactttgtaaagtttgtagcatctattcccatatagggttaaaagtgaggtgaaatatggatgtgagagaataactgaatattattattataattattttcttttcttttgacatttttggattcagctttttcaatttttagtaaaaaaaaaaaaggtaacaggtaattattttttgttttttccttggatttatccatgtctgttgggtttatattataccactttatattttattttccttataatatgtggtttagcaaattttgaaaggaaaaaaaaaatattgatataaaattgtaattttcaactatgcaaaaaagaataataacaaaatatttgtacccttttttttttgttgagattatcttaactatattggttgtgtgtgcgtgtgcatttatttgtaaacacttgcttatccagcattttaatttattagtttggccaaataaataaatatatagacacaataaaaacatatttatgtatacaatactaattatttggtcaagaaagaagtggctttagataaatgctttaaaagcatggattggatcgtggccaaaaaagtgggtttggtttggtttcaaatattttcaaaacgacaaccaacagaagcctatgccaccaattttcccttttcttctggctcagtgtgttcttttgttcttttagtcaatcaagtttttccgatttgtgtgaaattttt

SEQ ID NO: 195376 - DNA, 951 bp, Cannabis indica
agagagagagagagagtctaatttacggggcatgccatttggatggatgcagttgcattgatagaaattccttttatcacagagaagtgtaaaggacttgtgtttcaaatttttggtagagaggagacattagatttatttacatgatttcttgtgtgctttacttttatgtaataatattcaataataatatatatgtaaaaaataatggaaaatcatatgatgtaattgatgtttatctatataatgcatgttctgtctatgttgtgattggttgttgtaatgagaactaataaggctgtcggtggacattatgtggtagttgctatgcaatagctctctaataaaactcaataaaatagagcgtgagtttcaacttcttttctatctttctagcctatactacagagtgtggactagatttctagctttaagtaaggagttccttttggtaacagtgattgtcattgtctacctacctgctacgtctattatccaagaaagctacatatcatttatggtctattctctaaactaaccgcatattcactcacatagatttaattattccttcttttgtttcaaacaaaccttacggattgaatttgtagtcttaagtgctcaaagcatgatcgtttacgctcaaatgtgttgtgttaaaccaataacataaaaacatgtaatctctccttatcttagcaagaacaagaaacacggctccccgatttggttgggacatcaaatgataaaaaaagacatacaaataaagacacgcttttcaattccaaatctaagatatattattcagcaaaaaataaaacaaacctacaatattacattattactaaaaattacactaattattaattattatgtttctatttttattttaaaaaaaaatgaaaagaaaagaaaacatgcgcatgagaatctgaggagatagcattactg

SEQ ID NO: 195377 - DNA, 1041 bp, Cannabis indica
tcgttttgttcttgtttatgtactttttttcaatgcttcttaatttcaagacttgccttgatgaatcgattatattaaagaaaagtttaacttttagggttacaaaaataaattaagtctacaatttgaaaaattaattagtatattcaatagttcctataatttaattagtatatctacttttattcttattcacaacactcccaatgtacttctaggccttgatgtatgtcgaatgtatatcgtctatttataaccccaagaattttacttaatttatttatgtaaggtattcagagatttataacttggttgtaacatattttagataattctctaaatattttaaattataataaactttcatcatgattaagttgcgttacaagattcatagtacaattattataaatatagcgacctacaatttgaattaaatttcttcttaaattcaatgaattagtttacctgagagtagatatatccaatttaaaattcagatgtggattaagaagactttcttggaaaaacacaccaatctttatcatcttactatgctaaacatgttaaaactaaatcaagactaaaaattatttgaaaatgtatgaaacaatagtacatatatcgtaccactatctcgatctctgtttaccaaatttcagaaaagctaactcaaacaaaatctttgatctgtgttgtaaggttttggacaagagagagagaaaatgaaagaaacagtgctttgtattcattgattaatgaagaagatgacaacaattgatataagcattagagaagataacaaccttctaacaatacaatcaaagaacattcaactaacagttagttagttaacaataacaactaactaactaactacaaactaactaaccagcttcagcttccttaatgacccccttcaaattgagtgtggttttggaaaccacacacaatttgtctcgaagttcagaaaacttggtgctggagattgacttagtgagacaatcagcaatatgagagaacatgcttaacattgatgtg

SEQ ID NO: 195378 - DNA, 1892 bp, Cannabis indica
atagagtgtaatttcctcattccattcataattgttattaggtatcttaaaatgtttaagacccagagtcgggctgggctaagttgggctaggcccatgcttaaagttaacctaacacaaagacttaaaaatatacatatttttaaaagtaccatatgttacgctatgaaatagtacagggactttttagtaatttgcaaagggtgtgaagaagtataaatgtgtaattgtgtagctattgttagatatggtttgagaaaatagaacttttgttcaatttagaattttacactgattcgaagagtgcatttggagatttgtcctatctcgaagaggactattaactaacaattggtgctttcattgagagttgaataatttttcttttttcaagcctgaaagaaggcacttaggaataattagcttaagcactttgaaagtatgatttaacatttccaataatatatgtatatatatatatatatatgtgtgtcttatgcagcctttacatgtgggttttacctcagacagaggagccaataccattgatgttcattggtacacaaggaaacaaaatcttcaccatgtaattaataataataataataataatattactaatttaacttcttataattaattaatacattgtattaattattattttaattaattaattcattgtataatattttttagatttgggatgccagcataattgagacagcagaagagaagtactatgattccaatgtagaaggcctagttaaagccattgaacataatattacggtatatttgtaaataattaactaataattcttatatattttttatgatgatcttaattattttctacattcatataattaattacaactaattttatttttatgcaagactgaatgggctgatgagattaagagctgggaaacttgcaatttgaataacacagcatgcccagacatgtaagttaatttttatatagggaagttctgtttctaatattaataataataaaaaagtttaaaaataatttttaaaaattatttttaataagatttcatacaattttttttatcatattatataaatataatttattttcgtttaataggttggtatctttttgtcctttaaaggaatatttcggtatacttcctatttgtttcagtattgaagagaatttttaatttagtttttcacgatcacatactttgtagttatttaggagcacttgtaatttttaaaaaataatatttacatattttattgcacgcttgactatttttcttatactcttgataaataactttaaattttattttcgatattataaattattcagaattttatttaaaatttataaatggtcttaaaaagctacaacttattcgatcatcaaaaaaaaaattaaaataaaactcttctagataccaaattgatatgggatatagaagaaggtacagaaaaaactattaaaaactatataaatgagatttttagtgtaaataaaattcttcttgaatatatttatattatttatatgaccactttgaccccaattaattaaaaaagtgttattatttttggttttaaattatttgcagatatgcatctgaagggatcaagtatgcttgtgattgggcatataaagatgcaaaggagggttctgtgttagaaggtaatttaattaattaattcatttctaatcattattacttaacctttatcataatgattaattaattaataatatgatattaatgttggatctttcttttttccagatgattatttcctgtctcgattgccaatagtcaacttaaggctagcagaagctggagtacgattggctgcaactctcaaccgtattttcggttaacatcaga

SEQ ID NO: 195379 - DNA, 2347 bp, Cannabis indica
acatcatatttttgatacaattttatttttatagtgagtcttattaccatattttaatctatacttaatttaaatttaaaagacaccgttcatttattctgaagattgccggctcaataacagtacttacatgcattgaatatcaagtcttacctaattaaaagaaaaaaaaagaatcaattctcataaaacgctgcttcgtagttggacagcctacctaccaacatataacaatagcatatataagagtgtgaggaagctataataataacaatatcgatctatatatagataattataatatatagaggtataagaattatattactacacatgggaaatctttgctcttgttttcgttctaaaccttctcataaaatcaaaattttgttatagaaaaccctaaacctaattctagtactgatcatcagcagcatcatgaccatcttcatcatcctgatcgatatgatcaagaacaaaaagtagcagtgcatgataataataaggccttcttaccaagaaaacaggatgagtatgatcatgatcatcagaagaaggaatctcccatggctaataataatgttataagtagcatagaagcagccagaatttacaaaggctccatattggttactgattattatgggctataattaattaattactcctcagatcattattagatacttattatattaattaatgcatatatactttcttttaattaatatatttatttttattcataagttctctatagctccttttctttcgattgatttattatatcgacacatacatgtaatagacatattataaaagataaataaatagcatgtattgatttttgttttctaagtaattttatacttatcaattaattaatgaaataaagttatttaaatgtgtgtatgtatgcagtcacttgatgattttgtgtttttgtggaataatagttagggtagagaaaggaaatcgtacttaacccttaaggaatggcttgattaaattatattgtatatgtaatgtgtaaataatttttgcataaagctatagctagcattgttgtttatttatttatttttttttcttttgtggaaacaaaataaacataaaattgctcatgaaattgaaagacatagaccgggaaagcaaattccaatattctattattcttaaatgagaatcgttaaagggcatatttttagcttctactatacgtacatgagagtgttctatatatataatatacacatatgtatatattttatatttgtattgtatcaattatatcattacaaagatcaagtcccataatgatatttatgttacccagtattgttataatatatatatatatatatatatatatatatatcttatttcatttcttttaattacgtactataactgatagaagaatttataaattagataaaactcggcagacgaattttcaatctccaaggaataatttaaaaccaacttttaatgtagcattatctatatcattgacaaaaaattaaaatgttaaagcttaatttttgatctaatttaataaaaaaaaaactcttaattttatattatatggacttgggttgttctatcaatggagacgaaaaaaaaaagttatttagcaaatttgagttagatattttttatataaatatatttataaaaagagatattttcttgacattttttttttaattaagttactaaattaagcataaaaattctaatttatttttttactattagccaatattggatcaaaatttatggttaacacttctatattgatatctattgttgactcgatttttattcgtcaacggatcttataagaagatcgtaaacaagcaagatgaacacaagtggatgttgatcaaaataattaaattgatttggaaagaataaatttgacaattaatgatgaacacaagattttatagtagttcacccccttattgatctcaatgcttcagttctcaagtgagtttttagagtgaaggagtgaatgtgaaagtccctttacaattgacttaataacttttataaaggtttacgtttagggcttagggtttcttcatcagatatatatttttcttaactatagttaagttaaattcaaaatataaaataataataaaataatatttgaaataaatatctttaaaaatcataacttcttgtaaatatccttgtaacagctttgatggcacgtgcttagcacgagagtgcctctcacctgcacccaagtcatgtgagttgctagactttgaaggtctacccaatgaggagcactgaaggtcggctcaatgaggagcactgagggtcagcccaa

SEQ ID NO: 195380 - DNA, 1309 bp, Cannabis indica
aaaaaaaaatcatactcagactcggacctcgtccctgatcccaaatccaaacctcgacctcaaaccctgtccgtccctagacctcagccccaactctaaacccacacccaggaccctgaccctggcctcggactctggaccttagacctgacgtaaataaactcaacaaatgaaaataaaaatgaaatttacataacacatttttattttctatttttaaaattaaaaacagaaatagttataaaacgcgtttttatttttcaattttttttttacatgcatggttaacatttggtagtgttatttgtgttttcgagcaatagatacgcgacataattaaagaagaagatttgtcaacctcctggatcagcagagttaactatcaaagttcctcgcaaaggtctcttggtaatccgaggagttttatggatacttgatgcgctcaagtagtgtttctgggacacagcagagccatactcatccccaactctgagaagtcctagagcacgattcaggtaagtggcttccgggtgaagacctatgaactggtcatggatcattaccgctacctcaaggtaaatggccatgtttcgtataaaaatcgacctacagacggttatacctttttctgacacaggatcagatcttgtcccccatgtcaggccatagtagtgcgcatatgcacctatggacatgccttttgcccgacttgtctatgggtactctacaaaggaaaaacctttgagcaacacatatcttttccaagtggtatatattaaccactgcccctgcgcatcgcacgatcaaaggttctgcaacatggaacgatcaaatttacagctgtacgaaatcctagctaggtaaagggaatgaccttacccacatgtaagtctataaatacccttattttctatgtacaaggggtgaacaattttcatacttatcgaacctttgctaaaatccctactaacttttttcttcatcaagagaaacaaaaggagtgtagagctagaatttatattgtaaacatttgtataacttaaacactcacctgtcaatctaaatacaacagactcgtgaactaggaattattaatacacgaaccacataaaaactacctatcttttatttattactttatttcttttttaagttctattttactcgtttctgaaaatctcaaaaaacaaataacaatattgagtaatataaatcccacatatcacgcatgaactatgagtgagtgattgagtaatttgtagaaaactcatacctaccaaatcttcaccttaaaatatatatatatata

SEQ ID NO: 195381 - DNA, 2956 bp, Cannabis indica
catttttgtttagcagattccagaatgctatcaacgggaaaccaaaaactttttttacgagacaggccaccagatcttactcgcctgtcaattgcggtggctgcatcactatgagatagcggcgactgaccaaatgctcccaaacgaaagtacatgcatcttgcctcaaaactaaacagaaagggacatgaggccattatctgactgcaccatgaaggcataccaccaacagacacagccattcggtcacgcatctgctgttctagtttttctgtcagtttactacttacaaactcattctgcggcactgaaggtattgctgctacgtttaaactatccaaatcatcaagttttccttctgcaaaagcacccattctttcctgagatatcagatgaaaacaaaacctgttcatccttttccaagcatttcagcagatacattatatcataagtagggcacggtttctccaagtcatcaacaagatcagaagtgaacatgctggaggcaaatgaagttggctgcacatacatcttgattgtgtcagatagaccacactttttaactgcacaagagcattccttaatagtataaggtttatttacagattttctgtatgttaaggtgtaaacttggctccacaatctcgtgctggcaacagtttcacgctctctaatttttttgaataattgcctggtataaagtcaagtccctctctagcagttgcccgtcaaggaaaataacaggtttggcaaagcatctgtaccactcctagatgcagacaattccctttccatatcaatatctgccttcggataaaactgtacttcctctgcagattcctgagacattgctccaggggttaccacactagaagtggctgcttgttcatgggaagcctgtgacaaagcagcatgagtctcctgcagaaagtgtaactaaagtcaaagaaatgcacccaacattaactcaaatgcaaccaataaacaaccccaacccctgacaataaaagcaacatctactttggtccattcaagagaaggaaaggaagaaacttgaagtaatttaaaaatatagacaaagaaagtcattgttcagttatggtgagaaaatatacaagagatacctgcatctcagccaaatctgtcaacatgctgtctgatcccctgtcatccagacttccatctgggctagaacttgaaggtgctaatgattgaagtggcagctcttgtaattggcctgaaccttgcatcagtggctttgtcacttcactactgactttaggccacagaaacccttcaatggcacccactgaggaaaaggggtcagctgtcagataatcttcactgtagtcactaaggcctgtctctccttcacctcttacaaaacgaactgttagagatggatacattatgcaacggccacttggaacagcagcaaatgagctcctcatcttggcattattcaaaacaacaggaaatgtttccaaagaagatagtccattttgtaatttaagtatgaatgctgataggggcgagtcctgagaaagtgggtctgatgaaagcaaatacacttttgcaaatgcttcaaatcttttctccatggcatggatattactgtgattaacacagcactctctttctttactcaaatactgaccatctgacaagtaattaaccaatgatttgacaagtccactttcaataaactcaaatgtggagatgggctcacttccattaagcttcgcgatcacttgatataatatatcatagaacctctcctcatgctgatcaaaggcctcattgttcatggggatgttcaacaaatcatttagtgccaaagaataacttttgagctcttgaagaacatcagttaatgttatattggagtcaaataaatcagctgagaaataacttgttcttatatgcatagcaatattgtaaacagaatccttttcaagcttgcagccattactttccactgttgaagctgtgctgccagtagcaaaagtgtaacataagcatgtccgagcctccctgaaaacagacttttgactcgaatcagatgagacctgtgtcgtacaaaacacaggaaccgttaattgtgaatatttatcttgctttaaatcaggacacttttctgatgttaacagggcatcaatggcaaaaagaacgccttctttcacaaaagagtccaagaaaatatccgaaagcttttggagaaccaattcagctattttcagggccaagatcaaaacatgaggatccattctagtaaatacaccagccaagaaactgccgcataaaaacagaacagtgagcattggtaattttggtttagaaacattggtagtttaagaacaagagaataccgattaccttgaaaagttggcattcttgagcacttcaacaagcaagtcagcagtgctcaaatgaatcatcttgttgattacaaaaaggcaaccaaaggaaatatataaatttgccccagaattaaccacctacaaaaaaaattaagcaggcattagcatgcggtataatattcagaatttaacagtaatctatcagataaaaacctggatcatggagggaagaatatccatcccaaattttttcaaaaggtcaggctggtttttgagaaatgattctttatccaacaattctggtgcatcttgatctccggttgaagcaggaagaagcgcatttattaagtttaaaacttcatatacctgtggcaaaaaattacaggaattaatttccatacatgatttttgcttcgataatcattttttatatctaaaggaaactaggacaagtaagggaacggataaatgaatgaaaatagtaagcaccatatcagtgaatccaaaaccaaaactattgcaagaatgaatactaaggtgaatccagttgtcatacccttagcaaaatacatatcaggaaaactagataacaatac

SEQ ID NO: 195382 - DNA, 2608 bp, Cannabis indica
ttcattttgttgctcaatatcattattttgagaagagaaaaggattttaactgagatttttgaatgaaaggaatgatctaatattgaaatacctgatttttattttcttgtttgtttgtagagaaatttcggtttagtgtaatgtttagtatttgtggagaatgaaaaagctcatcattatgctagagtttgatttaggattagggcttaatattatgtatgtgtatatgtatattggatatatttgtgtgttggaaaagtgaaggaatttaagtaaaatgttaggagttttgagctcactgagtgtatttaatttgaaatcactgatctttctttttttttcttcttttggttatgtgtttgtttcatgagaaaaaaagggctagaaaggtatagaaaatctagtttgggaacattttgttgctcaatatcatcattttgagaaaagaaaaggattttaactgagattcttgaatggaaggaatgaaaggattttcatgtttgtttgtagagaaaagtttttgttcagtgtaatattttgtatttggttatctcttattatactattttcatgtatattctgaataggattgtttttttttttttatcaggttcaatttctacattttcccaaggcaagagcttaacattgatggttcttcctcttatgaatatctcttccagacttcatcaattgatttcctggctaagtaccaatttgatttcaatgcttgcatacatgaaggtgaatttcttgttctaagccttagccctggttgggattttcgagctcagggttatgatcaatgctgctatcactttattataactgatataagttcattttttccctaatgcatcaaagttctatctttgagaaaattaactcccttgggtaatctcaggaatatcttatttatccagaagacaagaagtagatgcacagaaacgttttgatttggaatatgagggtgaatcaaaagaagttagagacatgccggtagttggtatggtaagcattctgttcagtgaccgaatgaagaacaaaattagtgaatggcgtgatcggctattacagtttcaaaatggggaatctcaatctcaagggagtcaaagttattccaaacaacaatttcaaactattttctttaagatgcgtccagctattagtgtgaatggattcacttctcatcagctaaggttgattcagctggtaatgttgtaactgttactctttgctttaacctataggattgtaatttttgagaaatcgtagcgattcatgcttgtattgaatgtgaattcattttgtgttgtttctgaaaaaactgaaggttattaaaaataacttcgaagatctttcgtatgttcgtgtaaaaggagaaaatgctgaatctcaacatctagttgtatatacagactcaaagcacgacagagatttgcttatggtaagcttttcaatattctctttctcgtttaagaaattatttggctcacctagttgtttgcatggcattctataatcaaagtattactaaatttaagaggcaaacacagatcgagtttgagatttttattctgtaagttttactgggttcaagtttcgactatcttgttctcttaaaaatttgaaccgaaatcattgattactagaagtgaaaagatccaaagtatactaataaggaagggatgtcggtatatgtatttgatgtgatcatatggagaataaaattaacaaggaaaatagtgatgatatgacatctccatccttattaattggaagtttctgtatcttaatttttcgcagaaagaagtaaaggatgagcatcggaaacaagcagagatgaagatccaagctgcaataggatttcgccatgttattgacttgctttcctcagaaaagaaattgattgttggtcacaattgcttcttgggtacattatataaaccacaactttctcttttgtttgtttggtataaaaattcattcgattaccatattttaatcccgacaaattatcttctttgttatacagatattgcacatgtccacaacaaatttgtcggtcctcttccgctggaagctgaagactttgttgcttctattcataagtacttccctcacattatcgacaccaaaatactactgaatactcatcctatactccaacaacgaatgaagaagtccaagacatcgttatcctcagcattcaccatgatatgcccacatattgctcttagtgtaagtagtgctgtagcatctgattcctatgttaaggtggaggctcaagtcgatgattcaaggtttgttcctactttcctttgtttacaataaacaagttcatagtacatatgattttagtcaagttcgccggcacatttgttgggacgcctaactctttatggagaggaggtagaaagaccaacattaaagaaaacaaaacaaaagaaaatactggaaaaacattacactagaaaatgttaaaatccttcttaaaatagtagcctgacaaatatatatataatatatcttaattattatggttctccttaataattatgactcattcctttagccaatttagctctcaagattgttcaagttagg

SEQ ID NO: 195383 - DNA, 3506 bp, Cannabis indica
atgtgtttaaattccattatttatctctcaaaaaaacttccattattttagagattcatgtttaggatgttaaaaaacatacatggtagtaaatctagatcctggtaaaataatccccaacactttggtcactgcgaggctaagtgactctagtcactgtgagaccgattgactttgagtcactcttgggcctagtgactttggttgttgcgaggcaaattaactttgtgccactcttggggccaagttaatctaagggttactctttggcctaataacttttgtaactgatgttgaccgagcgactctgagggtaactctttggccaagtgacttttcctactgtggtaagcaggtattcatttgagagagtattactcttcgagcagtttcaccctgttactttgtttcttcatccttttagtcagatgggagggagcttattgtacttggctgaagtcctttcacaagacatttgcagtcttaccccgttgggtagattcatgttgctttgagtgacatcttgggttcttgtttcgcaataggccatttacgctcccatcctttaggatgccatccgttgatgacatggagttctcctcatcaccatgtacagttgagatcccacactcttgcttgtgacctttgtacagaaagggcaaagtttaagtttttcctttgagaatggtgcttaatactttttacatgccggccacagtagtttccagcctttggttcttctagtggaaatcatttatgtcatctttaaataggaaagttttagatttttggctgacatagttagcttgcttctcctttccaaaatgttgttatgaggtacccaaatctcataatgttttgtggtggaggttgccttagtgaggatgggacctccttccttaatgtcatacctttaccttaggttgtgacggaggcagttcctctgtagtattgctcttccactaggatctcttcacaataattatctccttgacttgtttaagatccacaccagctcgcgcccaatccttctattttaggtcttataatgttcacactttctcctcctacttgaggtttgtcagtattatcaccttcttctctaacgacgagtggagggaggtctcgcccaaaagcgatcagctagtcaccgtcaaggcaaccctccacattttgaaggtgatgagagcatctaggcatttaacttggcttaagcttgttcttcctacaaacggtgccaaactgttgacaatgagctcgtcatttaacttgttggctgaaaaatcaaactatgcttcaaacttagattaaagacaaaaagaaagatgaaatatgaattcaaatttctatctcaaattggtgagaaaattataaactttctatttctttcatcaaggtcaagttacaagaatgattttccaaccccttctcacatctgagaaaggggtatttataggctctaatggcctgaggtacataatggtcttaagggggcagggtgtcgctttcatggtgtacgtcgcaggtgcaggaggtggccttacacctcgtacctttgtctggtgtcaggtggtcctcaattgtaggagtgtggtccccagatataggagtgtcgtccccggttgaaggagtgtggttgtagaatacccttagtcaggtcctcagaccttgtagatgcgttgtccccgctactcatacccctataatttcagagtttgtagaaggcgttattgcatcccttgtcctttgattcctccttcaatgtcattcttgtcgatatacattaaaatttcacattcactcctcttcacacaaacaacatactcaacactttgtaacgctttcacgctaacgggcttgcatgcacacacatgcacgcatggttgtaagtatgctcacagacgcacacacaagcacgcatgcatgcgagcccttgtctcacagccctccgcagcagcattgcactcgcacacgtgcacacatttgcatgcgagcccccattgtgccgtcttatagccttgcatcattgcacgtacacacacattcacgctcccattcgagcgagctgccatctcattgtcttccagcctcgcatgcgagcctttcacacggacgttaccatggctcgtacagatgctccgccacggctcgaattgatggttcaccacggcttgaacggatggttcaccacggctcacttggatgctctaccacatgcttaaaggctccacgactcacacaaatgtctcggctaaccgaaatgctccttggcttgtccaacagctcatgggctcgcacaatatctcatgggctcacacaatatctcatgggctcgcaaaatggctcatgggcttgcacaccgaattgtcccaattgagcagtcttagtattttgggcataactctcttgatatatgtcagaattggatgattcaaaatgcattggaaagataagactaatattatattatcatgtgctacaagtattgagtacttgcccactcatttcaatgaaatactcaggatactgtggaaaattttgtctttcatattcgagatttactaggtttgaattcttgataatactctgctctccgaaaggaacaaggattagagaattcgaacagaaggagtcgttattttctgctacaattttgtaagttttagttaaacttctatgtaatttaactgaattatttcaaggttccatatttaggatgttagattagtaataatcaacatgattatttgataaagttaaaattctggtaaaatatgtttactacaaaaaactgctacctttagtgacaactttttagccacaacataacttttttgtgactaaatgtgacttttagtcacaacaaaatgttacttgtgactaaaacatagtatttagttacaagttgtcactaatttagttttagtcacaacaagtattgtgactaaaaatacatttactcacaacaaattgtaatttttgtgactaatacttttatccacggaccttttagtcacaacataggaactacgatttataattagtgagaattttttcactttcaatcacaagttttgttgtgactaaaagtaagattttttgtagcggtttttccaaccgcaatagcatttgcaggaattaattcaatgatctaattcccaaaaacaattctttttttcttgaaaaagctaatctactgctaaatttaaaggtccatttgcataccgatagtttgatagatgtatcaatttcttttttttaggggatggtgcccattaagcagaaaggaaattcctcaaatcacaagggtcatcaccaatccagatttctacttcatctaaccctttagcccaggttgcaagtttgtgcgcgaacgtatttgctgtctggttaacatgggtgacataggctccagggatgagagaaaaagttgccctaatttgattgattatgtcgtcaaaaaacgaaaagatcttctctagagtgcgaaagagcatccgagatag

SEQ ID NO: 195384 - DNA, 597 bp, Cannabis indica
ataaaacccgattttgattgcttatttcaaccattaaaaatcatatctttcttttattttcagagcttcattggcaacaaaatgaccaaaaccacttttctcctttgtttcatcactctcttggcttcttcttctgctcttccctctgtatcaaagcaccacaaagttggtttttatgagttgaaaaagggtcatatctctgtcaatctcaccaactggggtgccacaattgtttctcttcatctccctgatagacatggtttgtcaatgttattttaatttttatggtttttgtcttctgggtatctgtaacttttgattctttgtcaagttcttataatttcttttgatggtgtttatgcttctgagtttataatttattattttttttttgcaggaaaattggatgatgtagttctggggtatgattcaattgatacttacaaggttagaaattaacattgttcttttcaaaggaacaaccttaattttcatgaacttactctgatttagcaatgtgaaatgttaaagataagcctgattgaataatacccttttggaaaaaaagagtaaatttttcaaacctacacaaatcta

SEQ ID NO: 195385 - DNA, 1093 bp, Cannabis indica
tcaaacttcaatataaattacatgttagattttaattaaacgacttactgaaatacagctgagttgttttaaagaaccacactagaaaagttaaacattattttattgaattttacccttcagctgtggatgatccatcttcttagttgcatccacgctgatgtaactacgatgaagcatcattcccaactaaaagcattcattaacttttattttttctaatgttagtcttttgtggttgagaggatggcctgcattaatttattttttaaaaaatatattttgtggtttatattgtcggtgttgttgttgttgatttttattggttttgttggttcatggtatttctaggtttctgaggttatgtttatatttttgagatggttttattttttattgtttcattttaattggttggatgtgtgtttatctatgcaatatattttgctttggaaaataataatatgttatcatgttttttttcgcacttacatgttttttggccctattttggaatggaaaatttcattttgggaagcagttacgtcgtattgcattgtaagccttgttacatctgtaactctctaaatatgaatatgttggtcccaacattgttactgtagtggttttactttatatatgttgttgaactaatctcaatctgtgtatagagctatagtaagtgggaggtggttttaaatatacgttcatgatatttttctgattaaactttccacctattgtggtattttttaacgttggaaacatcttgatgtgtttcttttttaatgaaattcattaaaaaaaggcttcgatattttatgataaaagtttcccccatcttggtatttttaacgttggaaacatctggatgtgtttcttttttaacgaaattcatgaaaaaaggctttgtttttttgggtaaagatcgagttcgtcaaataagacgattcattgttaagaaaagttgtttttttttggtttctatttgctttatatgtattttgtccctgtgatgtataaattcattttgggaagcagtttcaggttttgcataatgagctttgttacttctgtcccctccctcctctct

SEQ ID NO: 195386 - DNA, 1368 bp, Cannabis indica
tcataaaaaaaaatagactaaatttttttttgaataccgaaatagataaggagatctaccagaacgatccgagtctactacagaaatttccaaattactaacctttgttgtttgagaacaagaaaataggctttttatccaaccaaaccagcttctcttctttgccattgaatttagttccacacttcaaacaccattctcttgcttcaattcaatttctgcaataaatatgagaaagagattaagaaattattagaggaggaaatattatcttaataatgattttttcattaatcaaaacaaaatgcccatatcagaattaatgctcacacagctgaaattattattatatataaaaaaaaaaaaaaacaaaactcatatcttgaacttattcagatattaaatccaaaacttacagcaattaagagaatatgaattagtactttaaattaaagcaaggttagtacaaagagaaaatgttgataaaataaaacccattattattgttatcatattaaagaacctcatattaaaattaatgctcaaacatctgcatttattattatataaatatataaaaaaaaaaaaaaaaaacattaaaataaacataaaatttccaagtcatcttgacaataagaaaattttcaaaagaaagaatctaattaaatccaaaacttaaagacaattcagagaatatatatgaacttattttgatccaacaattcagactaatttatcttaataatgattttttttctcttaaacaaaaagcccatatcaaaataaacattatcataaaacattcaattacccaaaaagaacttattcaatgtcaagaaatataaaacatgcagatattaaaaaaaaacatcataaattagtactttagaaaccaaactaaaagattctctgttacacaaaccaaactgaaagcaaaagaaaatgataataaaaatccaaaacttacaacaattcagaggaaatgttctttctttcttctctatacccttttgatatttcttcaaagttccaactgtcaaactcataactgtcacaaacaataagttcaaatgtctggtttttttcagatgattttactgatatgacctttgtgacatgtctacaaaggagaagaatgaggttgattttgcttacacttggcttgcctcttcaatctcatcataataattttcaattttcaatcaaaatatttatataaatataattttgtagaaaagggtccatttttggttcccaccatgaggaaagactttaatcaatttccataattattatgaggaaggaatacttgtacattttattgtttcttaaatatatatatgtatggcagggtctctcttatagcgt

SEQ ID NO: 195387 - DNA, 1226 bp, Cannabis indica
tggatgagactaagtatgggtttgggacttgttatgagatcgagtgtgagagtgttgatcctgaaggggcgaagaaggttctcgaggagttcttgaaggagaatgggatagagtattcctactcagaggcttccaaatttgcaatttttcgatcggggaaactacctagcctaccatagtaagtggattctgtagaatatttgacaaaacctgtttgattttatgttcattacttgtttggtttcatatacaaatacttccattgaagtaaaaaaaaaaaaaaccattttgttggattgattgattgaatccattttatgcaaaatagttgtttaactatttattttttctgttgcatattctatataatggaaaaatttgaagcctataacaaaagctactgagatctattatcacacagttgaataatgctttcataatgatgagcatatagtttcagttgatgatgttactattttcttccttctgtcttagattacagtttagcgtcctctgaaccattctagttagaccattgttcattgctgactttgtctcttgagcttataagttattagacattaggacagggcaaagatataaatgtgtagtgcgttcatatatgaagctccattttgtcaacaattactcttgtctctttcccccacgaactgccatttttgtaaaatcttctgaagattgttacacttttgttaaggtaaccagtaaatactgcagaaaagtcacaccgtgtaacttgcgttgttcattggttatgctatcattgagcttggaatcaatatccttgttcttgctgccaaattctgatataattgtttggggctcatgtctaagattatttatacaatgatacttcatttttcagataattgagattgaaggtgactggggggacagttggggtcgaaataagaaatgccgctgatagagtaggagagtgttggaaggccattagtccatgtccccttttccaactccagtattttcttatcctgatttctcttaaaaagaaccaatcatcctggtactctttaaaattaagtagcagatttttatctacctgaggaatttggatcatttgtggaacttgcacaattctggtaaataactggcaaatttacattattttatctgttgccatgcttgtttaattttgagcaccacaagttagaagattttcccacttcccatgaaattttgaaagt

SEQ ID NO: 195388 - DNA, 1275 bp, Cannabis indica
gtttttactttacactataataataaaataagtaaaaaaagaaatactttaaaaaataaataataaaaaatagaaaaaaaaaaaaaaaataatttatgtaaatatttctatcaaattatactaataattatgcaatgcattagtcttttatgtaagatggctttacaatacaatacccaaaatatatataaaaatattaaataccattaatgatacaattactatctagttggactagattggatgtgttaacagaaagagaggaaactacaacactcaactgaactcctcatgatcaccttggcaattctcttctgattttgaaccagaattattagaacaagtaccaacattcaactctcctaatttttccacacattcagtttctacaatctcattcataccaaattcaattatgtgattgttgtcaccaccaccaacatcttcaattctctcatgactcatctcaccaccactatctccatccccaatatcaatccttatattattagtgtcactaaaacgactgctactctctgtcgtttggctcaaatcatctcctttacgagaatcagctccagttcgacaaatgggacaaaacggtgtacggagaagccacgtgtcaacacactcggcatggaagctgtggttacacgtcggtaataaacgacacttgtcacccatctggaaactctctaagcaaaccgaacattccacgtcatcatccacatcatcatcatcctcacttgtagttttatagtgaaaacttggaagcttttcgaggtcgtctttggacatgcttgtgttgtcggcggtggtggtgagggtggcgccgcctctctccggcaccagaacgttttctaaacctctcctgaaagcccttcctacgatgcacacgtggacaaagatcaacatagctattccgaaaaataagagtatgattgatattactattgccattaccataatctttccaactgccatacttggttcatcatcataattatgatcaaaactctaatctcaccattataaaattaaattaatgatctttttctctcatttaacataacccagatcaccaaaacgagagaaaggggattataaggtggttttctctactatatatatttatataataatcttttattatgtataaagacaaggaagaagaagttgagcattattagtgaggacaaaataaatagctagttgatgacttaaaataattaaagaaattactgtatatagacataaaaagacataaatatatat

SEQ ID NO: 195389 - DNA, 1073 bp, Cannabis indica
tactgtatttttataaaacaataccgaaaaaatagaaaaattaaaaacaactaaaaaacaattgtagaacaacaataaaaatttaacacagtaaaaattctaccccacagtaaaaatgtaaaaaaaaattggaattttcaatatgtggtgtaaatatttctttttatatccaatgcatgttttgtggattcagttaacaataacatatgttatataaaagtaatttttatacatagatatactcctcttgaaattatctagttggcaagattttcttaatcatgtcacttattcaaaggagttttggaaaatgccctttttcattgatgatgcatacattacccacaattttctgtttggctactcagccgtcgcaccctccattcataacaaataaaataataataataataaatctaatattgaactaattataataatcatataattattatatgccctttcccattttacatattaacttccaaacttaaccataaagataatacttgaaaatgaaattataacttataacattgacaaggaaacaccaactacacaaacataataatacattgtaacaaattaaacccacatatacacatacttaattagtcaaatagctagctactagctagaattatttgcaacaaagataagcttttttaatagatattcacccacacaataatgtctatggatatttattattcaacttattactctttcctcaaggtttagtactaggaacagtattagaactttctcggttgaatgccctagcaacatctggccaagttaggtcaggaaatgagggaggatcattgctccatggattctttggggccaatatgatatctacatatcttggtacagaaccaggagtactgtttggcaactttggagatccaccactccttgatggatcattatatgttggatctcttggatcttcattactatttggtgtgaaatgcttagttacagcacttggtacagaaccaggagtatttggcttgtatagtgtgaaatattgcgatacagaaccaggagtctttggcagctttggagat

SEQ ID NO: 195390 - DNA, 831 bp, Cannabis indica
aaaaaaaaaaaactaaaaacaggtttcgaaaatcaaaactcaaaaatccaaaatcaaatcaaagctctcaactcagcttcgaacaccaaactctctctctcttcttctccattcaaatttgtgattttttctagagagagagagaaatctcagtagaatttgtgattcaaatcctcaaatttcactctatttgcaaaaaagcccctttttttagggtctgaatccccaatttggggaaatcgccgccgtatctcggccgttgccgccgttaccgttaaccatgatcgttagaacttacggccgtcgaaatcgaggcatttccagaacctattcagacggattaaacgacgccgttaacgacgaagaaggagaagaagaccctttcagttttagggattctttgtctcaatctcaagaaggagaagaaaacccttctcttcttcgttctcaatctcaggaagatcatctctttagtggtgttggtggtggtagtatacccttttcttcgcaggattcttggtctgcttctgctttcgatttcgatttcgattcgtctcagggtaatggaaaacctaagagggttagggttgagaagaaggaattaattgaggagactcaggagaagagttttcggccttgtattccggcggcgacttcgactttgatggaggctcaggagtttggggagatgatggaacatgttgatgaggttaattttgctcttgatgggcttaggaagaatcaacctgtgaggattaggagggcgagtttgatgtctttgttgtctatttgtggtacggcttatcagagaaggcttctgagaactcaagg

SEQ ID NO: 195391 - DNA, 1931 bp, Cannabis indica
aggatgaagaagatttaactaatgaactgacacgtcatgatgtcatcaaatgtatacagtcagaaagagttagatttcggggtgttaaactttctggccttgatctttcaaaactggtaacttttcataaccttgtactttcaagttgcaaaaacagttttagtgaaaaataatgagtcttgctgtagaatttcacatttttggttagccaggatatgatttctatagcaatctttcttcattggagctaacacttttgtttatcaagtttcactgtatatattttcatgaattgtaggatttgtcttatgtggacttcagccatgcttgtcttagaaatgtattcttctcgcgtgcaaacctacaaagtgccaagtttcgggtaggtgttgtataggttactcttcttccatacctttctaccttggtctgattttgtttgtttactgagttttgttttgtgttttgggctaatatttgattctgtcttaggatgtggatgctgagggtgccatctttcataatgcaactttgcaagagtaagacagttaaagagctactctctttcatttaacaacaacaaaaaaaacttataaatgatcttattttgtcttgaaaagatgtgaatttacaggggccaatctgcgcggagctttattagctggtgctaatcttaggagtgcaaacctacaaggcaaaaaactttctactcataaatattgagtaattgtcattagaatagtttagaaaattccttaggttgttatcatttatttgattatagctgttatgaattatgatgtcatggggatataaatactcatattagttaatgtaagggagattcaatatattaagtttcaaaaactctagagtgttttctctcatttcttgtttatttggccatgaatttggattaattttatcttctatttgacatttttttatcagttttccaagttgaatatttttcctttcctttccttttattttaaatgcatagtatatctaatatggtagatttttctttcgcagatgcttgtttaatcgatagtagtttctgccaggccgaccttcgttctgcacacttacaggtataggattttaaactacttgagctcaccatccacaaactcaatcacccaactacttctcctttttggtttttcctatctcaactctatattgataaatgtaagatatttttaatagtagagttttccccaagtgtgtttttaaaagtgtagtttataagaaagcataaagacatgaagaagatggccttaaaagcaagcaaaatatttgatgtcttctttttgattttaaatttttattatatttttttacattctcagaatgcagatcttactaatgccaatttagaaggagctatactagaaggagccaacttgaaggtaagcataatagctttcagcttatgtgcattcaaaacatatataaaagacaatttcatacacaagaaatgctttagaaaatgtgttatattttgaaacctcttaatataagtagagaaatgttgacaccagcagtgtccaacactaaagtgtcatactgttactgggtgtaattgaataccggaccttatagaacactactacctgtaatgtgttgcctggaccaccggtgcctaatatcaatgcttttataggattgggcaatcgaagaatgaaactcaaattctaataaatagaactgattctggctgatgtactgttatgtttaggggtgaggcactgtttaatgaactctataccgaatgttacaaatatcaactgtattttcgctctcttttttttaatatttttttgggaaaattctcctttttttccttcaaataattgttagaattgatctgtttcagggggcgaagttgaataatcaaatttgaggggtgcaaaccttcagcgagc

SEQ ID NO: 195392 - DNA, 616 bp, Cannabis indica
atttgaatccaatccactaaattgaaacttccatgacacattgtacttacgagaatattaagcttgccattaaaaactgaagccacttcgtgtatcaacttctccctttgggttttcacagaagcatcacaaactgacccagataccgaaaatcccttgctctcccattccttcaaacacttggcgagctccgctccattccgagaacacgtgtgaaccgccgcaccaaaaccagctagttcctccacaacggcacgcctgaactcggaaagagataaaacaaaacaaacttaatcgaacaaaaggctaacttctgtgtttttttttcttttaaagtttcatcaagattaggaaatggcatgccatggaagcgttcaagaaaattaataggaatcagaggaaataaggtacccgattccgcgagtgccaccagttacaagtgcgttggctcccttgagagaccatcttgaggtcctgaggctacatcctgattctgcctcagccattatcactattttactttttcttataaacccttcaccaaagactcgtttatacccttaaggagtttttctcacctaaaattataaatacactttataattaaaaaacatat

SEQ ID NO: 195393 - DNA, 4439 bp, Cannabis indica
tgtttcgtttggtataatcataactataataaaattactattacaattctattgttgttttaaaaatttggtaatgattcataatataatcattgttacctcatttatgctagatcatttatatgtgttgcaaaaataacacataatatgtgtcgttttataaatgatattcaagtaagtaagaattgttcctacgaaaattgtatttaagtgccaatcatttaaatttttaatttaatatgatgatcgaaaaaggaatttgtaaaactaataaaattaaaataaaattaacaaataggcagagataatgaatgacaacaaattaaattaaagggaatttaattttcattgcatcaactttctatggcaataatataatttaatttatcttttcaacttttttttaatcaatcaatcgtgaaattcattactccaaataatagattacaacctattaggcctttcaaaaggagacctgaatattaatctatacatttcctttgtaatctttcacaaacacctatattagttacaaattatttctataatctgaaaaaccaatctccatccgtcggctgcactttctttggccaagtgcagtgtattcagttcttcacagccatcttgatcaagtttgctacttgttctggtgtttgctgtcctgaatttcataatacatcattcaggttcttccacaaatggtacaaaagagcagttactgaagctgtgtacacagcttttttaaacttggtgacttttgttctttccagccaccttatcaatctcataagatttgaagtttcaacattcgatcccagccatattttcacaaggaaagacaaagagaagagaaaggacaagagaagaaaagatattcagaagtttcagttttgttcttgcaaagcaaacagaaatcttcatcaataatcttaaatctgtgtaatctatctcttgttctaagcctatcctgtatagctatccataaacaaaagctatgtctagatatattcaatctattccatacctcatggctcttatctttcaattttatgtgataagagattaaaaatcaatctatatccttattaaaatataaaacatattgaatttttttacacttttgtggtaaattactcatataatttgcattaaataaataaataaattttaaaagctacacaagtcacacaaatatttttattttgtatcgaaacgtatgtttgtttcacatactagcataaataaataattttttgaatgaaatatcaatttcattgaataaattagcattctgaatacaaaagatataaaagttcaccagaaatagaaatatcaaaaatgctacaattagattggtaccgagaatgtctagcaacataatgtgctgctcggtttgttgatcgtctaatgaaaattagattaacatttggaaggatagataaaaaaaaagttggcaatctttgattaaaaggccgaaagtggacttcatgacttggttgcttcgaataacttgtacggaaacaagactgtccgtctaaatttgaacatgttgccaattattggtctttatccaactgagagcttctttaatccccatggctataatgacttcagctgcatatcttccaccatagcaaccagcctgtgctgcaacaaggtgaccaagatgatttcgggcaacaattccgaaaccatacttatagtctctatcaaagagtgcatgaacaaataattagtgatcaaacaattacaagcattaagcacatataaaaatagattcacatccttggccttccattaagctccacaaatgaagatgattgctggtcctggattggtgaaacaaatggtctcttcactgttagcagtgcctacaagatgccacaacaaaataaagaaccccaacctgctgccaacaattttgggtttttgggtaaaaacttatggcagctaaagatacctcctaaagtgaagaatatgttgtggtgaactttgactaattgtcttcctacttgcctcaacttagttaccaaacatgtgaatatatccatactctgttctatgtgcctttctcaacctgaaaatacaacacatgctctcttagaatgcactcttgcaggctgagtgttggaatcagcttggcattccccgtccaaacccaacaaccacttttgcctcttggttagaacatgtcttctccacaatacctattgaagatgtgtgcacaattgcaatggtctcttggtcactgtggaaagcccggaataaaaaagtctggaaaaaataaaccccgttggtgaatgatgttatggtatcggcaactatttctcttgatcactggaaaaaagctcaggatatttcttccctatcatctatattacttgataatataggtaatcatgatgagctttgggcaaaatcggatttggaaaaccatcaagattaatgttgacgccgcctcatttgaacaagaaaattcttacgggcttggaatggtggctcgtgaccatcatgcttctccaatccatattcatgccgtgtatcattgtggtcatttcccagctgaaactatcgaagcaatgggcattaaagaagcactaagttggatcaaaaagaagagttagaaagatgttacaatagagagtgacatcatgctcgccgttcaaaccattcattctactcagcctatgtcttctctgtttggtatagttgttaatgattgtaaaaatttattatcctctctttcaaatattcatttacgttttgttagacgatcaacaaatcgagctgcccactttgtaactaggcacgctcgatctttatctagtcatagcattcttggaacttctattactcctgaactccaaactattttgtattgagaatgttaaattaatgaaattgatatttcttgtaaacaaaaaaaaaaatagattcacatacgaaattgaagaaaattagaattacattaaaccatatacaagtctcgaacaatatctattaaaaatcctacaattaagtttagctcataatcattatctgtaacataaaagttaatctaattaataacataaaataaaagagagaagaaaagaatttttggaagatcaattggagaagctccgtaatgtgcttttgctgtcaaaaatcgcatcccaaaaagttatggcttccgatttcaaaattaggtttaaaaatctcttttttttttttttttctttcaatagggaagcgggtggtggcatggctttctcaacgccgctgcccatgtcactttctggactgaggtgactcgcttgagccgcaacatgacttcctcaattgcgcgacccgcgcccaagacaaaaactcaaacttttttacattttgggcaatgacatatggcttttaccacgccatggctctaccttgagtctttcaaaatacttcctttctagttttgagcttctaccaagtcttgtcaaaaccttgaacattctgttttaagcgcacctacatccaaattaacattttttttttatcagtttgcaacaaattattgtcactggctctaaatcttctttattcacaaaatctgaaagcataaacaaattaaagacgtaaaaataaactaaataaaataaaattaattaaaaaaacctaaaaacatgccaaatataatgtaaaataacacctcacaatataaataaatattacaacattttacttatgtaattatcattacactatttatataaaattaaatcttcattttatcatccttatataacatttctttaccaaaaaaaataatattgagatacttttatcaataaaccaatatacaccattctaaaaagtaaatcaaacatcccattactattaatattactacaatctattatcattactattatgttaaaccaaaccccaacttaaaattaatgtttaaggtctaaatatttaaatgtattaagaatgaatactacagaagaaaaaaaaattcattattattagaataattaacattttggtctcttgaattttggactttatttgattttgcctcttaaaatatacagtttgttaaaaattccccttaaaatataacagttacataattatgccccttatgttaggtttcattttttacctttaaaagtcagcatttttacccttgaactttgactaatacaaaattttgtccccttttattaaaaaaaaaaattaaattataatactctattaattcaaaaaaattaataaaattattaaaaatatgattaaaatattaaattaattgacaaatattaaatttacttaaaaattctaaattattcataaaaaaaaaaattttaaaacttaattttattttataaacacgtatctttaaaattcaaatcaaaattattataaatgcaatagataatttaaacaaactaagtgtttttaagaaaaaa

SEQ ID NO: 195394 - DNA, 1719 bp, Cannabis indica
atacataattacatgcttcgtaaattaggtgaacatttacttttttctagatgtttaatagttgttttacaaaacatttaccatctaaattactattggacttgtattattagcgatctatgacattttagttgtttccagttgtttaatagtttctttatacttgtattgtcaaaattataggaaacgaaatcaatttcatttctactacagttcaatggacggtttgattaaggaataaattatgttaattaagaagaaaataaatccatgagtcataggacacatgaaaaaacaagaagataataactccatgttcttgttcatagcactaaaatagaataagtgcagataaatcatcgttgttgatgaaattttcctaaaagctacatttggaggcacattgttctcaaccagcacataagatgcaaatggctacagattcctcttatcattctctattgtagatttagaaaattataatacatggagttggtttttggtaaaattagggtgaaatatatggggtcagagaaaaacaatgcttgatctcagacataaatttccaagaaacaaaagaattgagtagcacgaaatattaccatcacatcctttttattttttttttcttaatgttgtcaataacactgtaaatgcaagtagagtagcacttggacttaaaataatcagaaagatggaacttgtattctcaatcctgcaatgataaaaaaacaaaaataaacatgataatgattacacaaatagttttaaaactacccagaaactatactaaaattaataaaaagttattcacgcagtacacctaattcataaccagtaggtaaactatattacaaccatacataaaaatcatatgccaaacacccaaaacaaaaaaaatctaacatacactacacataataatcttccaaaaagcaacaacaaaatcaacaagcaagaacgactaaacataaaatatggaactattagaaacattttaataaacaacaccatactaaacaatcgccaaagaagtaacgattaaaataaaaaaaaaaaaaaaaaaaaataagtacaaacactcattacaaataaaatctaaaatatataaaaattaaaaaacaacttaaatctaacaatactctaaatcaataaacctacactaataaaataacaaaataaataaaatatatgaaatcctaaaactaaaatcacatataaaaacacttaaaaaaaaagagacaaaatacataaactagagcaaaacgaaaaagaagctataatgaaacctcaggcaatttatcgacatgtttcttctccttttaactttctgatgtagtactcttatcaacttcattcctattcgatttcttcttcataggacaaccttcatgttttgttactggttcaacaaaatcttcattaaaatcatcatcttccacaatggcccatttttccctttgcacttttttggtccaccgatttcacactcattactagagctttagaaatttagtaatgagtttcttcaaaaagagttttttcacgacaggagatggagaagacggtgaaaacataatagctatttatataagaatttataaaaaaaaaattgaaaagaaattgttggatggttgagaaatgaagcaaggattgaagctaggaatcatagggaatttttttggcgagaaatagattttgattgtggtttcaaaatga

SEQ ID NO: 195395 - DNA, 748 bp, Cannabis indica
tatatatatataaatacatacttatattacatattacatggacaaacacaagagatatccccaaataatgttccttcaacatgtcaaatttgttgaacagctttttgctcaagacaaatacaacacacatttcatgatcgatatacatatgcccccaataaattaaagactagggatgtttcatgggtatacgtagtacatacgtaagtacgtatatatatttgtgtacatctcgatctcattataataaaataccatcactattttattattatgacattatcattataatcatttcattctaattaagtcaattaactgtgtaaaaagtaataaactttttcttctgttagataatttttaacaaataaataatttacttatttttttaaccttacactgttgactgctgtactatctagcacaagaaacatcgcttttttctgctgtgttgaagtatcatgtctacaaaatatctatttgcatcaacatagaaaatcagaggaagtgttctatcagaaagtgacatttctctatataagtttgcaaaacacccacatatatgtggcaccagaataaaaatgtgggatactatatatgtataagataaataaaccaaccaatttacaggggataccatataaaatattgtctatttttaatgcactatataattcattggatatcttctaataatgatattttgttgtgactaaaagtgtttctagtcacagtatttgttgtgact

SEQ ID NO: 195396 - DNA, 2090 bp, Cannabis indica
acactaggtaagtcatcatctgctgactctgaaggccctgttccattagatgccgcattacttggggaggaggaatgctgcagaaggctttcaaatcattagcatttacaaaatataaaccaaagaatgaatgaaacatcgtcataccaaaatgagaaagagagaaggaaagccacatcaatgcatgtacaagcaatcttgtttttacgtcatcacaatgaagaatacaatacataccacatacaaacaatatttgatgaaaatctcagctttgatatgtaattttacaacacatacgaaaaacaccaatctgatgagacatttgatgctaaattttgtaatatatattacctttctgacaatggtcaattttggatttagtactgctagaccacctggtggaagcctaggtgcaccagtgacaaactggcagaaggcccgctgctgttcaggtgtgaactctcccataatctcaagcaactaaaataataaaacaggcctcagcatcagcatcatcaaaaagttaaatgcttaactagcaaagccacaactgtggagctataaaacttacattcacaattgcaggactcttggcagtgtaaccatgatcgaactttaggtgatcagaaagtgtttcagcctgcatattttaaaaccatgaacttgaactattagtacttttgtatagtgatgataagtgatggtaatgaagttaccgattccaaaggcatttacctcccacatctctctacgcccacaaagtagatggtccaactcatatggtgtgaatatttgtaaagatgagatgtcaaatacctgattgttatgaagagtatataatttacttgaaagtagaaagtaacatttcatagagaaacagatgatataaacagtgtaaagtaaaaatgaactgtcacaacatagtgtaaacctgattgtggcttaaaatatacaataacgaagaaagcaacatcatagagagaagcagatgatacagtgtgaaccaaaaatgaaatatgtcacatgtctgggagattgtggctaagagtataaaatacacaataacgaagaaagcaacatcatagagagaagcagatgatacaaacagtatgaaccaaaaatgaactatgtcacatgtctgggacagctacctatcagattgacaaattcaggatcatctttaaaacttcatgcacataaaggcacatgtacatatcgacaaattcaggatcatctttgaaacttcatgcaaataaaggcacatgtacctaaagcctacagattcatattgatcactacaaaaactctgccactgcacttatcctttagcttattaattaaaattcactcttaatcaaaataacaagtcccatgacccacttctctgataataaacttccaccaaaaccaagaaggatcacaaatgtacccaaaatcacctaaccactatcgaataaagtgccaatagttggtcccaatcaaattgaaaaggagaataatgatgcatatgaaatgacaatcatgttgttaattagatccaaatagatgtaaacatgtcatgtgcaatacaaactcgcaattgttatttaaaccagcaactttatttacctgattgaaaccagccctaaatgcttccaattgccgcacaattccagtcttgaccgttgcatcaacaaccaaggatatgtactcttccaagttggtaatatcaacctgagaacattacaaccgtttaaacagtattcacagcaaatttaaagtttttaaaaataaaatcaaaacgtattttcatacattttcatctcctcctttcagcaaataatctggaaagccaggaagtgtgaaatctaagcagagatcttcaattggagccccacggaaacgtaaatcggcaaatgcactgccactgacaccatttgattctaaatattgctttgcgacagacaaggacatgcagttcttgcaaagtcctccccagctcggcatcaaggaaatatatcgtgcaaatcaagatcctgaaatatgtttaaaaaaaattacagtgaaaaaatcagtaaaaatctaacacaaaaaaagaaaaaaaaattaaa

SEQ ID NO: 195397 - DNA, 2653 bp, Cannabis indica
agaaattggcaatgttttttgataaggaagtaatccagggtattttttctgttcctcttgctgatatttattagatgatactcttgtttgggagcatcattcttcgggtttgtttactgttaattcagcctatcatttggccaaatcagctacttctttaccttcctcttctagcagtaattctctggtcaggtggtggaagactatttggaatttaaaaatacctcctaaaatgaagcattttatctggagggcctttcaccatagtcttcctacagctctcaatctttcccataagaaaatcttgccatcccctctttgttctctctgctctaagggtcctgaatctgttactcatgcactagtagagtgtttcagagcttcgagagagtggaaagattcaaggtttaaagatttctaccgagttgctaggacttgtgatattagggagtatctgttaagaggtttccatgatttgtctaaagctaatttgagagttttcattggaattttgtgggaaatttggaatcgtcgaaatattactttatttaacaaaagaaggattccttctcttctactgaatttcaggttgaaggtatgcttcaagattacgatgaggctcaaattttcaataatcaaagctcatttgaagactctcaagaaggttcttgtaacaatttcatcccagttgctcctaaggagggttcttttaagcttcttgttgatgctgcaatcagtactcagttgcagaaagttggaattggggcttcagtttttgataataaaggtgatattgttgccactatgtcttcgccatgtgatggagatctttcccctttattagctgaagcgaaggcactactttgggcgctcagatggtgtatagctattgagtttcttttggatcgagttgaaactgacagccagcttcttgtgagaaaggtgaggcatcgttggaaggacaagtctcctttgtttgatttggtgaaccaaatcaaggcctgtctctcttcttttccttctgcagtggtttcctatgttccaagaatttacaatattgtatctcataatttggccaaagctgcattaaggcatgagagagaggtgctttggaacggaaagagtccaaggtcgattggaatatattgtaatttgtactctctttgtatctgtagttgcaatatatttttcttcaaaaaaaaaaaatttgctaaaatgcaaagttagcatcactgattcactataaatgtactactttttatatatttttatgttatttttattattttattaatatatttagctatgatattaagtgatggactatttatataattttttattattttacataataaaaattaataataaaattatgtttatatatatatttttaataaaaatattaattaaatattaaattttgtaccaaatttctttgtgcattaagtccaatactgaaaattaattaaaatatataataaagtttttttatgctaaatataatacaatttacatggtctaaaaataaagaagccataaatttgcttaacagttgaagtttaaaggctgtggtgacactatggtattgaaggtggggcatgcaaaattggcctaattctgacctagcaaattatagtatctatcattgcaaatcaaacatctcttgaaaaaaagaaaaagaaaaatctcatgatatgatttaaagggtatgctcagcagttttgaacaattggttggagtatcgaccagtactcccatttaaataaaggtagcaaatcaatttgtaggtcttactccatttaaaaggtacattttctccaatgttttctttcacgtcttctccaatggtatcattatttcatgttttgttttatccttcaagttgattgtgaaaaaaattgatactcatacatacgtactaaaagagaatgagaatcacatctattctaatgattttaatttacttgtttactattatttattagttagtaatgagataattttgtccaacctacttaaaatggaatgacatttgatactttttatttcttacttttcaattattagaaaataaaaaaagaaaaaattactccttttttttacacataaaataataaaacaattttattaaatcaactcatccaaagttatggatgcaatagctagaggtaaagaatctccactattaatacaatcatccttaataagagaagctcgcgctaaaaaatgtgcaaccttatattagcagacttctacaaaatgtaaagataaagaacacgacattaaagccttacaatctaaaataacacgaccataagaagaagccacgtgtttacacttattcaaatcattaacatttggctggctcttagatttaattcaacttaaaacttcctacttagcaatggcttcaacgaacatgtgactgcatttacttttaataatctatctgatcatataatgaaataaaaataatattacattttctaggatgggcaatttaataaatagatcattcttatactacctccttatattatgattgaacaaaataaaataatttttttttttttttgcctactttaagtataaaaaataaaatgatttggatttcttttttattatatttattatatatatatatataatt

SEQ ID NO: 195398 - DNA, 1313 bp, Cannabis indica
aattttggactctaatcatgatcatcataataataatctgattaagcaaaagagagattcactcaaacttcctctttgaataatacatatttaagaaaagtactatgtatatatataacatgtaaaatatgttctctagctaattaaaaaaatggagaaaatagtataataaatatataatgtaaattggcaataataattggatatatgtgtgtgcctatgaatgggttattttcttcttttaaatatctaataattaagaactaatgtttgtaggttgaacatttatcaattggatcgtccaacgccactgccttggtaaatgagaccggaaccaagcaaagctctctacttcgcaaatctagccatcttttcccacttccctgttcataattctattgtcaaaaaaaaggtgagcataataaactacatataaaataaaaatatatacatattataaagctagtcaatttatatatatgaataaatatgtatatagtaaaacgtgtttggcccaatgtctatacctgtgattgagagactcttatactctcgcatgggctactcatcatcctataaaggttctgcatgaagcaaaaacaaagcatataaataatgaataacatatttatatatgtatatatgtaggtgtgtatattatgcaagtatattcatagagtaatataaatatgtacctgaatttgctcttgaataagcttgatataaagggaagcctcttgaagaactgaggcagtgtcagtctacaatattaattcaatttagtttcaatatttaaatttatttatcttctcataaatatatatattatgattttcaacaaagattcaaattagtaaacatgaaaaaaattttacacaaataccttgccatagggggaaaccagcttttgaagggcagtgattttgtcactgagcttttggctcctctttgtaggcatccccaactgtaaattaaatattgcaaaatcccatttagtgctctgtttcaaatggccatatgtataaataattgttttttttttttatgtctcattctccaagcttattaagcttgataaaggattatcacataaatcatattattattaatattaactcaccttgtgctcttgcattgcttcttggtcatttcttgtcactttgtttcttttatttcttttgtcactatgcaactcccatctgttacttctgggaaagtgtatggcattatcttcagttggacgtttccttctcctttcaatagtatgaaaatccttcaaaaaaaaaattagggatgccattcattcattggct

SEQ ID NO: 195399 - DNA, 1256 bp, Cannabis indica
gacacataataacactatagaatagatacatgctactgatccatttatatactataaattgttgtcaaccttaatttatgaatattaattatttggtcgagaaagaagcgtggactataagtatatgcattaatatgtatcaccacacttattccttttaaaaaaatattataatcaatacaatcatcattgggcgggcggaacgtatatatataggtgttatatgtatatgcacgtatactatatatgctttatttagaattcgaaagaattgtatatttcattttcaactatataattaattgaatacatatatgctctttatttagggctttctaccatgcttttttagtctttttaagccacacgtaaaaaaataaatcttggtgtgagttattttgctatatatattatatatagtatatacgtacaaaacaaaaataatatgtgtatggtaacgtatatatgataaagagctgtgaaaatccagaaaagcttccgttaaatataaatatatatatatatatatatataatttgcatgcattaataataaaaaagtaaaatgattggatattatttaacaatttgtgtggttttgatgatcactctatcctcgtgaaactaataattccaatctcttatatattattattgtaacttccataaagcaaatatgtacgtctttcttcctcctttaatttcatttatttaaatattttcttctttccttaaaaccaaaaattaatacctacgtacctaaaattcatggactcgcatattcataaataaagccatatatatttttataaaagaaatgccacctaagcctaaattaaattataattttttaaaatatcaaaaatataaatatataaatataattttgtttaaatattattactacaatatataatgaggaatttgagtctcattatactacatagaaaaaacatttattattaggtacgtataagtacttatttattatttcagttaagtaataaaatcgaattcgacctgtttttaattgtgacttatatcagtaatatatgatttatatgatttggaataatctacatgaatgaattgtggtatatacatatatattgatttgcccactaaattaaattagttggtagagttggaatttttaattatttttagattataaataaatttttattactagtcaaccatgactaaattagatttttaatttattattcatctctctaaaagctatatataggtgga

SEQ ID NO: 195400 - DNA, 1916 bp, Cannabis indica
ttatttaatttttttctttaaatttaaaaaactttattaaatttaaaaattagtagtaaaaatattataatttttgaaatttattatactataagtttttcaaaaattttgaatactattaaattaaataataattacttaaattgattacgaaagaaaaacaataagacaataaattatatattatttttaaattacatgaaaatttatataaatattttaaaaaattaatatttatattaaattagtgattaaattaatgtttaagataaataattttatattattcaagtatttttattttactattttaattatttattaaataaaaaatatgataaaatattttattatatatttatgatatatacttaattatataggatatattattttattttataatatagttattatttatttttattttgttgctgcgaattattcatttttatttatttattattatatattttaattttaatttattattattttaatttaagtatttttttttctaaaaagaaataaataaaatagactagtctattcttaaaccaaacataggattactttcaacataatccaatcattttcagtcaaatccaatctaatcctgcataccaaacgggcccagagaataaattttaaaaaatatcgctaactaactgtgaagcaccatctataaatactattagactactaccaaataccaatactcaataactatgtgtaagcgataggttaccaccattcacgattagttccataatgaatgaactccaaaatgtgtcgtcccattctcacgaatattaatgcagataggtctatttgtcgtagttttcaacgaaaatttaaatcatgcgaagaaactaatttacatatataaatcgaccctcatcttagtatgcctttttccacacgactttgaattttgacaataccattctctccattgcttaaattttatttatctcttaaatgagatgaaattttattgcagcccaaacaaaaggattacaaagatgtcactaatgtgagaggaaatggagaaaattttgttgtatttgttaaaaattattggggtaataatattatatatataaaatgtgtgttagtcattaaataaataacttaaatttacgtagtttattttttaataaagttcatgacttaagagtataattatcatgattataatatgtgtatactataaagataatttttaatttgataagaacttaaattgtaaatagttaaaaatagattaattactgttttttcagttataaataaataagtattggtttctatttttttacatcgcttcacatattgtatctttattcttgaatcccaatcccaatcatcaagaaactcaagttcttaagagaaaattttgatacaaaaattagaagattattccattcaaaattgattttatagatttcggtacgcttccgctaatctataattctattatttaattctcatgaactaattaaagttaaattcaaatttacattattcttatatgtaatatcaaaagtatctctaaattagtttctctgagaatttttaataatattggttctccatgaaattattggttattgttttcttgtttggatgataatgttgcttcatatttatgattatttatatatttattttgaagtgtttcacatatattgaatatatgcgttggttttgttttataggtaatcaaggatgatggttccatattattgatattgccattattttttatttgatcgcttataaattcaaacatctaataaatttgatacttttaagtatatatcatatgtttgaattttttgattaacgtgtgataaaacttttatgacatgtttactaaaagagaatgagaataaaagatatgatattgattc

SEQ ID NO: 195401 - DNA, 1754 bp, Cannabis indica
aaaaaaaaaaaaagaaacaaatttaaattaataaatagcaagtaaacaaacaaatagttttttataagggaccaaacaaacaaaatttagtttcatagtttatttataattcaatagaaagtaatcaatttagtttgcccccatttacttgggttgtgttttgtaatacttttataatagatttttttatgtaacaaaaaaaagtgaaaatatattttgaaaatatgttctagtaattttttttactttttagttttttaatttaagaataaaaatttaaaaataaaaaaatcacttttaaaaaattaatttttttttttcttaaaatattttttgagcctgacttggaccttgggatcggatccctgcccctgacccagcagacccgatccccagaccatagaaccaactcaaacatggattcgaacctgaacatagacctggacccggacctaaactcgaaccccagacccggacctaggctcgaaacccaaacacaatcccggaccttggccttggaccctatcgcccaccctggccctcacccggacacccaccagaatcgatcgtagccttcctcatgaacaaataggtaccccttgatcaatctcgtgtaaattaagcctctctaaaatttcatacccaataaaagatcagattcaaactaacgttcctccaacaaaggttcaataacctatataactggtggatccctttgcatatataggctatcattttcttttcatgataagattaataaaacaatttcattgtggtaaatgttaaaccaacccaaaggtcaaaaacaaatgatcaaacacaagaagggtccccggccttgcattatttcaagaaagagccaatatcatttattaccttattcaaatttttcctatatatatgtggctggtaatatatagaacaaactaaattaaatatatagcaagtaaacaaacaaacaattttttttgtttctttttaaggggaacaaacaaacaaaattataatattatagaatgatcataatttaatagctaagtaatttttttatgtaagctagaaattttattacaaaccaaataattaacaagaacaagtgatccaatcctatccacttacttttcctcttattagtacagaagcaatctttatttatcttagtttgccccttatttattaagtgccttgcgtaatacttttttaatattttttttaataaaaaagtgaaactatattctaaaaacaccttctataaaatattttcactttttaattttttaattaaaaattaaaattttgaaatttttaaaaataaatttgtcttttctcaatttcggacaaaaaaactctattttaataaaaggaggtcgcaattttagaagagaaagacagaaagaaaccctagaaaatggagaagaagaagcttagagcgagcgaggatgatccatgacaatccgctacttattgacacgacatagcacaataattatgtgtttaagcacgactaacatgaatgacacaacacataaatgtaaataaagtactaaaaggcacaacacgagacaagtctaaaaagcacaacacgatacattaaataactctataacttaatattattaataataaaaaagatatgcatttgtcaattaaaaatgagataaaactgtaataatgggtcaaaaataaacaaagtatatattataataattactttgtgggatccacttggaataatatctttttcaaaaaaaaaa

SEQ ID NO: 195402 - DNA, 1102 bp, Cannabis indica
tttttttttttttgataaaaactccattaagtcttacaagataaaatcctaccaaaatatatatatatacacacacattacatatatacactacacatatatcgtcttgtacattactcaaacctgagtaatattggcagcgatgatgataacaaagctcaaaccccatagcaagccaagtttccatccatggagcttacccaacttgagaactgaacagtctagcaatgagtacatgaagcacttgtgcttgcaaaaacgttacagagaagctcttgaggtgtttgacatgatggagaaaaccacatcttttaggatatgccccagtgcttactctcacttgctctctgcttgttcttctctaaggtctctcgaacacggtaagagagtccataataatcttattttgacgtctaagtttcaacaggacatcgttcttcataatcgtattttgaatatgtatggaaaatgtgggtctgttaaggatgccatgaaggtatttgacgtaatgcctcaacgaaatgttatttcttggacttcagtcatatctgggtgttcgcagaatggtcaatataatgatgctgttgagttgtattgtcagatgcgaaggttaggacatatgcctgatcagttcacgtttgggagtgtagccaaagcttgttcagggctcagtgatgcttggttggggaagcaactgcatgctcatgttgttaaatcagaaagtggtgatcaacttattgcgcaaaatgctcttattgcaatgtacactaaagttggtctaattcctgatgcttcccttgtgttttcacgtatgtaacaaaggatttgatatcatggggttcaatcattgcgggattttctcaacttggctatgagtttgaggctttgcttcatttcaaggagatgttatgtcaaggtgcttaccagccgaacgagttcttttttggaagtgctttcagtgcttgtagcagcctctttgagcctgaatatggaaggcagattcatgggttgtgtataaaatttggtttaggaagtgatatttttgctggatgctcactttgtgatatgtatgcgaaatgtgggtttttagagtctgcaaaaa

SEQ ID NO: 195403 - DNA, 1111 bp, Cannabis indica
tacttgaaatgtgtaaaatatgaatatagaactacttttataggttgtaaagaatatatataataatgtaattataaagttatgatctttttttttgaagttgggatgggccatcttatctttttgagatttttagtgatgaattgattgaaacatgtttgtggtagtgggggccagccatgcccataaatatggttagtaataataataatggaacaagtggtacgtactacgtttgtacggttcgtccttatattatctaataatattatagatgagtgtgtgaaccgtacaatatcagtaccttgttttattatattgttaaattattatcactgcatcaaaattagatcatgatgtttactatatatagtgttttttcacaatttattttacttcatttagtatcaatatttattaattagtttaccatttaatgaaaaatggtatatatatttttttatgtccaagaaacttctctcgataaatggtttttgtttgttattttttaatagaaaagaagaggaggaagaaaatcgatgatgatgatgatggagaagttactcatgacattttatattaaagatttatatatttttttgtttatagtttttttatattataataatcaagtcaagatcaataaattaaacacacatcaaaattggttgtagcaaaatcatataatatatatattttctacaattattaatttatttttgtaattccttataataaaaaaaccaatgaaatatgtatagctttaaatttcaaacttaagtcaacacatataaagaccttataaaaggaaagtctggatgtaactatagctagctggagtagtataccaatgaaattaatgctagtttatattgaaaatatatatatagtacacatttaggcacgttcataaaaaaagttaagctcatttcatcaattaatcatatactgatataattttttattatatatatatatagtaattagcaaagcagtgcatgtgacaatgttctgtgcagtgttcgacgaaattaataagtacagaatatgaattaagtttattaaacgcgtattgagaggtacgatgtcatgtgtgtatatatatatttat

SEQ ID NO: 195404 - DNA, 1365 bp, Cannabis indica
tatataatataaaaattatttaacggtaaaaatattaaatttttctataaatagtgtgtaatttttttaaatttgtttttttgtctaaaagcaaatctgcacatagaatattgtgtccgtaattaatttatatatgaaatattatacatatgtatcattcaaatattataatattctttcattcatctgacttgtgcaaaatctagctatcaaactccaataacctaatctttctattgtccaccaatcatgcacccacaaaactgcatatatctaagtctaatccaagactgatgaatacccttaatacaattttgattatattttcttttacttttataaaaagttgagatattattattattattattattattattattattattattatcatgactttatagacacaaatgcatcttattacggatatattttgttattatgcgctgcttgtttaacacatttacaataagttatataccattttggattttgtattttgcaaaaattattaattggatcttctgtgttgttaaatgacaaaataaagtttgtatttttcaaaatagtacaaataggattctggactgattttttgtcaaaaataaaatttaataaaaatctgatctaaatatgttatgacaaatctgtttacatgaaaaactgttacttttagtgataaccttttagttacaacataaatttttgtgactaaatgtgacttttattcacaacaaaaagttacttgtgtctaaaacatagtatttagttataagttgtcactaatttagttttagtcacaacaaatattatgactaaaaacacatttagtcacaccacaataatgataatttataactaaaagtaagatttttttgtagtgttacattttctgtatctgtctgtgttaagaattttcttcaagttggcaatattaaaaagaaagttgtcaaaaatttaagctctgggtcctatttttaccatttttgaaaatacagagtctattttatcatttaacaaaacagatagttcaatctataacttttacaaaacacaaaatccaaattaatatatttaccctttataatacaacacatttaccttaatattattcatattaagtcctcaaatatgaatacaatacaatttattaacaggttactcaacacaaaaatgaaatatgtaataacatgttttatagttgtgttgtatgacactaaactataattgacaaatttaatacacgattaaatattttaggacataacgaaattgacacaaaaaaacaaaattatgtataattataaatattacttctaatagattcatagttttattttattttgtcttttgtttataaag

SEQ ID NO: 195405 - DNA, 856 bp, Cannabis indica
caaaagttcttgtgtcaggatgtcagcatatatgtttacgtttacaatttaatgcagcattgcaaactcctcttcataatagcttctattctattatacaatgtcgattcaaataaaaaggaaaaggtgaaatgcacaaactaaggtaactgtgagctaattatgaacgaataatccaaggaataacagggacataaatggaagattatggagctaaaccatagagaaaaaaacaatacattacaacaaacatgagaaatatgtagttacctttaggtaagttcattggcttgacatggatggtaaaatatttgtaattggacaacattgcataaatttcattcgggcgaagccatctgctcggggcctcagccatgatggttggaacatccaaatctgcaataaaattcaaacttattgtacaaaataactttttattctcttaagcacacatgcatatcaggtaaaacttattgagcttatctccgaggtaacaaacaaaaactaacagaacatccaaataaaagaaatcaaacataaagaacaacataacccaaaaaaattaaccagacaaaagtagaacatggggaactcaattataaacagattgaacgcttaaaaatctacactatacagattataaaccacttcaatcagcctaattcggtcgaatcctcaaaacaaagaaaatacacccaaatgtatacttcctctatagaaaacatgaaatcccaaataaaaaaggcacttttttcttcacaatttaaaattacttctctcactcttacagaaaaatcccatgcagtttggtcactcctcagttcagtaaaagaaaccatatataatttaagttttg

SEQ ID NO: 195406 - DNA, 1650 bp, Cannabis indica
tttatctaattgtaaaaatctgagttgtaaataaaagaagaaatacatacatcaaccagtgcaggatctgcagttgcatattctctttggaacaaatagacccatttacttttctctaaccttcctgggcaagactcttcaggaattttaaatttcctctctggaatagccttgattgactctgaagcagataccagtgtagggtggttcatcaaagcaagaagggtaccattttcctgtaacataaatattttatgatctatatattacctattaacttcatacaagttgagaaattctatgggaacaaaactcattgatatatttcaacaggactcgttcagattgtattgtatagcatccaatcatataatactatgttaaaattttaatttatatcaaaatattgtattcatataattttatataaaatacaaatgaatataggagttttcaaaaacagtttttttttttacatttttacaaaaatctacatagaaattcacataataaccaatgaagcaacttaaattaaaattaaaatctacatattaactcacataaaaaataccagaacaactcaaactgtaaattaaaaaaaaatactaaacaatacaatacgacataatggtatataggtaattcctaagaatataatactatgcaacataataccacgtaatggtgtaccaaactagctctaattgttctgttcattatataatacatttcatgttgaaacattcaaattcaaaagcagtttaatcaactcaaaagcattctaatttccaaaaggaaaagtttacatttcccaatttgaaatccataatatatacataagttcaagagaaatggagactatttggttgtgaaatatgataaaaatcagctatgaagttaacctaaccaccttctaattcatcaatctattaaaaaagaaaaactatatgaaagctaaacatgaacaagttccaccctttttaaaatatatagcattacagaaactatacatttacagatattaataataataataataatgaacaatctgtctttcccactttcaatattgaaaaacaaacaaaaacccaacttgattagatttagaggcagtgcacagagatgggtatttgataaaaatggtttgaagctgaaataatataaattaaaagataaagtgaaagagagattacattggaagaagatgaagaaatgtggtcgtgggtatggaaaggaacaccattaaggaatatcatggtattggattggagctgatcgagtcaacaagcttctgacttttgacaatcggcttctaccattaccatgtgatgcattatttctttccaaattccatagcaaagtggaatttttaaaaataatttaaatgaatttttttatatatatttattaaatatttgatggggataccataatatttattaaaaattgttatatatttattaaaattttttatactaattaattgtttgttggtgttttatcagtgggatgaatagtttagagattttcttttaagatattttaaggttttattctctaatttttctcaaatatatcttactttttgtttagtaagagagatggatgaaagtttattaattgagttgatcaatacttagcttaatttga

SEQ ID NO: 195407 - DNA, 2698 bp, Cannabis indica
tgaacacatccaaatcatccaaatatcgtttgaaatccatatgtcatgaaaataaattattaccattgctttgcggccaattgctagaagtattttaccaagatctagatttactaacatgtatgtgtgattataaatctataatctaacatcctaaatatgaattctccaaaagtgatgaattaaacaaataaagttatagaaagacttatactgatggcaacaaaatagtatgacttcttccgtttagatctctaactcttgatcatttctatcgtagagtatgattaagctttgaacctggtttctccttaaagtgataaaaatactacataatcttccacactatcttgagtattgacttgaatcgtgtggggaatcactcattcattatcaggttcaaaaattttagaagaagaagaatatgaattagaaaatagaaggcgctctttttatttttctatttagtcagacaatgagtcaattaggttatgtaaataagagctatattattctatttatatgatagctattgaaaatttacattgagtagggacaaatttatttatatgatagctattgataatttacattgagtagggtcaaatttaccgttccaccattcaatgtattttatccttaaactacttacctatttgtaaatgatattataataaactaatataattactcaaatgagtactctactatttaaactcgtttagccaagctcgaaggaaactatcgtttcacttctatgtatttaaagaagctatgaattttgtacctttgattaacacttccactcaattgcatcgtgttactaagatgtaagtattggagcaatccaattgattagctttaacgaacaaatcaaagaacgcaagcaatacacttatactggagcctaaccatctcaggattgagaagattgatctaagatcaagtaagtgatatttacttaaaaaaatattatggtaagtttatgatatattttgcacactgaatatcgctcagtttgatgtataatcgtacatctaatataagcttactttgctaataccttagaaaaaatattcaactatacaagtgtaagtaaactaaattattgattatcaaatcagtgtaaatcatgtgtactaataaatcacgagactaattagtttaatcacataatcttaattatttttcaatgtgtagacaacacattaatcatgaatagcaatgtgataaaaatttaatagaatttatatatcaaacatatgatcatgaaataaacatgtgaaccaagcattatactaagtaataaaataattttgttcctttattgataataaaattcaagataacattgaaatagagttttagttaggacacaaaacacaacatgtaaataaatagaaaaataataagacatcaatcttgttaaaatgtgtaaatcattcataaattaactctcaataactacaagatatccaaaaaaaaatatactagttttgttaatcatgtaaaagatagaaaaatataggagaagtgctctttattattttgtaagagagaaagtatataaaaatatgagaaaaattatgaaagtaaaacttattgttgagccggttactcaagaatagatatttttctaccacctcttttttggatgctaacattagtcattctccatcttatacttggcaagtatatgttggggaagagaattacttatcaagggaatgcgatttagggttggtaatggtcttcacattgcttgtgacaatgatccttggatccccagccataatcactttcagcccataagcttttgtggacctcctcacatgtcgggttctacgctcattactcacaatagggaatggaatgtggagttgtaaagtgagtttttccaattaatagatgttgaaattttcttaactattccattaggtttctttgttgatcaggatagattaatataacatcattctcctactagatcttacaatgtcaaatcggggttccatttggccacaactatggaggatcaacttcattcttttacttcagacacccaccgtgactggtggaagttcttttggagtttaaatttgccaaaaaaaatacgtatcttcgcttgtaaagtccttcaaaatgtggtccctgtagctgctgctctttttaagaaaaaaatcattgattcagctgcttgttctctttgcccttcaagttgggagtccataggacatgcactttttggatgtcatcatgctaaagcagtatggaaggattcaaaattcacaatagactttcacaaagctcagtccatgtacaatggggagtatctacaccatctttctgttgtatataatcaagaggattttgagctttttatttgtctaatgtggggaatttggactgacataaataaagtgtttcatggtgggaaaccacgcctgagctcttccataactgcctataccacatgtttctacaatgactacaaccgagccaaaaaatcctccaaaccagctgctgctacagaccagattttgaacaaccagtcctccatgaattcagcgttgcagcaacaggttccatggtcttttcccagcattaatgtattgaaattaaatgtagatgcaaccaccaatttggaaaaaaaaaaaaaacttggaattagtgctatcattcgagatcatgatggaat

SEQ ID NO: 195408 - DNA, 1491 bp, Cannabis indica
atgaagatgaagttgaaacgaataatgaatgaatgaagaagataccctccatcggcggagacgatcgacagaagcatttttagtgctggtaatgtcgaatgcaccgtagggagaggaggattcatcgtcgtccaactcggccgagtgactacctccggcctctacatcttcattggcccgccggtacggcgaccccttcaagttactcatcggagatactaccgaaaactctgtcgcaggagagatggcacagttaaggtttcctttcaaatcatgctcattcaactattcactacttttctcactgaacgacttctcttactcattctctctcgacacaaaaacttttaagggttaaaagaaaaaggaaaagaaataaccaatcactctctctctctccctccctctctctctcttctctcttcattttatttttatatatctttaaaaagagtagatattttgaaagagcaaaatcttactgtttttttctttttcattttatttttttatctttaaaaagagtagataagacagtataagagttgcttaagaacaaattagatagcacagtcaagattacagagaacagaaataaattaagaaagtcaatatgagttttgtacttgacttactagaagactaggtggaagaaaggcttccttcgtctcgtctgcttcttcaattcaatccctgcagaaaaagttagcagagtttactgaatatgttaaaatttaaattataaataaataataatatgattaacaaagattaataataattaaataaaattagatacttaggaaggcagtaaggtaaagtgatattgtaaaaaatatattatgcagaaaagaataaaaaaatttgccatattctctcgaatactttttttgaaagacggttttggtcggtttcagatactaaatctgtaaattcttttctttacagagttgataatggttatcttttcctgttattattttaatatatttgaatgattattattttaatttatttgaatgatttgtccaatactcatgtggacagttgtagagtcactagactcacatggaatgactcatatcatctgtacacacacaataagaaacggttcgaacactttttttgtttattaaagtgctaccgcttattatgggttagttttcttttctttcctttcatattcacagcaaagcaaaacatttattttaattaaagtaaagacgtttaactgaacccaccatctatagtatatatacgttaccataataatataccctaactttagaaattattgagaatataatttaaccaagaatatatccatcttttcctaaaaagatttttaattaatgtaaataaaactcactatatggaagaaatatttggcatctttttttcttctatataaaaaaaatgataacgtgctttggggacaaagtgattgctgatttgtgaagcaaacgagtgaggtgagtagaagcatcacca

SEQ ID NO: 195409 - DNA, 2981 bp, Cannabis indica
ttgcaaaatcctgcgaaatcttcattgcccatttgcagatacagctcaattggtggcctgaacgtgtttttgtcagctggtttgtcctccacatctggtttctgggatttcaaaaggagacggagaagggaacggtgcattacaagggctagtcgtagagaatctccttatgaagttttaggtgtgtccccatctgcatctagcgacgatatcaaaagggcttatcggaaactagctctcaagtttcatcctgatgtgaataaggaggtaactgaaggcgactcaatatcgttattacatatgatttggtgctttgctaaattggttttgctttgtttcttcttctactttggttagctttgccattgatgactttggttcaatatgttttgttatttcttcttctactttgatttgccaaagagtgaattcatttggtgcacgatatgctttgttattgggattgggactgggataaagaaaggcaatgagagtgaggttcattctatgtttcttcagtttagacattatggatcttccatttgagtgtagatttgcctctataaaacttatacgcagaaaggaaaattatttgtctgcctccatttttggtctcatttgtctaaaagtagtcttttcacaggcgaatgcgcaggagaaatttatgagaattaaacacgcctacaacacattgctgagttcagaatcacgtaggaaatatgattatgggaaccgtgattccgattattcctattcatcaactcaaagaagtagagtttcacaagatgaagaagagttctatggccttggtaagaactaattgttaacgtaaacttcaattgtgtataatggcatgccaaccctgtttcaatatgggatttcatctacacatgtcttgcaagtttgcccaaaatcagaaatacagtcaaaaacaaagtttgatgacctgttgtccatacatatcctcattctcatagttaggttttttgtttacaagttcttattaataacaccttcattatgcaggtaattttttgagagatgttcaaataacaataggtagatttgtctacttcacgagggcatcattccattagtcacgacccatgaacttaccttcttttacatctgactgaagatatttgttttgcctttcttatgttgagagtaatttaagtctctctggtgacagaggatttattcaaagatcttcaagaagaatttaggaactgggaagctactgcctccaaaggaaaaccaaaaagtctttgggaggaattagcagtaagaatttttatatatttttactttaacatgaaaaccataggaagttagacacggggtacctcgtatttaacatgtgagtctacactttacaggaaatcggagaagaatttgtggaatttcttgagaaggaactcaatatatcagatgatgaggacaaaacagataattacaatacagggcctcagaaaggcaatccttcaagaagtcctgggacagagaaaatggaaggtgacattcgaaatgaggcagtaaaagggagcaccattgaggacaacattgatgagatagaggctacccttgctcagttaaaaaaagaattgggtttgtaaagtattagaaattttattatttgccacttttataacatccaagaaagtgaattctcagctctaaacaacacaatcgattgctgttttggccataatagaaggaaacgttactacatctacaaaatctgtttgattagctcattgttgtagcaaaatcagaaaaataagcattaaaactgtatcgagccagtcagctgtctaatctgtttgattagctaattgttgtaacaaaatcagaaaataagcgttgaaactgtatcgagccattcagctgtctatgtaaattggggacaataacattctagaacagcaaaatcttatgtggcctcaaaaaaaaaaagctagtccctgatgaagattaaaaagtcaagcaaatttattaagaaaatttctcattccatttgaatcatgtctagtgcaaactaacaccaataaattaactcaagtacacttggtacagtttaaaagtctttgatctttatcttcaatatgaaatcctagacaatcgcaatgtaatcgatgaaacaaaaaagactaaatctaatcacatctcaaaatctctctccaaatcggaaaaataaagcaccggtgcccgagttatgatcaacagcatactcagctctcactaaacctagtttcacgccacaaccataagatgaacctttacccattctcctgtatacttctgtgggatttcccttgacatccttagaacttccaagatcattcccatgttcggcaaaagcatatacatgtgtacctctcactggaatcctcagctcagctgcaagctgtaataagcaaaaatagaaatgaaacaatccggtttgtgatcctttccctctccaaattttaaggtaaaaaaggattatcatagtaagttaagacttatgcgagctcctacctcaaggatgtttcttgctgcgcctatctcacccatgttataacctctcacagaataggggccaccaagggtgaaagcatcataacttggaaggtcacctacacaaccaccatagtgcccatgaagtacaagaacaggtgggggtggtttaccagcaccttcctccacttctttcagctggaaaaatcgagtgagtgtcaactggtgacgattaaagaacggaaaattgctaccaacgccaagaccttggtccacctacacataaaatagattttgcaagttagagaattaaggcaattacattatgaagatcaaacaaacgggaagaaaacttgaattataagtagaatgtagacaaacttgtttttcctaacctttaaacccagattagtgtgctttatagtttttttgttacagtttagacattacaatttaagaaaacttttaaataacaaaaaatt

SEQ ID NO: 195410 - DNA, 2168 bp, Cannabis indica
tatatatattaattaattaatttgttgattgtagaggggaaacctaaggtggcaaaagaagtagtggaagacatagacgacgacaaaaaagcaattacttacagagtaattgaaggtgatcttatggaacattacaagagcttcaaattcgtgattcaagtaattccaaaaacagatggtgaaggtagcattgttcattggacaattcactacgagaaactccatcacgaaatcatagacccgcataccatgattgagtttgtccatgaactcacaaagtatcttgacactcatcttcacgaggcataataatatatatattgccaaattaaagtactctcgctcatgtattatatattattatatataatatatcaatcgatataagtaatatatattattattatatcgactaataaataaaatgtttacgagagtactataaattacagtaagtgtggttttctttgtttgtgagattattatcataatggaatcaagtttcgtttgtttgagtatttcagcatttcgggtccgatggatctatcctgatccaatgccatctgtttaattctgcaaatttatagccatatttttatttttctctacattaattaagtgaaattaaactcgatcagtacctagtaatatacgtttcaaatataaagtggcgttaagtaagcttcattaataatataaaatattggaacaatgagaatgtagagagagaattgaacgaaaagggatcgagtaaggttttggatattgaatggagctctctgattgaatgaattataatcaagattccaagctatttagagctgagctattataagagatgaaaggttatgacaacctaattaatatctaactgaatcttcaatcagccaacatgctctctcaagcaaaaagggcaatcaaaaccacttgaagcttgtattttgaaccggagaaacttggcaactgagagacctttggacgttagaacatcaactatctgttcaagagtaggaacatatatagcatatgtgcaatgagcttctatagtacattagttctcgttaaaggctatattgagaacattaatgttgtcagtaaaagttaaataatgttctcagtgattttctaccattttcacccaattgactcatttataccgagaacatattgttcttggtagaactttttactgagaacaatttttttttacaaccactttttttgttcattgttaatattcataatagataacttatatatttttattttggtattaatattgcttaaataatgatgaaagtaaaattcattaataaaaataccataaattaagttttttttttacattttttaaaattataagtttaattacttaagtactaaaaatgctaataaaagagttcgtgaaaaaagtaaatactacatataattataactactgactcggttctccatcatcgagatgattagactgctgaggcaaattctgtgatcacagagtgatacaatttgtcctaactagttcctccagttgtctaatccacttatctcgtgaacttaatcccttatgggatccatgtttctttggaaaagctattgtcatatttaaatattcatgagttagtatattcacataaatattaataatataagttaaatattttaaattataggctaattagcaattttccctctcgaactttgacaaataccaaatcatgcttcctaaatttttttggccgttaaaaatttcccctgaactattgagattgttagatttaagaacttttgtctaattttattcaattttactagattgtttatgtactaaactatgctctccagactttaaaatctaccaaatcatgccccttaaactttgatatgtactaaatcatgccccctgaacttttatctatgttgaaattattttactaaaattagataaaagtcattaaatttaacaattttaatagttcaggggaattttcaatcacccaaacgagcaacttctgtcatatatgataaatacaagtattaaaaatattataataaatttttgttttactttcaagccctctttaggtggggtcctaggctcatatttactctgtttacttttagaatcgattcaagaaaatttatataatatgaagtttttttttaaa

SEQ ID NO: 195411 - DNA, 3734 bp, Cannabis indica
aactctgaaggctctcattaaaccctgcgagtaacagtacaatagataagttctaactatcccttagcacttttaaatttcaaaatttgtacctgaattcgatctccaccaaacacacgaaagaggttgtcttcaagactcaagaagaagcgagaacttcctggatctccttgccggccacttcgaccccgcaactggataatacaagttaagagtcaaaactatagcattcattacaaaatattcctcatatttaaacacatgttaagagtgatagagcaaatgttttcaaacacattcaagcagtacctgattgtcaatacggcgagattcatggcgttctgtgcctactacatgaagtccaccagctgaaacaacctgcagtaaaaagaaactatgaaagaactgcccaaactgtgggaacttcgacttgggggaaataaacttaccttgttcctttcttcctcggtgtatatcttatattctttaacaatttccttaaatgcatccctcagcttggctatgacttcatcctgagcaggaccctacaattgcaaataaagatggcttaaaaccgatatggtacaagtgtattctatgcagtttgatttccgtctgacacaataaagtgcaaaaggaaaactagtatttcctataaaattattttattaatttgaccttttcgcaagaataagatagacgctcctctgcttcaagttcggtcaacgatcttttgccccatgtttggacagctaattttacagcttcctcggccaacttcacattctccttggataggtcgcatggaaatagcttttcatcaacctggaaaataaatcattctaagttctagacacaccaaaagtgttgcatagtataatttcgtgatatgagaagagaaagtaataaacttaatcaggagagaaacaaaaaacataccttccatgtcttcttaggaggaagtttctttattgatacaacaccttcaattggtttaacaatactgaaatataaatgtaaacaagttaatgcccgaaaactctgtagttactggtatatgatgtccattgcgccatgtgcaaagaatagcttatgaaaagcagagctgctcctccactttgctattgattatgcatattcacctaaacaagttgaatagtctatcatgcatgcaaagagtttggttgtttctagtgacagtcagttattctattatacaagcgattcatcaatttcaacaagattatcatacaatagaaaatgcttgccatgaaagcaagatttgtggtggatcatgccaatggagtaatagttcagtttgaagattgaaccaatttgcatcagtactaataggatatgatagccattctccaatatgtatgttgaaaaagaaatcaattataataaaactttgttggaccttggcattagcatctcccgtagcttcaaccttgccataaattctgcattaccacctaggattatgtccgttccacgacctgccatattggtagcaattgtcactgctcctagtcgaccactctgtgcaacaatctctgcttctctttccacattttctggttttgcatttagaacctatatacaataacaatctatcaaaaataaaaaagtatactacaaccacaattgtctcaagagtatagcatgtaacctacaataccccgtggatattgcttttatcaagttacttatttttttccccgtataaaataggtaacaagatttgtgccataaagaccaaaagatcacacctcgtgcggaattccagattctttcaactgctcagacaatgagtcactctgctcaacacttgttgtgccaacaagcacagggcgacctgtcttgtacattctagaaatctctaccacaaccgctctccattttcctgatgttgctctgaaaactacatcagattcgtcctgtggtggcaaaaaagaaaaagagagtggaaagatagttagaatcgtcaaaaggcattgaatgttcagtaccatgaactcaaaagcaaacatatgtgccattgtttcatcagttttctcaactaataaaatgtaactttatatccacatttgtggcattaattctccattacaagatgaaaggagtaaattagaacaaacctttctcatcataggtttatttgtaggaactactgtaacttttagcttgtatatgctttcgaattctgtgctttcagttgctgcagtgccagtcattccacaaagttttgggaactggaatggcaatacataattatgtgagagttaatttccacaaatgcaccatttgatacgtttagaaaaagaatgccccaacctggagaaagaagttctggtaactaattgaagccagcgtaatggtttcattctggatgggcaaaccttcttttgcttcaactgcctggtgaagcccatcactccaccgccttccctaaaagaaaaggacaagtgactaaccagtgtgattatgttcctccatgaactaagaactatatattagcattagctattacatgaaaattaaacaaacccttagcagtattaactgacagtataatcgattatagaagttccatcgtcttcaaaataaaaataaataagaaaaacaattaaagtaaagaggaagaaaatttgtcaataggctccatgacaaagaaactcacttgcataactcggccagtaaattcatctacaataagaacttctttcccacggatgatatagtttatgtctctaagaaatatttccttggctttaattgcattcagaacatatgatgcccattgttctcggggatcatataaatctttgacatccagaatctcttcagcatcttcataaccctgctctgtaagtagaactgttttttgcttttcgtcgacctacagcaagaagggccagtcatttagtaacacagattgttttcctttagctcacaactacacactaattttctgtctcctgataaaagtctggaccttgtttctttcatacttttacggttgaaaaattgttcaatatcatgtttacttaattgctacgatgtttgtcttatattcttacagtgtaatgtacatctcgctcaaaggctgtagctatctttgcagctttataataacgatcactaggtttttccgctggtccagatatgatgagaggtgttcttgcctcatcaataaggatagaatcaacctcatcaattatacagtaattaaaatccctcaacacaagctcatcgacactctgcatatgcaagaaaatacagtcagaatgcatacaagaagtaaagcaattcttgatcataaaagctaaccacagcagaatgaaaaagacagcagataaagcaagaattactttccgtggcaagattgtccctcaagtaatcaaaacccagctcactattggtgacataggtgatgtcacacaagtaattttcttttctttgctcactggtcatgttctctgccaacaatggagtcaaaatatcaagtgaatcaattttgagcagcaaaatttcatcattagaagataaatttgaagctttgactatgttataaagaaaatatatacaaaagaaagttcatagaagtaacggaagtagattgatacaagaatcgaatctacctctgttaggaaaaaaaataaactaaaacagaagagacaaacaagatattcaaaactgtatggggctgggaaggaagcactagagtaaca

SEQ ID NO: 195412 - DNA, 1298 bp, Cannabis indica
atgtcatttattatgtaactaagtagcatatggaatgctattttgcttgaagtgaacacaatgacccctcttgctatatatatagactatgtttgagggacatgttgatgagggtttgttaagtatagagtaatagtactgtactagtacccagttgaaaagagaacaagtcaatcatcttcttgttacatgtttgacacaagaaaagtttaaatcatgcagtgcagaataagcaatacatataccactcccacacaacgctttttcatacaaaagttaaactcatagaatggaaagtatggggactgatttctaaatatttgaaactctttcacattactagactgcaacgtgaatgggttttatcatgaatgctattattagagtttaaccaaccaaagtaaagacgagaagttatgatgcattttaatcatgagaaatggtgacaacttgctttcccacattgcggccggagaagagtcccaccagagcttcaggggcgctatcaaggccttcagctatgtcttcgaggtacactatctttccttctttgatgccaggaacaaccatgtcaagaaacttctggtagaggtgatagtactcacccaccacgaaacctgtaatcttagctcgcttcacaatcagctgcatcaagttatgtaccccttctggatgctcaaggttgtactgcgagatcattccacatgctgctattcgagcatggactctcaggttcagcagcacagcgtccagcatctttcccccaacgttttcaaagtaaatgtctatgccttgagggaaatacctgcacacacaacccaacattacattacattattattattactatcaaccaattacactcagatgtcggaatcattagtttgttgtatttgacgtgcattatataagacttgagaagagagtgtataatcaacttgtactctctatagtttatttgacaaacgccattgctgccttgtgaatggtgatttacttttacttagttgttttgtgtctttcagtttttgttggtatatattgttcatctcagcagacaagacaatatattagatatttatgtatgatatctgatctgagtgagtctttcttgacggtgtttaccttttcagagctgcatccaaatcgggctcttctttatagttgaaagcttcatcaaatccgaacttgttcttaagcaaatccacctgtgaaaaaaaggaacaacaataacaataaataaaagaaatttagattactagatttgatggttagtactaggagagagagagagagag

SEQ ID NO: 195413 - DNA, 1713 bp, Cannabis indica
tctctttttcattcagaaacccggtactttcacaaactccattctccttcttaaccatgtttatgaaccaatttatgatcatgtttatgaaccagtgtatagagttctcctaatcgattaacacaataaaaatttaggattattcattttgatagtttaatttttgttaatataattataagaacccctccagtaccagtttatgattcctttcggattacttcgactctttagtatttttttgaccagtttttttattaagttattagttaggttgtcttcaccatttttctttgattttatgacctttttttttttaattacaattcgtacatttcataaaaaaattggatgaaaattacagcattttctaaataagttttattgaagttgtgggtttttttgttgttgtggctgtaaaaccaatctaacaaaaaacatctccaaatgaattatataaacttaattaatccattaaatcagcacaaagtcagtcaaatgaatatagtacacaacaatccgtacaaaaattgaaagaataaaaaaatattttaatgactaacctgtatgtgttttatacgatgaaggctcttatgacttgccctctcaaaattgatcaattaactagatttaaacaatgataaatatatataattgaataggtattgaaaatgttaagacatagtttgtattcatcacattgagatgtgaggagtaacactttgtggcactgggtacggagatggaaaacaattgcagaaggtttgtttttaagaaccatcgagatatctctgcttgtattgaagagaacatttatatattaaccaatttatttttattaattttacatatccagtatttttttttcatgaatactgacattacgttccttgtgttttgcctaattataaaactgttatatcttgcatgccaatataaaaatcctttgagggggtatgtcaatgatgctgatgagggggaatggaaaaagggggctgctttgagggggatgtcgataatgctgatgatgaaaaagggagaaaggaaaaatagattatatgagaagatgaagattaaaaattggttttttttacttaaaaaaaataaagttaattttgcttggttgttaattttttttttaattgggtgtcggattttttttttttcaagaaagaaaatttaattacctacaaataaatacattttacacaatcttttttttttttttttgctgaatttgatactttgtattgcataaaactaaactttttacaacttaaacagcaccatataaaggcctgaataatactctagttacatgtataaagaattgaaccaatctctttcttctatggtattttttgtatctaataatccattgattctatacttcacattctctttcacttggtgaacacacctgtgcacagtttgcattttaccattccgtaaacagtcatttcggttgctccagatttgataaatcaaagcagccaccactgctgcataaacattccttctgaacttggatgttttaacccgagaaatccacctgatcatggctgctagaggacaatctgatttttgccaattcaaccatgttttgatctcttgcagacacctgttactgaaatagcattcaaaaaacaaatgatctattgtttcaagctcaatgtcgcataaaaggcaactgccttcttgacatacattaaa

SEQ ID NO: 195414 - DNA, 2865 bp, Cannabis indica
acgaactacaacatttcacctctacacttgattcccatttcaaactcaaaaatcttggtactttatatttgttcttaggccttgaaatttccagatgcagcaaaggaatctttgtttcataaagacctttcacacttgaactactaaaagaaactagttgcctaggcatcaaaccagtctccactcctatagagccaaataacaagctcaacaatgaaacatgcaaacttcttaccaatcctacctaaaagaggagttgattgggaaactcatctacatcacaataacaagaccaaatatctctttttctgtcaacaaactcagccaatatctacaaaattcaagggaacctcatcttcaagcagctacaagaattacaatattgaaaaagcactcctagacaaggcattttcttctatgcctccactctagaacctctccacctacaggcttttgcagacgcagattagggtacctgcctagacactaggcgctccatttcaagttattgtgtattccttggcaagtatctcattcatgaaagttcaaaaagaaaccaacactatcatgctcctcaagagaagcagagtatagatcaatggccaacgttgcttgagagttaacctggcttcactcaatccatcacgattttggcattcacactaggttattctctactcggttctgtgaccacaatacaacaacatctttgaaaatccaatctatcattacgtacaaagcatgtggagatagactatcattttatttgagagaagatcaataatagcacaattaaaatgaaccatgtcttctctaaatctaacatagccgatatccttacaaaaccactcttttccaatcattttcattaactaatattcaagaggaatgtaacaaacttttacaatcattaaactctaatttagttagttaactatgttagttaggaggttaattatttcagttgcaagttgttatatcaaaacaactctgtcttggtcatataaatatattaagcaattgtactctgttttacataacttttcaatcaatatagaaatttctctctaaaactaatatgtaattataaaacattactcaatttagataattaatattattaaactatataattaactatttattccccaaatataaaaataaaaattcatataaaattattatttaacatcttattttaaaatgaagtgtaactattctcatccataattactacgtagtacctacctacagttatttccaatcgcatcgaccaattaattttcagagagaatgagaaatagtttaaaaaaaggttcaatttattacatttaattatctttttttaaaaaaatatctttagttttgacgaaggaaaaaaaataaaaaatttaactttattttcttactcccccaatttttatcatcaggtaaacccaatacagttttctccggcaaaacaattctttctttctgaaatccacacacaaaccctaaaaatcgttgtccctcccgccgctcaagttgcgtcctccggccaaccactttgccgtttcatcgctgtaaggtatcgtgtgttatcattttaatttttatctatgttttgattatgaattttagaaatgcaatactgaacccattgaagtcctctatggggagaaattaagccaatctatggtagaaatgagttcccccaaaaatatttaagattatcaacaattgcttggctgttgaaaagtattatctttgcttcatgatatgattcttttgctttcttgggtcgggctataatacatattttatataaattgcagcattcattcttacacgcttcctataaatttggtctgagttttttattttaaagaatcccatttttttccctattttttggggtgaaatgttctagaaattactctaattttgcatagtttcataatatgatgctattttctcaaaaaggtcattttttaattggtttatgagattttagagctagaattgttcaagtcatggttaggatacttcatttcttagtagtgtaatctaatttagtctaatgttcagtgtttctggtttaaaggtctaattactttcaaaaacttttggtcatgattttgttttttgtgtgtggtgttatggctgtcagaaaggttggaaaccatggccgaagaaattgatttaactggagatggaggtgtccttaagaaaattgttaggcatgctaaagcagatgcagttggtccaactgaagatcttcctctcgttgatggtacgtatgttaatattttgtggcttagatcaatcaagactgttttacactggattatatttaatcaagccctttttttatatattttagggagtgaaagattgtgttacaaagtttctgattgtcaattaaggcattaattatatttaaaattgtgataaaaatttgtaattctggaatggtacttatcatatgaccttattatggtcataattgttttattctaaatagttcattatgagggaattctgtctgaaacgggagatgtcttcgacactacacgggaagataatactgttttctcctttgaggttggaaagggggctgtgatcaaggcttgggacattgcattacgaactatgaaggtcagctactttctattgagaaagaaagttttaataattaaggtttcacttcacatgattctccatgttgtttccaggttggggagatagccaaaatcacttgcaagccagactatgcctatggaagtgctggttctccccctgatatcccaccggagtaatgtctttattctagttgtgatattaaaaatagcttcccgagtaaggcttgcaactgaaacccaaatt

SEQ ID NO: 195415 - DNA, 1204 bp, Cannabis indica
taattttagtttaaattggatatctaaaattccataacaaattagaccagtaaccttttcaaataataataaaaaagaaagaaaaaaccaataaaaaaaatacacattgattataattatagactcattataacaattatcttcaatcaattccataataagggcatgttatagaattggtgggggtcagataagattacatcattgatgaaagtgagggtgggaagaaaggaaaaaggagactctaattctattttgaaggagtttcgtgtgagtttgagaatctacgacaatctgtcattacaaattctttaaataaagtcctgagttgatctttttcaagaatacaaagatacaaatcagcgtattttatgactaatctctatgaattgaccatttgctcaaacatgaggaaaaattattggagtttttaatgagaattattggtatatgttattttttacagaacaatgaaaaaattgactaaaattaaggttttcggttttaattctggaggagaatatatcttccctgcctttcgaattctgctcttgcttgaaaagaatgaggcttaagtatagggaaaaacaccaatttttaatcttattggtcctgatggagtaagatctcaaacatagaggatgttgcatgtgctattcataactattttaataacacttttacctcttctttgcctttagaaagaaaggcaaattcgaagaatagttggatcaatttattgtgtgaacttggcaagtgtggtttattccaaattgttctccattcatgggaagatcatgcctaaaattgatgatgcattggataaagttttatcagggtatcttttgagatgtgacagaggaagttgacagaggattggtgtgcaaagtaaagttttatcagctagtggtctttttacaataaaaacgagtggtatgtcttttttaaggcgttaataaaatagatttaaatcggatgtataaatttacattgaactgaaccgatattgatagttgaaaaaatattataattttattgttatatctattttatgttaatatctcttagtttaatcattagatcaattagatttgaattctgagatgattaacttaactaatctgtatttaagtctttgcttgtagtgaggataacataacagagagaaaaggatagagtagaatttgagttagaatgtattttg

SEQ ID NO: 195416 - DNA, 4359 bp, Cannabis indica
catggtatcagagccatgtcaaatcatggcaacaacacaagtggtcctggtattcaacttgaaccaccagtagaggaaagaatcgatccacagcaagctcaagctgctgaaccagctcctaaagctccaaatccaattcccctcccctcaatcttcgtcttgacagatcaaacgatacaatttggagatctcttgtccttgttgcccttcgagcatatgatcttgatggctatgttcttggatcgattcctcaaccaccacagttcttgcgggtaatgtcctgaatccagctttttaaaattagatgagacttgatcaattcttgatgcactgactaatgaattctgttgatgaacacatgttgggccatctaatcatttgttcaacttctcacgagatctggaccacattcgctcaactctttaccactagatctcgagctcgacttccacaacttcgcaacatactttaaaccaccaagaaaggatctctttcaatttaggagttcattctcaaaatgaaacaacatgttgatcagcttgccgtagctggtcagcctatcaatgacgaggatttagtgatgtacaatcttggtggactaggagcagagtatgaagctgtagtcatcaatttaacatcaagaactgaacctctcattctccaagaagttcagttcatgttgtagagttaagaaatgagaattcagtagcataccactgaatctctccacaatgtgcaagccaatttggccaatagcagacgatctccctcaaattatggattttgaagctccaatagaggaggcagatattccaacaacaatagaggtggtcgtggcaacaggcctgtttgtcaactttgtggctgtacaggtcacaccgcggtgaagtgttatcacaggtttgacatcacttacactagtgcctcaaattgattgacttcctcctccttaaatggtgatacccctcaagcccttgtgcctgaatccactctcacattagattcttcactgcctggtatcttgactctggtgcaactcatcacatgacaaatgatgctgatcatctcaactctgtgtctaactataaaggcaaagccaaagtggtagtaggtaatagttcctctcttcccataaatcatatttgatcaagttctgtttgtcctaatttccctaataattcattggtcttgcaagatattcttcatgtacctagtgtaaccaaaaacctacttagtatttctcaatatactaagcataaccatgtcattcttgaatttgatgaattgtcttgtctcgtaaaggacatacaaccaagcaagttcttctgcagggccatctcaatgaagctctctattagcttcaagtcccagcatccaaatctcaaggcattgtccctgcctctgtcagtttcaaacccaaggctctcaaccatacaaccacaagtaatcatgttcatgacaaatccaaaactgtcaatgtttggcactgcagacttggtcatccctctcagcctatactatataaagttctttctcatgttgttccaaatgtaaagtgcaaaccactagatttttgtaatgcttgtcaaactggaaaattgcaccagtttagtttcaaaagtactgaaaataaaaccacaaaaacctttgatttgattttaactgatgtatgaggtccttccttttatacttcagctgatggttttaagtattacattaactttattgatgatttcaccaaattacatggttatttcctatgaaaaacaagtgtgaggctagtaacatctttatatagtttaacacctttgtggaaagacaatttcaaattaaaataaaatcagtgcaatctgatcttggtaaagaatatgagccattgcataaactttttactaatcttggcataatttaaagaaattcttgcccccatactcaccaacaacaaggtcgagttgagaggaaacatcgacatgttgttgaccttggcctcacactgctgtcacaagccaaaacgccactatctttctggtgggaagcttttgcttctgctgcctacctaataaattgattacctactcccacactcaattatcaaacatcctatcaaacacttttttagcaaatatcatattacaacctactcaaaatttttggttgctcctgttttcctcttttcaaatcttgtgcatcacacaaagtttctttcaggtcttccaaatgtgttttcataggctacagtgtcaatttcaaaaggtataggtgtcttcatccctcaggaagaatatatgtggcaagaagtgttacctttaatgaacaagaatcccatatgtcagtctcttcctcccattcaacccactatcaacacctcaaccaataattagcaactctttctcataccaagttcaaacactattcatccaccaaccccaaatcacatctcaccacctccaaatcctccaccacctccaaacagagcatccattcaagacagatgtctcctgtcaacaccagatcctcttctggttcagtaactctaccagttgccaatccacccatctgtcccaacactaaccttcaccctatggtcactaggtccaagttaggcatctacaagccaaagacatttcttgcatactccaatgatgaaaaggaaccaacttcatttaaggaagctttttccaatcccaaatggaatgcatccatgaacaatgaaatgacaactttaaagaaaaagaaaacatggactcttgtgcctagaacttctgagatggttattgtacaaaataaatgggtctataggattaaacttaatgcagatggcattgttgaaaggcttaaagcaagactagtggccaaaggtttccaacaaactccagccattgatttctttgaaacctatagccctgtgataaaaccttgcaccataagaattatgttcaccttagctatctctaatggctgggaaatccaacaaattgacataaataatgcttttttgaatgggcaactacaagaagatgtgtacatggcacaaccacaaggttttgtggaccctacttaccccaaccatgtgtgcaaacttcacaaggaaatatatggtcttaaacaggctcctcaagcttggtttgatactctcaatggtactctggttcaatggggatacaccaataaaaaatctgacagcagcctgtttttctcaatcaaaaatggtaacttgcttcttatcttggtgtatgtggatgacaatctcataacaggtgttgatacagctgagattcaacatctaatctctaccttgaacaacagtttctctctcaaaaaccttggaccagttcaatacttcttgggttttgaagttcaaaaacaacaaatgaaatttgcttgacacaacaaaagtacaccagggatcttctggccaaaacccaattactcgactcaaaacctcagtccacaccaatgtgctccacaaccaaactctcagcaacaataagtacccccatggacaacccaacacactacagaagcatcattggtgcacttcagtacctcatcatgtcaagacccgatgatgcctttactgtaaataaattgagccaatatatgcaagctccaacatctgaacaatggggagcctgtaaaaaaatactcatatatcttgcaggtttaataggacatggattggtctataaacctgctactagatttgacatccaaggcttcactgattctgattgggcagggtgctttgatgacagaaaatcaacatcagggtattgtatattcctaggagaaaatttaatcagttggtgttccaagaagcaaattgttgttgctcgatcgagtacagaatttgaatatagagcccttgctcttgccactgtagagataatatggatataatctcttctatttgagatatgtatccactataatctacctccaattctctgctgtgacaacctaggagctagatcctgagcttccaaccctgtgtttcacgctcgaaccaaacacatggaggtggacctccattttgttcgagataaaatcattgccaagcagcttgacataagttatgtggaaacagaaaatcagatagcagatttattcacaaaaccgcttactgcaatgccatttcaatatcttctcagcaagttaacaactggtttacacaaatgtcacttgagggggtattggaatttaaaatggctaagtctccaattattatttcattttctattttttatgttttacttaatgtaacagtacttgagttagttttgttactcttctcttgcaattaactatatatataaatgtcaagtagtggtacctattggaattgaaaatggctaagac

SEQ ID NO: 195417 - DNA, 643 bp, Cannabis indica
atcaaataaaataaggctatattatatcgatatccaaaaccattatatccatacaacatgcaaattaaattatgtacagatacaaattattctaataattttatgaattgaatgtattatattaatatacacaaagtgagattttaaactttgaaagttggaattaatatagtaatacatgaatatgaatagagtaagttcatttaagaaccctatctagtggcaaatagtatatatatttaagcattgttattaggtatcagtagtgtctaatattttttataggtgacacactaagattggttaacgatattttttagaatttattttcttaaattacatgagacttaattacagcaataataatataacccggaagaaattattaaacaccaataatattttttaatatttttctactgtaaaactttgacaattattcaaatatgagactaaactcgaaaaacaaacactcatccaaagacaaagtctcgaaaaactaagcttatgagcttttaatatgtttttatttttattttaatctatagaaaaataaggtttcaaaaatgtatatacaatgatttttgaaattatatgtaaaaattaatgaaaaaaataaaaataaataattttttttttttta

SEQ ID NO: 195418 - DNA, 726 bp, Cannabis indica
ataaacaaatcatccatctcatagatctgattcagtttacagcttagaaatctaaattatcaatggctacaggatgctttgtccaactcaggataaggtacgatggtgcaaagaattatggtgtagatatattttacctaaacattgttttgttttgtggaatgttgtccagaacaggttaaaaactaaagagagactctatcaatttcatataactgataattccacttgtatcttgtgtggtacacatgtggaaaaagttcaacacttattttttgagtgtgaatactctcgggagtgcttgaaccaggtgaagaaatggttgaagtggaatgattgtggtaactcactacacatgctgctaaggtggattgagaaagcaaagataggaaagtttaagaagcaggtattctcatcagcgctagcaagccttctctatcatatttgggtgacaaggattgaaaaaatttggttggcaacagatcaaaaggtagaacaattagtacataaagttagggggattacaaaagatagaatagcttgtgtttttgactaaaaagataaccaaggaagagtcatcttggtttgaggcattgtaaaaagagtagagaatagaaagctgagaaaactgtatagaagtgtagttttgagacttatttaacatggtgtcattagtttgtaagaatgttgttttagtgtaatgaatttcaactggttcatcaataa

SEQ ID NO: 195419 - DNA, 747 bp, Cannabis indica
aaaaaaaagaaacaaaaaaaaagcattcatttccattgaagatggtgagtgcctttccgcgtcaatcaggcactaccaaccaataattatattctctcttcttctacaccattactaccctcctctccgccatacccatttctgctccatctccaggtacgttctttgatcttatatacttgatctcctttctcttacattagatcccattcacagactcactttattttcctctcttttcttcaatttgatttgaattgaattgcatatgcagaaaaataaagagaagcaatgaattcgaattacggaaagaactttgatttcgatctggggttgggatcatcaagacccaaatcccttaacgacaagaagaacaacaacaatccttcgtattcttcttcttcttcgaattattcttcgtattcttctgcccaaccgaaaccagcatggcaacccaacaagccctcgtggacacaccagccatcgccggctcaggtgacccgacctggattgcctaacggacccacatccatggtgggcgatatacttggaaagagttggacttcgtccaccccttcgactggttcttcgtctgtggcaggtattgggattgtagataaaaaccctaatttgtttggggatttggttggttctgctttgggtcagggcaagagtagtaatagtaccaatgttcctttgaagaattcaacaccggtatctaacaagaacacattttcaatgggaaat

SEQ ID NO: 195420 - DNA, 1584 bp, Cannabis indica
ttaatttcgtattgtaaagtggttctcttttaatctattttttttctagcccctatttgagaagtgttatgagccttatttttctaagtgtataatttttttgtttaaattttgatattctgttatattttttgctttcctcctagagaggataacattgtaatgtaaaactaataaccgttaaaaaagaatagggttagatagttactttttggtcaatctaaaagtggttattcactctagaaataatgttaatgagtagtaggcaaataaaactttatttataatattattttgaaagttatagacatacaaatttggcctatcatttgaaaatttttaatatgagatttcaaattgtttatctagtttgtttagactgagtcattttttacccaaatatatttataattgtcttaattataggtagtcaaagtgattctagaactaatttcggccccaaaaccaagctccagcgacccagaaaaaaagagcttgaagagttggagaatcaaaaagtcgagattgacgagagggtcgagtccatgatccgaaaagagttgtggtgcggtctgccttacctaatatttcttcttccttgttttattttctctaaatttgtttccttcttatacataattatttataattcatatttatttttttttctctattttctagttttgtaaaattatgattatgatatgagaggtcttagaaagcttttaatttgatactaatttttttggtgttttgttatgttgtggttcttgttggtttgtgttagagcaagtttgtactataatatatgttaagtgtaagagatttcttgttagtgcataaaagtgttgttatacaaaatgatattatgttatttaaacatttgttgacaacagccgcatggaatatattgtatttactgttatataaaattattatgtatttaatttattttgttttatatatttactgttatataaaattattttaaaaattaaaaatgcaggtaggaaaaattgtatggaaatttgtaattttctttaccctatatttatactttattttataaccgacgcaataggtaaaaaaaatatttgagcaacttatacgtcatttaaaaactgacggtataagtttttagtgatggtttctaattggcacaaatgattttgtgtcatttctaaactgacggaaaatattaaaaagaacattgtatattttgtgtcagtttcaaataagagaattgttatttgcgtcacttaagaaacgacgcaaataaaatctatttgcgactacagcatatacgtcgattttatagaccgacgcaaaaactatatatgtcacttagaaaccgacgaaaatacctctttttgtagtagtgagagtaacacgaaaaatgaatgaaagcattactcaatagagtagcttagccctttatttatacacagagattatacaagaggatccaaagcaaaatagaaatgtaacagcattaacagaagtagttaagtatcccaactaacttaaccactaactaataaacccgtgttagctaacagagcctaaaacatgcttaatttcccc

SEQ ID NO: 195421 - DNA, 2030 bp, Cannabis indica
acatatactaattttttttttttgaattctatgtcttaatgggattcctcatatcccttcttgcctactatcatattcaccagtttccaagctcaacaagtcatattcctcctacttttctatacctttcccttagagcttgtcgatgttgacttattccttccatttcagtgatgaagaaggtttattcaccagtgcgatgctttggtactttgagggttcgtttggtatgcagtgttagatactattttcttgcatattattatattaaattgtgtttgtcatattttgtgtaatactatgttaaatttttgtttatttcaaaataatgtacttataaatgctcatataagtcaatactaaacatacaatataaaaatatgatatatatattacaatttaatttaatactatacaatgcaatataacataatacagtgtaccagagggaccttcaaatgtcatagttacagtatgagcaacgtttgtagttattatcttatgatcaagaagactttagattagctttgttttcttcacttggatgtggtgtttatcatttaatttgaagatgtggacatgcgaatatataatttctatgcatagccaactttcttgattaacaggcacaaatggctgtacaaaatttatataaataactgattaaatctttcaggaatagtttatactagtgtttaatttgaactaacatttagacattatagagcatgtatatctggcatgttagattattattattaatgaatttgttgaatttctgcagtctttgaaacgtgctaatataggtagccaatgcttttcttttgctgatatatgggatttgtcactttaatcagacaataaagcatataccttttacctgttacactgaccaatatgaaaatttgtgtacagcatcagaagggaacatttgtttcctatccacatggagctctgcgtgaagattttctctgacttctatgagaacttatgcttgttggtactgaatgagtaagtaattttgtttatcctttttcatgttcttctatttcattcttaatattcaatgtcaattagaatgttcaatatgttcaaaatttttgtaagtgtttcggaaagcttatcttgaaattatacctaatgttattgttgataataatcatgttgttgagaatatgctttaactatcatttgcattttctgaaaattgcccaacttttgattctgataagcaagcatgctcacttaatttttctcgtcatattatagttgtatactatttgcctaatttttcttattagtaagtattagactagcttagcttctgataaatgagagctgtatgacgacgtgggtaaataattaggtgatgttatagcttttcctactttgataggtgccaaatgggattaatatgagtaatttatgtggacaactaagtggtcccatttcaaatgctatgctaaaaagctcaattcataataatagtgaagcgtttgcaatctttaccagttacctttttggtctacatttatggccataatatgcctgcctgccattgctgtggcacaaccaattttgtgttttgtagagctgatacaaagtctgacatgttaaatttctgacggacacaaaattgatcatttttttaacaataaaatcaagaagctataatgctagtgtgtaatgttatttatagccgtgtaatgctctctttaggtaaaaggtgtgaagcaactttgtcttggtgatgtgttgaaagttgggaactcgttgcatctagtggaaaagttgcggatttacctttcatgctattttatgagtgtatatctgttaaaattatcgtgaaatattaaagacaacagcttgaatttacattgagaataggattaaaaaaaaaaagaaaaatttgggcttgttgtctcctagtggattgaaagcttttgtttttacattcaaaattcttgtcatctatttctcaatatatatatattgatatcttgtaacataagatactgcaaagtgttgta

SEQ ID NO: 195422 - DNA, 1662 bp, Cannabis indica
tatatatatatatgtgtgtgttcccatgtatagcccgccaacttgaaacccgccaacccgcaacacgtgaacaaacaggttttggtttcactttttttcacccaaaattcgttcaactcgctcatatttatataaattggacataaagtataaaggtgataggtatgcatgggaatgaccttacttttattttcgtttaataattgaattggaggagcaataatctttctggattttgcttgaatgcatgcctatctttagtctgaatgtacatttaaaacaaaaatagatcccactcactctctatcacattcacacatatatttatatatatgtgttcccacgtatagcccatagaatgtgtaaagcaagtacctagttaacaaaaatcaaatccaaactttaattttattaacgatttttagatcccctcaactttgatatgtataaagtttgtctttaaacttttcaaatcgttaaaaaaaattgagttattgagaatattggattcaaggacttttgtatccaatttcgttcaatttaactgacatgacgattgtctatctactaaatcgtgtccttcgaactttgatattttactcttaaacttttttatgtatcaaattgtgttctctgaactttcattcacgtcaaatttctgttagtaaaattggataataatctaaatctaagtttgagaagaatttttaatgacctaataaatttaggaaacataatttaatacatattaaaataaaagagaaaaatccttgtttttttttttttttttgataagaaaagaatactttattgataaaaccaccatccaacaaccgaaactgctctaaaacaagcaaacaacaaaaactacagtgtttacaaaatcaaaatcaaccttagtcctctcttttagagaatctctattgttactcaaacaaaagcactcacatgttattaatttctttgagtaaaaaaattattgaaaaattttataatgcacttctaaaaagagtattgcaccgatacactcttatatgttttgattttttaaattttttttatagtcatgtacgttgtagttatttaacacattctacaaaattttgagaaattcaaaaaaaattaaagcaccagaaacaggatttaaacaatgttgtacgtgtgactcttttattttatgcatgtgtaaaatagaatgtttgaatagtgctttttatattgtaaattattttgaatcttttaaaattttgcaagatatgttaagtaactataaggtacatgactatgaaaaaataaactaaaaaattcgcctggatgccgaaataaataaggagtatccaatgcactcatttttagagagtgcattataaaaacacccaaaattatataactaatatttctcattaataagaatttaaaaatataaatgtacatttgttggtttgatcagttatgtgataaacatattaaatatattttataaaaaatcctgtccataactactcatccatcagctgtcctctcgtgaatcagtgctgttttacgaagcatctaagcatagttaactcgtatcaaaataaaatgtttgtttgggctcattgacaagaatcatgaacttctatcttaaaaaatcaactggtgataagtggagtaactcatatt

SEQ ID NO: 195423 - DNA, 775 bp, Cannabis indica
ctccgttaactctccggcggacttctctaaatctctccaatcttcacaaatttcattcccaaacacattttccccgcgaaattttcgattatttcttctctattcatcttcttcccccctcaaaatcaaccttctttatcgcgattgaggtttaatttcaggtatatagctgaactcggaccaaaggagctgtttttattggtatgtcgtggttttttctgagtatttcttgaactttcttcttttatgagcttgcatttttcatttgagatcatacccatattggaaatggaaagtttttttttcttcaaagctatggtttttatcttttgggttatcttgaaaatgaagatttttttttttttggaggtattagactaatgggtagttttaattgaattttgtgttttgattttagtactctaaatgcatcatgtaacccctttttaggttcagtactggattttagtgatgccattgattaggttatttggtttgttttcctgttttatatgaaaggtgtgatttttgagaaaagtaagtagtttgtggagttatgatcattctcttggtcatgggatattatttatctatactgaaacttatggagttttgctttattttggatggaattgtttttcaaacaaataaaagttagtttgccatagctttaagggtagtcatcttgatgttctaacctttactaagggctagagttggtcttgtgttatattcttatgcttcctagtactcatctttagtattgtttttattc

SEQ ID NO: 195424 - DNA, 1410 bp, Cannabis indica
agcaaaatatatatatatatatatatatatttattttatatatacatatattctataaatttattactaattaaaagacttgtatgattctacttattagtgcgtattagacgaagaatggacagagttgacaagagatataaaaagtcaaattcatcccaagatcaggttagttcagaaattaaagtttatttatttatttattcatttttaatgaaagtaaagttttaattgcattgtggtaaagtaaatgaacctccattttccctaccatatcaatttattacattttttttttccttcaatgataatttattatatttatatttaaataataaatgtcgagacgtatacgaaaaatatataaaaatatgtatgtctataatttatttatttatttatttttgcattagaataaaaatcatgattcattaatcgagtcatggaagtttccatttttttttttttacattttattactttttttttgaaaaaaaaaaaattaaactaaaactacgattatatttttcttatattatatttaaaccggtttatagatttaagatcaatatattttaaactataataaactaagtttaaatcaaaattaaccccatctgattatgataaaaggatatttgctacgattttattatatttttcaaattatcaacttatataatatatttaatcacttaaaaatcaagtacattgatggaactggcggtgcaaatgcttttggaatggagattgattgttatctttatattattgtcgaatgtgtcgatcttccttttgttttatttttttttcccttctcgaaagaaaattaataaataatttataaaagcatgtgataagtttgatccccatgaaaaaaaaaggcgattttggtggttattgaatgacatagttcttgacacaggtggtcccacaattggaatacagaagaacaaatggtgataaagatgagaaagatgatcacaaccaaaatgtatcttgactttgacacttgccatataccataaactcacaaacaatattgctttggtaacttccttttttttcccaaaaaaaaactaaaaatttattttctaactaattaatcttttttaaatgcttaataatattgtaagattaataataactttgtaattaaatctaaagttgattctcatcatattaattattaattaattacaggaggaataatggtgattttgaggaagttatgatgatttatactgagacaatatcgatcgatgaagttgatttttacagcaaaagctatgacattaattaaagtagtactttgatactattgcagttattaggtggtggcatgatctggttttggtacagggaactataggttattaattattattattattgttgtaaattaattgc

SEQ ID NO: 195425 - DNA, 971 bp, Cannabis indica
tttttttttttagtatttttacatttgatatgtaaaataatattgtccaataatcacattaaagatacttatttaatttcaattaccgctcaaaagacataatagtataaaaacggtaacccctttcatcgaaaagaaattattattatcagctactacataataatgatttgatagcaagtcattgaaagaagaattaacaacaaaataaaaaattaaaataaaatcatgtcacacacagacacgattaaaatactcaaaattatatcacagagacaagactaattaaaatactaaaatcatgtcacaaagacaagactaatcatagtatagcaaaattgaatcagaatagcgcaaaacacaactccgaccaagtcgcaccatgcccaaaaggcctagccaaagaaaaaaaaaaaaaaaaaaaaaaaaaaaaaaagaacccctcgtgtagctataaatttagaaacaaaaatcttaattttttaatttagttaatgttaatttttattttcattcattacctacaatcttcgatctatttttttgccttatattgaaaaagtgatactcgatcgaaaacaacaaagcttagtgacaggcccgagggagcatagacaggttaagcatgtgctttggacccattaaaaatgtacatttttttacttattttgaagaatatcatattatttttctaaataagtgctcaaaaataattttttttttatgatctactaaatttgatgatcagttatgcttagtgatgatcaacaaccataatatataaaagtgttataataaaattaatgaatatacagtacgtactttaaactaatcagtttgagttaaaaactgtaattttattaaaatgtccctcattattatctcacgacaagaaactatttttcgagtaaaaaattaatatcttaaatttatttctctttttaactgatcaattagaaaaaaaaaaaaaa

SEQ ID NO: 195426 - DNA, 1114 bp, Cannabis indica
tcatatatacatataaattttactataacaatataaaatatagttactcatccaaactaaataaaaatattgattagttcaattagatgttggatgtattggatttttagacacctcatccaacatccaatctgatccaattggatatttaaaaataacatccactctgatccgatcacaattggatatccaatatttggcggtcggttgtcattggatcggtcggttctcattggattggatcgattcatgcacacccctactttcaatatcatgtaatagacatggcacttgtattgccattgttattgagtttgtaatgtatatggtactggtttaggtgtttgtataacagatattgttaatgcaacttttgtgatcaaaactgaaattgttaatgcattatggtactgccaacttaggtatacttgcttacagtttttgatacaattgtattatcaacttaggtatatttacttgtagtttttgatacacttgaaattgtgttttagatacaattaaaattgtgtcaattgagacaaaacctgtaattctattttcgcttacaatcacacagttgccataattttattttctttttttcaaacaaaacatgtctcaaacaaaatatgcttcaaacataaattgtctaatacaagatcataaagaaagcaaaaagataacatatggtgtttcacaaatatataaacctgcgatcaaaaagatcatacaagataacattcaactactaataccattaacaaagcacaaggcaatgttttaattttgtatcacaagtacggattgtttgacaaaatatataatatgacatctaaggtgtttataagattataaaacagtacctaacattcattacaatatattgccataatatttccacttataaaatcttatatttctatttttcacaaaatatggcattaagattaattacaattccttaatccaaaatacaatacaaaagatgaaaagtgcaacaactaatgtgcagatgatggtggttgaataattattgattcccttgcttgttgcttgcttctcctcatgtttctcttaacagtttgaggatttggattctttttgggaggacgac

SEQ ID NO: 195427 - DNA, 1197 bp, Cannabis indica
aatatcaacattttagtctctctcagttaccttctttcccattcattccccaggttcaaacaaagcgcgtgtaaataaccttccttaaaccaatccagacctaaacaacaaaaaaaaaaaaccctatcttctaaatatacaagcattaagcttagccaaggtatataataggtcagtcagcattgccacgtggagcttaactgagggccccacacttagtgaaatacgcaaaaggaaggaagcttaagagagggacacatttttaattctaatttttttaattatttattttttttgtgttgaaaaaaggaagaaagggttgtgaatgagcatctactcccccaccagacacaaaaaacagtgatacagagacccacatataaaaacccaccatttatattcttccatatatatatttcaattacaatacaatacatatatacataaatacaaactctctctcaattttttacattttcttttccaatcttcacaaaacctcatctttttctttctctctcttcaaatttgaaagtcgacatgagtgacgacgattgggtgaagcttgccatgaacgacgacgtcaccgtcgccgaccttcttttccgtttaagaaaagctggatacgaacgccgtcgccgacctccaccaccgagacaaccctctcctcctttgaagctttattggagcgtgagacagagacggtcttcgaagcctattgtgaagaagaaaagtgattcaaccagagctagccctaccacaccgctttcgtggagcggtgccacctctgtcagcggcggcggctgtgccatcgacggctttgaggagtccagtaagccgtctaagcttaccggcggcgcgagatctaaggtttgtgaaaaggttttttgtattgttgactgttgagtttctcttctctttcgtctgtgttgtcttttctcttttccctgattgtacggcgacgaggtttgtcgtgtggagagagtcagtcagtcgacagttgtgtttggatacggtgtcgttttttcgctctttttgcttatttttttgtaaggactaaaatgcccctggtcaagttaggtattttcattacttccattatttgttatctgcgaagagagaaagaaagtcagatacgatggattctctctctctctggttttccaaacctgtcagattttcttttctttttttttt

SEQ ID NO: 195428 - DNA, 1108 bp, Cannabis indica
tttttttttgggagtgagtttgaaattttaatatttgttatttacagttaccgtacgatattccccaattggtgtgttgttgtggttgagcattttgtcgtacccatcccccctcagtagtctcagcatgacctgtattttgtctctaatatgtgctctctgctgctctttgctatgctgtgctgtgcaaaccacacatcaatccaggtgatatttataacggaagtgacagaaaatagttttcatttccattctttcccaattcgaaacctttttggtcaaaattttttaaaactatttccaaacttagctaattctgaattttcaaaacaataccattttcagcttcaaactcttcccgtgaacacttctcctctttccttcttcccaataagctccccaagtcccctttacaattctttatttttattttttttaaaacaaaaattctctattccacactttgaatttcaaaacagcaataatcatttcctttttcttttattttacatagaaaaattaaataaaatacttacagcagcagcagaagagaagaagttagtgtctagagttaaagtacccattgggaagtcataaagtcaaagaactttttgcacgattttctaaatttacctgtttaaaaatgtatatatgtatactcatttctacttcaaccaatacatacaagtaaaaatctcatgaacactttcggagatatacaaaatttataactataagcatttttaaccttcataaatacatacgatcagtgaaaatttgataactatatggcatagtttatttcagttttgtaacccaataaaagtttcattctatttattttgttgagaatgacaaacgagtttatatatgacaagataatatatattttttgaaagcaacaaaatattatatattgagagatattaatggtaagttagtgcaggcacatgactgtacatttataatatatagtagctgtttggcgatacaaaaactcatgcatcgagtttaattacaaatagtaaatcatgcaactaataagtttctctaaagttatgtactatattggtaccaaacacgacacacatatctaacagttaatgtg

SEQ ID NO: 195429 - DNA, 1644 bp, Cannabis indica
caattccctcactatgaccttgggcttttacagtaatagcactatcaaagtccatatataatctggcccgctccaccacatctttaccacaaagagtttcacataaaagaataattttggatctcttttgaattccaaatcttaaggaattgtaaattccgtaagttctcaagcctccggtaatttcaacttaaagtggtcataattctcagcaggacaccagtacccgccccagaactcaaatcctagccactctccggatgctattggggtggataataaaatttttaatatagcacgatttatattttttattttttatggcataacacttgtccgtattttggtgagcacatataaatattgactgggcagcacgacacgaatttacaacaataattttgattattaaatatacacacttcaatatttaataagactactcttattgtcatataaataacatgtggttggctatcgaaatcgtccgctggattacgtctacacaaatagcgtgaacagtaccaacgcgccaaatttggttcgtacaccacaatctaccacgtgcaaagaacaaaataggattgaaagttgtagacgcgcctaaaagaacgggggatagagaagaatgatagagaccagcggcagacacacactcggggagcaaatccgaggcaaaatcttaaagataaaggaaaaatgaagaagagagaagggtataaacgtaattaggtaatagcaccgaaacaacaatgatgataggacgcggcttccttaaagatggacgcgtaccggtaaacactgaaacacgtgtctagttctcacttgctggacccatttcctcactcgcacttcaccaacagtatataaaaaaaaaaactgatgagcgattcaaacggattttagagagacagtgacgtggccgagatctctcatagttgttggaattggtcgtcacctcatcctgccacttatacaaattatggcttgcctttggcccactcttcactttggagcgtatgcttaaaattgatttactcttttcttttattctttacatattaaaaaataatgttttttctttttaaacaatttaatgttcttttcttttggtttgattgcttcaaaaaaaaaataatgtttgattaatacataagagactgcatgagcatggataatggattctagttttataattggcattttattgaaaactttttaagggaaaattaaataataaaattattatgagttcttttaatgcacaaactccaaataaaagaaaatagaaataccaaacatgtcttgaaaggaagaaaaaatgtatttcacaagattttttgcttgatttgttcatgtcctgaaagaagtatttttaccgttgaatatgtccaaaatttaatacataaattaccgaataatctagtttttctcttcattttaaattacacattctttttgaatataatctgccatcaaaaaataaatgaacatacttaatttataaagttaacatgtttaatttatgatggcagattatattactaaaaaaaaaaaaggtgtaatttaatatagagaaaaagttaaataagaaaaggggatcatatgcttatttcaaaaatttacataatggagaaaaaaaaa

SEQ ID NO: 195430 - DNA, 3757 bp, Cannabis indica
agtaattagtcttcataatgttttttaacattgctatcgggtattaatgtactaaacatttctataacacgattttttttatagttacttagcagttttctataatatttattaaattatagtatgtgtggaacttgaaatttaattatatcaatagtaatattacaccgattacaaaagtactaggcatcataagtaccatttagtatttttctaattatatagataaattagtattttatttgaaatttagagaagttttgtatagaaaaaaaatattaatattaatatttttaaaattaggttccaattggcttatgtacctagggcaatgtcaatattttttttaatctattttgatatttaggagagttttttagtttattttttttttcatgatatattgcatacgttgcagttagataggtaggatctgtaaatttttaaaaattttcaaataatttacagtgctgaagataagtttcaaatatttggttgtacgcacgcgcgactatatttttcttatacacttagtaatcaactgtttgaactctattagagcactgtaaattatttaaaaaaaatttaaaaatttacatttagtcctaaataattaaaatttacaaaaataaaactgaaaagtatatatgaagacataatcaaaatcagtctcactgtgatgataaaccctaattaagaattttttatttatttttttcataaagaaattaatgtatagacgtatcactttatgtaatcatcaaactgatattttcttcctttttttccttttgaaaataaatatctcaattatatatagacatatatgtatatatatgtatgaatgaaggtggtgtggtgggggtcttgttgtatatatgatgtatatatatagacatacttgccataaatatatatatatatatgtaatataaggtaaggttcatataataatatccaaattttcgtaaagtagtactatactatttggcagccacaaagtgtggccaacctttaaaaagtagtgatagaacatatatttatataataatatactaataattacataaatgtattattatgaatatatatatatacgaataatataatgtcaataatgcactacgtacacattattgatcatcatatcatatcttcttgctaaggtgttagaggtttttattggttatcgatatatacatggctagtttcatgaatatgtgtctgagtgtctaatacatatatatatatatataacattattttcacctattttaatttataaacatgagattagtttttttgttgggggttttgatatgaagccaagagggacaaaaaagtagaagaaaagaatattaaaaaatctatagttaataagttaaagtagtatataccaactagttgatgacatgtgtgcataaacctataagttatagctatattagtctccacacaatatgtttggatatgtaatcaatcattgcatatattttaaatcttatacataaatatttatatggagtattatgtatgtacgtatgaaattttaaaccacaatttttatgtaaggatactatgaagatgggcctatatatatacaacaagtgtatattattatttgcgtacgtatcatatttcactatcataaactttttcttttctcttttttcaagatttcattcgttgtattataatgtttttcatgaaatgtatatttttatataaattttaattaaatatattgtatagtacaattgttgtcaaagtggtcccgacaacaatataatgaattatttaccattgcctatataacacccatagataaatatattatagttattttttttttcttggtaaatcagctcatatttgtattattcaaaaaaaattaatataattacaatctgaattcccctctatctcttctgctaatcttctttgtattcagaaaatgaatttgtgatacaagcctctagatgtatccttcccacattacaaaaaaaaaattattttcggtgacaaactttcagtgacaacaaaatatttttgtgactagaatatagtttttagatacaagttaccactaatttacttttagtcacaacaactattgtgactaaaaatatatttaattacaactaattgtaatttttgtgactcatatctttagtcacggatcttttagtcacaacataaaaataataatttacaactagtcacaacttttttacttttagttacaagttttattgtcactaaaaatatatattttttttttgcagtgacaacatgaggtcaccattggtacttttaggttggaaaaagcttcattgtataaccttctaattgtacaagtgtaagtgatttatttgctttaatttcattctagataaaagggtgggatccaaaaaaaaaaaaaaaaactactcatgactaaatgtaattttagtaaaaaaaaagaaaaaaaaaactacttataactaaaatatagcatattaagatacaagtttgtcactaatttattttagtacccacaatacttgttgtgactaaaagtatatttagtcacagcgaattgtaatttttgtaattaatacatttaaccacggaccatttagtcacaacgtaagaataataattaattataattagtcacaatatttttacttttaagtgtgagatctcaataccaacgccaaaatggagcagacgatcgcttttttgcaaatgtctcttcaaagctagccaagaaaaaaaaaattgtatttagacacactcaatttatcccaaataaaagtatattgccaactcccatcttcagagtttatatagagtttatggtataccttaaaataaaaaaaataaaaaaaataagctcgtttttaaataccttaactatttgagcccaataccaactacttatagatactttataattcttccaatctccctcttttaaatacacactatgcacacacttcacccaaatattattttccttagccccaatatatttccccattgcacacttattccacaaccccacatctctaaaaccaagatccccttagtttttagctttacaaacatcatcccaagaaactctaccaggaccttcgtaatttgaatttcctttccatcaaaaagcacgatagatttgattaattcttttaataactattttatgtagaacatcaatttgagcccaatatgtattaatagtaagcaaaatagagttaattaagtacacacattcccacaaaagagagattccttgtaactcattgtccatattttgtgtcgaccattttatcaattaagcactcaaaatctgcctttaaaatatgcacttcttactgatcttcatgcccaagtaattgaaaggcaaggaatcatctttcatagttactccatatattgcagacttacctctattaagttagagccataagctttctgagaacagctaaaatcccccttaataataaggattgatgtaaacgcacctttcctaaacataaatagatcatctgggtaacagatcaagtgagtgaatttcatattttcacacctaggatggactttgaataagttaagatgatgagctaccttatccatgatcttagtaagatactccatttctaaataaaaaaaaaaaaaaaaacgacgaaacgaaggacaataagtaacgttccttcgttcgcaaacctctttacgttcgtactctagcacaatgtgatctcccctttaactc

SEQ ID NO: 195431 - DNA, 2144 bp, Cannabis indica
tttattgatggattccttgccttcatcaccaacgaattcgccaagttctttgaacttcaaatcccctgcttgttctgcacccgaatcgaccacgttcttgtgcaccgaaaccatgatttctactacaacgaatcggtctgtgaggctcacaagaaggatgtctcctccctagcctactgccacaatcacaagaaactatctgacattaggaaaatgtgtgaagcttgtctcctttctttcgccactgagaaggaatctgattgtggtacctacaagtccctagttggaattcttcacaaggatcttgaatgcctcgtagaagatgatcgccaccatattcatcttagtctacctgccccaagggccaaggatgaggcttttcagattgagaagagtgacattatcaggtgttcttgttgcggggaattcttaaagacgaagacgaagacgaaatcaacctcccattctaaaggaagacatgttagtacattttctcaggctccagctccttctccacgagctacattttcatccatacaaagaccaagagaacttaaacttatgggggattccgagtttctggaagaagataacggatcccagccggttacttctgattctcaatgtgagtaaaaacatgatttgtttcctaaccttctatttcatgtgtgtatactataataatggattttgtgtactagtaagggaagatgtcaaagctgctatggtgccattactaacagaggctgatgatttaaatgatgatgtcaacaagaccccaaattttgtaagaggaaacaggttttttggaatcccacttacagattcagcttcaaacagtccaaggtatggtgtgaggatttcaaggaaatcaccactggagaaaacagagttggcttctgagcccatggaagtgattgctcaaactccaaacgacgttgatatcgattcggtgttgcatggtttgaagagacaagttcggttggacagaaaatcgcttattgcattatacatggaactggacgaagaaagaagcgcttcagccgtggcagctaacaacgcgatggcaatgataactcggttacaagcagagaaggcagctgtgcagatggaggctttacagtaccaaagaatgatggaggagcagtttgagtatgaccaagaagctctacaagatacaaacgatttgcttttaaagagagaggatgaactcaaggctttagaggctgaattggaggcttatagagaaaaatatggatgctttaaggaagaagaattcgatggctaccaagatgaggttggtggtgatcagcagcaagaggctaaaacacaaccattgccattgattggaagaactgaatcaggtagctctcgttttagcttgaatatagaggaggctaatggcatatttggacacaactctgaccaatctttctcaacactagtgggggacaatggaggaggtgaaatcattgatgaacctgtaattaaagaactcaaagaggagaaaatttctattattggaaggagaaagctggacaagaaaaatcatttgtctgaaaatggattccatccattgcaatccaacagtgacggtgagatagataacaaacaaatataaaagatgcagcaattttttttggttatatattatttctacttgtcagcatatatatttacttatggtgctataatatcttatatggttttaaatggcatttgacagagactaactccccataaattcacaagaatggaaaagtggatttctcattcagaggattaagaattatgtgatgtaatttcaaagaaagattatagctatttgtacagtcatcgtattaatggtataagaaagaagtgatggtattttctgatatgtaatgtaaggttgggatttggtaagaaaagtgggacggtccctcctttagaactgccatctttaaatatttttgctttctttttgagtggaaatgtactcttaattcaaccattcactagaagagggaagattcttgcagactaatttaaaactttgcttgggcattaaatttttttaatatcctttcatggacaaagacacgtactaaggacaaagaagggaaggcatgtcagttagaaatacatgtgagttcaccaacaaa

SEQ ID NO: 195432 - DNA, 3601 bp, Cannabis indica
cgacctataaacagagtcaaagaaccatacatcaaggaaattttaatctatcagaatgctgcaaccttatgattctttaattagtgtttagatccatatctcctcggcgcatgtacgatttcatctgattcacagctatacagatagtgatcatgtccattttaatatagttaagattggtgagcaaaaaataactactatcttgaaggaaatattgtggatattgtctcacatagtattaatggtagggtagtattgagagatatataaaaaacttgagctactccactcatcactataattagttttgagataaaatcccataattcttaacaagtcaaaatgatcgtgtaccaccgcctctaatccaacacaatgatggtaattttgactttttatcaattttttttcttcacatggttaatacttgtagtgtttttatttatctttacacttcacggttaatctttgtctaatatgaaaggccttcacggttttttgttacttttggggaggcacatttaatttgtatattaaaataaaatattaaatattttgtcaattgataaacttatatattattatcatagacaatttttttttatattggattgtatcatagatactataaacttttcaatggaaaaaaattcattaatttaagtatcaattaaattgcttgaatacatattatattcacaatgtggatccatgattctaaatttaagttcttactattcaagtgtgattcatgaatcatgaatgaatttgatcaaaaaataaataaaataaaaattaatatatatattttttaaaaaaaggatcaaaagtttaatataagctcactattcatctcgtgatcataattgtgtaactttattcaaacatatttttataaaacttccaaaataaaaattattttaaagtatacaaataaaaacaattataaaaactatacatacaaaataatatttataataataatttccaataatataatatgttcaagtagagactatactattcttattaaatataatactatatgcatatatgtaatgtatgataatctaataatgtaatcccagcccacaacaccaacctcgtgctcccaaaaacaaaactctttaaaccaaaaaagtaaaataaaaacaaagaaaaacagagattttgtctaaacactccaaaccatagcataaattaatatcaaaaaataaaatgaaaaagaaggataagaagaaaaatgagtttagtaggtgtttttggattgttctcatgagaagatgtgtggggcccacccaacccaacactctttatttattttattttttttaaaaaaaaaattgaatcatttcaaattattttttattttgttttgttgctgtagttgtttgttgaaggttctgatgatgtggaccttataatgatggttgggacatgcaagggaacatttttgacagtcacacagtcattctcattctcaattttctttttattattattattattattatttttatattggtaaatagcggtataagttactaaacttttaagtttataagcgatataaatttaatagttctttttaatggtataagtaactaatattacatatttttatctaaacttaatgatctaaaatctgggtcttatatatgtattgtttaagaaaataataaagcttgtactgataaaattaaaaaaaaaattataattttacaaatattagataattatattgttaaaaataaacattaacactttagttctatttaaccttcttatatatatttataaatataataaatacacataacagtaatattgtttctatgcacaaaaataaaataaaaaaattaatagtagaaatttaagaatatagttatagaaaagaaaaatgtaggtaaagtactacacaacataacagggttattatttttggagtaaaaacatagaaaatagaaacataaacaaatagagtacaaaatatagtgtaaaaaagctgatttggttactaattagtggaaggaacactatactagatattgtgtatttgtctgtatgtaatgtttttatctgtttttacctaatataaatatatatatatatatatatttatattggttgggttcgacaataaaaacattcacttttgaacttcacttgtgtactgagtggaagatcattaatggagaaagagaattaatattttgaacatgaatatcctaaaaaaagctacacacaaaatttatatatatacataaatgtcactttttttttaatttactcacaaaagtggaacttaatttaaaatgtaaaggtaacattatttttcaaaaatttgatgaagtaatcatcctacttaatgaacatacatacattcatattataaaaacataattgttgttttttttttttttgaaaagaaaaacataattgtgtttgaatgtattttatactcgctacaaatttttttaaaaaaattataataaaatttataattaaaagtaaaaaaattgtaaatgattatattttattatttttatgttgtgattaaagacattaatgacaaaaactaccatttattatgattaaatatatttttagccacaatttattataaatataactaaattagtgataattgtatattatcactaaatataactttttttttttgtagttactactctcttcataattttaacataatttaattaccgaaataatttgcaaatttcaattatttgagtggttgattcattaattttatgtttggaaattaaattttggtgggatcgagaaagaaaaattatgaaaaatttaagaaaaaaatattaaaaaaattacaataaagaaataaattctcatgttagtatggaaagaaaattatggaaaagaacttgaccaatcaacaaatattttcacactaaattaatatgaaaattaattgatttttctttttattcttcacacttattacatttttaatctaacttccaaatataaccaaggattatacatagttttttttttaaaaaaaaatgctggttgatataaaaatttgaaattaaggtactataaatatacatagtatatatgtatgtaaagcataaagccctagctataggtattaaagctgttataagatacatagaattttgacctagtactttctctctctaaaatatatatatatgtatatattatattgattaatattatatacgatcgaatcatgattcaaatcacagttgatccaaaacattttgaaattatgcatggagacaaaaaccaggtacatataatatatatatataattctttttacatcacaatcgaaatgattaaggttaaaaccatatgtttgaaaaaataatgaactggttttcgtgatctttttaattaatatatttttagatatttatatatataattataatgacagccggggtcattattgtcaacttaattagcagtcaaaaagaaacatatttaccaagactagtatcatcatcatcaacataataattcattctttaaccaaattataacacaacaaatcaaccaactagtattatatatataatatataata

SEQ ID NO: 195433 - DNA, 1366 bp, Cannabis indica
caatgtggtatgatattgctaagttcaaacatatgaattgtatatactatatactatagtaagaaaaaggcaagttcaaaagatacaagaaaaagaaaattaaagaagcttttttgggacacttaaattactttattttgctctttttaaagaaaaataaaattgttgtttttttctctttgttttctatttaaccctctattaatgtaatgatgacattaatattaatatgtcctaattcagatatcattatcataatgaaaacagttgtttctgtcacgattagataccacgtctcatattttttattgtcttgtcaacaagtaattaattaagttaggttgctccattcatatataaaagtataatataattaaagatgttcttgaagctagcaaaaagtctcaattgattttcaagatgaaatttgccctgaaattataaacatatcgctttcaaaatttaataaaatgattttataaatttagtttgattacaggagtttcttgaatttagtttgattttataaattagtttttcaattatttttgtcttaattaagttctgaattttataaataattgtaaacaataacaattaacttcgtataattaaattcataacaatgccttaaaaacaatcattaatccttgaattggtcacaaagctgtactataatccttgaatttgtcattaattagcagatataacccttgagagaatattaaaaaatgtcaaaatttaattaaaaattaagtttaatgacaaaattttcaaaaaatgattcaaagcttagttacacgtaacgtgtagtctagattggtgtataataagtttgtgtcttatagttcctttaaattaaaagtttctaatatcattcttgaaaagttatttactctaaaagtcagtcttggaacactttcatatactatgattttacagtttttttattgcgttgaaagtttacatatatatattttattgaatttaatggtttagttatatgcttatatataattagctaagtgtttaaggtttagttatacgttaatatataattaggtatgttcatatataattaggtattacttcatatactattttttgtaatttacggtttgtgtctctaaagtggttgcaacgctagttgtaataggggtttctatacgattttttgttacaatttaggttgtatcgttagttgcaatatgagttcctatgtaaaatttcgtaaaaatgcaaaaaaatattattttgaggtgtaaaataaaaaagtctttttttaaaaaaaaaaaaatagttgggtcaacttgccaattcgcccggacctaacctcgatacccgcaaacacatggataagttgaaa

SEQ ID NO: 195434 - DNA, 1552 bp, Cannabis indica
taagtatcttaattagtgatgtggtccatcgacgtggcaacacttgtaactgacgtaagtctccatcacccgggggcattctgggcatttcatcctatccggagctttcccggcgacaacagggacatcaagacggcaacagtggcgaacagtttgagtgaccttagtgtaatgttccttgaaagctacctcgaaacccttaaccttaatggtctccttccacagttcaaactcctcaatgaccttaagtatggccgagccatggcctgtggtgaccacggaagatcctttgctgagaacagcccatgcactctcgttcttgtaagaaagaagcttttggatctctagagttactgggtcaacgtccttgttagccttggtgaagaacaagctctcgattccagtccagaaccgccctagaatgccgtggtcttctcctcctttggctgtctttcctacgcaaaacagttcgatgttgatctttgcttccttgaggaaaggatcgttcacgagggctgtgactttcttcgtgaatgtctggatcaaatcgttgtcttttccaccatagaagaagatatacttctcctctttcacctgttcatgattaattaattaatatctcggtgtaacatttttcttcaaagttagtaaaaccacaaataatgacacaaagtagggaaagtagtgatactgaaataaaataataaactttacccaagtctcgatagttgggtggatgttgttgacaacaggaccaatccagtgaaattctctgtccatatcttccccagctttcttgttgaaaggaaaggccttaagaccccaaactctaataagatgaaaagcattgaggttctccactttcccttgtgggttggtcaccaccagcataggcttgccctggaattgccactcttccttaatgaactttatccctgaaatcggagtaaatagctgcaaactgtaccatggcatctttgatctcaaaatctcgtacttcttcttcagctcctctgtccattgttccacaattggaatccaaacgattgcgtagtttgtatctttctttgtaattatgtcgtaagtaggtttgaggatagtgatgtcgtcgtctgtgatatcaaggctcgagaagaacatgaacactgttttcttccttagtacttcgattgtcaccttttataataacattcaaggaataaggttaattaaataaactaagcaaagtgaaagatctataagtgtagaaagaaaaagataattaccgttttgtttgtggaaccatcaataagtggctgcacattgttcttctgaaagatcaaggccttgaaaatctccatgatttcagttggggttcgcatgatctttttgatttttctgtaagcctctgcctcctctgtttcaagtacaaaattctgttattaaaggtatctataaatatatatagaaaatttaatgagcaaaatgtacaaacctagctgtcttctgcagatagtgagctgcatattaagctggttgagaatgtaatggattttttgagcataaggggaca

SEQ ID NO: 195435 - DNA, 1487 bp, Cannabis indica
ggtgattgcagttgcacaacgattaggcaagggaggtttgcaagtgtatgagtttgagtacaaggttgatagcaccaggggaggaatgaagagggtcttttctgcggcatttgttgcttcaaagaagctgtatcttctcaatatttctcactctgataaacctgagaacccgctggacacccacacaagaacagtactggagcaagttcttcattcatttgattcagctccccttgtataatgtgtaagatggtcatgccttggtgctctgcagcttatgtaaattcgaattttaccacttgtaccaaacatttgctggccaaggtaaaggcagtctgaaaccacaatgaaagcttgctttgttgtacatttctagtcatttcatagcataactttgagcatcctagttattgtgcatgtatgcctaatcccttaatgcatatgtgcacatacgtgatcgggcataatcttacaagctagagacttcctttgtttctttcctaactctttgtttttaggataattgatcacatcattgaatagcataaaaacacatcattaatactaactctctgtttcctctgtttcttttctaactctctgttttttaggataattgatcacatcactgaatagcataaaaacacatacttaatattcatgtgcataatatgcgtgcacaaatagacaagcatgtatccacatgtatgatagatagggggttaggtggggtcctagtttcaaaaaagaaaaaaaatgtagtcagtgtacttggcctctgaagcaaattttaactcattgattattcagtattgtgtggtttgaaatatgggatcttggaaattctgttggatctcacatcatagtttgaatcgaaacttaggctgctaacaactagtttcagttttcctttttattttgttctttgtgtacgggtcgcattgctccagaacaaaaaaaaattaattattgattctaactggattattcaaaggtaaatctatggaaagaagacgggattttttatggacctccatttgtatactggtcatgattcattgtgtattttctctttggcaatgattattctgcttattatgagtatgactagtgagttaaaaaacttatatgtgattgtagttttagtgaaattgaagttaaagaaacaattctgtaattttattattggtcttccgatgatgtaattaactattaagatgtaagttgaagcactggtgagtacaatgcacagcttttgtgtgcctattttgcttcatgttatcagatgtttgaactgggaaattttcaaacacaaatgaattacaagctgccacgtagcacaaagcccaagctgaatataaagagaaggataggcaagaataagagttgcaaggcgtggtcggtgaggttaccacttaccatagcatttttctcggtgaaataagtccatagaatgaaagacaaacactttaagttttttttttttt

SEQ ID NO: 195436 - DNA, 1722 bp, Cannabis indica
aaaaaaaaaaaaaaattactccagcaattacttttaagctgaggctcacaatctttttggactggaggtggtcagcatagtttatattatctggattattgaataacaaatttgtatgatgagaagtgtatgctccaccattgttagcatcacatcacacggattcgagtttgtgatgtccagaatttttttttcctttgagttattggataatttgtgtttatacctagctttatcaactttgcataaatgtgttactgtttcttagcgtcgtgaggagatcatactctggtcatgttgattttggatctattgtggtcatttctttttctcctcaagcctatgcactttgaatagtcttgagatgtgtttcatggaagaaactgcaggattttggtttagtttgtctttcatttgctatttagttatgactttcaggacaggatgatgttttaatatctttatttgggaattgacttttaattgcttctcacctttgggggtataatttatttggagctccccacagggttttataatatagttttgggtttcacctcatttgtctataaaattggttatcatttgattttcgcatagaaattaatgtagtttgtgaatattgaacttgggcgagttcacagaaatttagagcacatttttctgttgttctaatcctatatagcttcttcttctggtacagatttcagtgttccatttataatatcgttctttatattgctttttattacagttgaagtggaaacaggaggtgaaggctaaacagatcgcctcaacagaccttgtagtagaaagacgcttgaaagaatcagctgagattagtagcaaaagaaagcttgaagctttgcgcgtaaagatagagctagattccctgcgtcacaatgatgatgtccaaaggcttgaggaggaacttgcacatttaaaaatgctatctctgtatactgagtcgcatgaatcatcaaataagttacctactgggaactttaaagggatcaaaccccaaggagagacaattggcaagccgcttcgtgaaccagataatgtagatgattcttcaaaagaagaaaactctgataggaaatgcatagtttgtttgaatgatgatgtttcggttgttttcttgccatgcactcatcaagtcatgtgtgctagctgcggtgatgattttggattaacaggaaaagctcattgtccctgttgtcgggttccagttgaacagaaaatccgagtttttggggcgagttcatagccggaacgaacaaattttgcatacagtcatttcggagagatggccacctgatttgctttgcattgtgatttggtgcatcagcagaaacaatgtaaataaaaagaaagtatttttctaggtttttttttcttacacagaatatgtcatgttggttttgccattggcttgttgctttgtaacataagccaatggtttttttttgttctctggaaataagccaaagtttcgtaaaacatttgagccatatgatattggtattcttccaaaaaagaaatgtttatgctatttttttaaaatgatttgttgatgtggtataacagtagaagttgaccaaatcatatgcatatattttgtgtttgacttttgaataacgtgacattgtaaaaagttatattgagaaaaagaattacattaaatgtgtttcttttaatacaagtttggtacatatatga

SEQ ID NO: 195437 - DNA, 1370 bp, Cannabis indica
cctcttaaagccttaataccaaaccacctctcctgggccagtctttctttatttttggaaaagaaaaatacctaaaaataaactaaatgtagtagctagttggttgaaaaaagagaacccacctgagctatggcagcaactcgttcggcaagagttccatatgcctgagacaaatgctttgcagcagccgtgtccattacaccaggaacaactttaccaccatgactcttcttcatccggatatattgttgagctagaacagtaaaggatgcaggatcccatccatctccaccaacaatgcgtagctttggcgtcacacattcatttgctgggctcagttttccagactttatcgctgcatcgactgcatcttcagccatgctgaaaaagttcacgtaatacagggtaaataaatctcaaaacaaatagctgtcacaacatgacagacaaagaaaaacagggtcacagaattgcaatacattcaattgcaaactagttctgtacaagagcacaatagcatcatttctaacattttccatgcgcaacacactattatcagtagtgatacatgacactattatagaacatgtgatatcgtgaaaatgaagcttaataaaacaaattgaggcatcagaaaactgtaaaaaattgatggattagatgtcttgatataaagaagcctgaaaacaagacctttcttgtattgaggtgactactactggtgaatacgtgaaaactaaaacccctttatgtgttcagcatgccaaagtgaaagttacctgcggtatgtagtccactttcctcctgtaattgtaaccaaaccagggtattcttcacatacaacatgatcccttgagatgctctctgttattttttgctgatggatccactgccaacgggcgaataccactccaagcagaaagaacatcagtgcggcgtacctacatttttccagcattactaaagtccaacaagcacaattcatatataaataaaagaaaaatagaaggaactgaatcacaaatacaacaagccttctcacagcttaacttaaaagagacatgaaaagccagccactacactaacttttcccctcttaagagatatgtttattcagaacaatgatactttaaagtaagttgtcaaaaaaataacaaacaaattagctgaaaataagctgcctgtcttgtctttatttgacttttatgaatgtaaactttacaatctgtccaggtgatggaaacattttgcgtataagaaacacatcaaatgtagcagtcaaataaaagaatggaacgcaaaaacatagtcagtgcatgctagtctggtcatgtttgtctatattttatattcactaagaaacaagacca

SEQ ID NO: 195438 - DNA, 2580 bp, Cannabis indica
ttggcaagatcataggacttgcagcgaaaagggatgccatacacttgaacccagaacgggatataatgcagaaggtcagcagtaataagaaaggagtgatttggagatgcaaaaccagtcaggctttgagcatagtgccaaggctgcccatcaaggattctcttcttgtcaccctcacaaccaaaagtaacaagaaacaatccctctgagtgctcagaaacaacaacaggaaatcgacactgagaagtccacatttgcgaaagggttttcatgagggagggatgactaaagggacgaatggtaaacaaacgcatgagaagatttatggaggggtgagaatcgtcaggaatatcaggaagagtgaagacatcactctcatcgggagtaacaagggaataggagctgagttgggagtcatagccatagctagaaaaagttgcagaaaaaaaacagataagaaaagggaataaagaaggagatacctggagttgtagcctaggatgcactttaaatagaaagaaccaggaagtccacagatcagcacctctacgattgcaggtcagagcctccacttcactaggagtagatctcatcatgggatgagatctttgagcttcacgaaggccatctttcttccttgccgccataaatatgagataaaagggctctttgagaagtggaatgatttgatagccaaagattaagagaatttgtgagagcagagaggaagataatgggggctgaaaaggatctaagtgattagagaagtaattaatgtagtcagaagggaaagaaaaaacaaaaaaataaggatttaatagatgaaaagcattaaagacacatttaatgctctgaagataatcataatagtatttgattaggagatcggggcaccagaaaccaccacacaactctagtgggtggaccaaaaacccatttcgggtaccaaaaagggaaacacacacaaggtacttgaacattctagagagaaaactttcctaaattgcaacgaagattgtgtgttaaaataacaaaaactcttcagtttgagtagatactaactcatacaaacgaaaatatacattgtttacttttacaacgaaaaaagaaaagaatgaaaaaataaaattggatagtaaatcaacagaaattacttttactgccattttctctaataataataactaatctgcttggctatttaaattttactttacattgcttccaagctgtttaagcataactttgcagtgcaatacaaccttcctgaaaatatatggtgtaagaaagaaaaaaaaaaaaatctttctaagagaatatatatttataaaaaagaatggacaatcttttaaaagaccaaactcaaaccagtcaaataatgagtcgtttctttacaatgaaattttcaagggaaaaaaaatgtgatcattagccataaatcagaaggattggaggggagaaaggaaaaaaataagaaaacatgggtcaaggaacaaaaaaactaattccaagactcacgtacaaaaaaaataaattcaaacggatatagaacatagatcatcgaaaatatgtctgatgttaggcctctcatttacagggagaatacacttaagtgatattgcaagtaaatcatccattgctttggagggttcttccccactagcaatgtctctatcaatgcagtcccttcctcgtccttcctgatcacacagcctaacccaatccgtaagatcaaccgcccctgattgacctgaaataatatcacctgcacttcttctggttagcaattccatcaagataactccaaatgcataaacatcagccttgaatgagggaactggtttggctgctgaggatagttccggggctcgatagcctagggcacccatgtttagtatctgttctgcaataccagctggtgtcattaggcggtgaagactgtaatcagtaagccgagcctcatattcaggaccagctagagtatgtttgttggctttagatttccatggggcagacctctgtcatgaaggaataagagacaccgagctacatccactgcaacttttagtctttgggtgaatgccaatggacagtacctccgaggtgtagtctctgcataagatacatatgaatgaaattttcagaaaccagagtaagaactcacgtgatcagtattacggactaatgtatattactgaaaaacccaaagtccttaaactttcactttaacgccgcagatcagccaaggaataagaaaatacttagccagcacagacattggctcaaacactcctcaaggaaacatactatggcaacgtttgttattcactgacatattttgctaaaacaatcaatcagggaaaaaaacttgctacagatcctatccaagtattctcaaccatttaaatgatgcctgtcaagtttcatctttttatttgtgtccgaaactgaaagaaagaaaaaatcaacctacacacataatccatagcacaaatatagaaggaattccaagaaaaaaaattcattagcactatttaggctatccaagtattctcagccatttaaatgatgtctgttatg

SEQ ID NO: 195439 - DNA, 1021 bp, Cannabis indica
caaactaaatatttattctaatctatatctcacaatttcaagttttgacattggtaactatgtacttttggaatctttagatgattgcctattggactggttttgtattactgtactagctgttttggattttacggtggttgattgttttatatttgatttttgatttgcactgtggttgatttgaactttgaatttttgatttaaaatccaatttagactatgtttgtcttatttttaaactaaatttaagtataaaattgaatctaagaaaaaaaaattaattgtcaagtaaatcattttctaatttaagtaaattatgctctattatataatagctattagttggtctggtcctttttctgtgttcaagactgaaattaagctcgttcaaagtttagtaattatatgattagggtccttattactagtattaagcactcctctttaaaattcatcagttcctctattcttgctgaagtttttttgataaatattgatgtatttgacgcgcaccacaactttgagaacttgacttggcaagtttttgttgacgtgggttttggttatgaaattatattctgtgaacataaaggaaaactacatattgcagattctatttctagggaagaaaattagcaaattttatgttgatttatcgagattgtgttgtgtctgagacacttccaatttcaagtgttgaactccctaaatcaaatgcttgacaatagaattgcacactatatgttaattagtgctatatggtgaaacccaatatttcaacaatttaattttactttaattatgtaaaaaaaacttatgtaactaaaatagtttttagattaatctacactagtcacatattttgtttcagttgtatattcattctttttaaaactcttaaaacagtgaactttgtacaagcatgttttcacatacgaaattgagattcttattttcgaatcatatttgttctgttttcatggatctctgcgtaatgtgacttaaccaaaagccaaaa

SEQ ID NO: 195440 - DNA, 1558 bp, Cannabis indica
aataataataataaattgaagtattgcgaagccaaatctaaactctttgtgacactttattattaccaatcccagggatcctgtgtactctgtggcattcagcccaaatggggagtacttagccagcggatctatggacaaatgcatgcacatatggtctgtcaaagaaggtgaaattgtaaaatcttacaccggaaatggtggaatttttgaagtctgttggaataaggaaggtaataaggttgctgcttgctttgctaacaaccaagtctgcattttggattttcgaatgtagaagttggattattcatatcatatttgttcacttcattggattgtatgtgtttgtttattcttgtaatataccatttttgttaattttggggacacaacagcatctgcttccagtttatcatcacaaatggacgcatgaggtactgtagttcgaatggacacaaaaataattatagtattcttccaaaaaaaaaagtgtaaacaggatgatttaatttgatcaaaagtgtaatggcttggtgagacggagatagtttaaatagaaaagtgattattctgttagcatcagcaatggtcactataaggaattatggaaccaacaactggcacaacaatgacaattggacaaacagtgaagcaagaagcaccatggttcaacaaaaacaaagaggcaacactttgtatagagctcaaaatagctcgaataaagacaataattagtatcagattaatgacattggcaatcgtgaacaagatgtagatagatcgaggacgtcaccataattgaaccatgatatgtgtgctatagaagaatctataatattatgaaataccatgttctttgttacttaatgaatcatgagcacaaaattaataaagcaagccttgaaggactaggcataaaaaaaataatctgacaccacgagcggcaacaattgtggaacctgacaacaattacaccgtgaagattctcatggaagaggatgaagaggccatcagtcgtaaacacatagacaaaagtcagctgaaaagtgggagtgaggatgatgtattgtatattatagatagattggcaaatggcaatttggaatacagccgtacaactcgaaaattatacaaaataaatatgtttcagtgacatttaattatgagattaaatcataaaatccccagaaacgaggaaagaaaattacgtttttaaggatgtttataacttttttacatattttttatttatcttttataaaaaatatggattattgttttttggatttataaaaaatgttatttttacgttgcaaaacatagtataacattgcaacaacgtaacaacaacgttaattttttaaaaaaatagtccactaaaaaaaagatccgtagaaaaataaaaataataaaagtgcgattttaaattgttgtgtaaatttccttttaatttttgtatcatgatcgtgtctacacgttataaaaaggccaaaatgttttacacaaatattaatatgaaaaaaacttttttactcattttatttacatatatatatat

SEQ ID NO: 195441 - DNA, 919 bp, Cannabis indica
tcttcttcttcttctcatctctttcaattttgtcttttgaatttcgagttagggtttataaatatcccccttttacaggaatcatggtcgttttttctgttttatgttattatatctttatttatttattatggtcctgggttcttcttgtaggtcttatgatcaaacccattggacattcgaatggtgcagtggactggaatagtctgatgatggcttacaagaattgggatgaggaacaacggcatttcatgaattttgttcgtaagtacctcagaatattgcatatgaaaaaaccaaaccattattcatatgtagtgcttaatactgatactattttaaaaacttgagtgaatttagcttatgttgttttaataactaaaccatttacaaggaactaacgttcatttggaaaattttgagcttgtgctaactgttactgattgattacaatttcttggtaccttttctccttttctacaatactgtatttttccttttgttttctacgacatgctcttagcacttagattagctatacagttttctggatgcaaaactagtgcaaataatggcttaccacatcaacattgtgataggtttgacctgtcacattagttccacaaaagcaagatataggaataatggagaagacaatcaatgagatagctgtctctgacacccaagaattcgaaagcttggttctctcccacagaggttacactctactcaaatcattcacaccgtattccctcagccttttattcctacccaaagcacaactaacagcacgacaccccacacacacacaagtattagttactatccctcgtaactagttttccctctaacttgctgagtcacttgctgacctggcttccctttgggtctctgctcatacatacgtacgtaagtggga

SEQ ID NO: 195442 - DNA, 2990 bp, Cannabis indica
aggaagtttgggaactaaaaaccaggtcttgtttttcaccagggctttattttcatcactcatcgcctcattccagccttcatgttcaagagcttctttcagagagagaggttcagcataataatcactcgattcagctttactcaaataagtttttggcttgaaaattcctgctttagctctggttatcatcgggtgagtaggaatcggttgattaattatttgagtgccagttgctgcatcagtttgcctttcagtatcctgaccacccgtgtgttgtgcatttgactgctcattgtcattaagatcatcatcttgaataatgttatactcatgagaaacataatcctgatctgtcattcttgtattggactgatgagtagaagatgcctcaggtgcacttagttcaggtgctctgtcactttgaacatttgtatcgatttgggattgaccatgagaaacattagaagagacatttgtgaatgttgaccaagatggaaattgaacattaacactctgttcaaccttatatgtgtttagaaaaccagacttgaatggaaattcagattcgttgaaaactacatttcttgaaatgtagattcggcctgtactacttagacacttgtaacctttaaaactttcactatatcctaagtttacacacttagttgagtgatactgaaacttatgggattgataggctctaagacacgggtaacaggctacaccaaaggttttcaagaacttataatcgggttttcttttctgcaacatttcaaatggggaaacattgtccagaactggtgtgggcagtcgatttattaaataaacagctgttatgaatgcatcacaccagtacttgaggggcatacttgcttgagcaagcaaggttagtcccatttcaacgatatgtctatgtttcctctcagctctaccattttgggctgaagtgtgagggcaagaatgagtgaagtctatgccattttcagcaacaagattggagaaagcttgatactcacctccccagtcagtttgaagccttttgatctttctattgaactgattttcagcaaaggttttaaactgaatgaaggcagtgagagcatcagacttagctttcaatggatataaccaggtatgcctactgtagtcatctatgaatgatatatagaacctaaaattagtgttggacatgattggggcaggcccccaaatatcagtatgcactaagtctaaaggaaattgagctttttcatggttttgcttgaatggcaatgtgtgtgcttttccatattggcatgcttcacaaaagtgacactcttctttgttaatattcttaagatttaaatgtttcaatacagaatttaacacaagattggatggatggcctagtctcctatgccatctatctttgattgaattcgaaaaagacacattctcagttcttgaccgagttacattgttgctgacatgagaagaaaaactagagagaaaactgtatttagacttagcagaggtgttgtaagtgttttgattagaagccttgacacaaactggttcaaactgataaagtccatctttaagagtcccttgaagcaccttcttccttgttagtttgtccttcacacaacaatgatcagatgagaattcaacaacaacattattatcatttgttaacctcgaaatgctgacaaggtttttagttatttcaggaacatgtaacatctcttgcagcagtaaaacatcattattattagcagtcaaggtaccagatccaacatgcttgatagatagcaaatttccatttccaacagtgagagattccttaccattgtactttgttttctggttcaggttgttcacatcagaggtgatgtggttgctggctccactgtcagcataccaagcaccatcctcaagcatttctggtgtggcaatgaaggcagtagcattttggtttgatttgtttccatcagagttgttgtttccagcaggtgcagaccccatgtaggtttcatcatatcgattgtagcagtgtgcagctgaatgtccatatttcccacatacttggcaagtgggttttggaccatttgatcttcctcctctgcccctgccaccagatctgcctctatttcctgtattaaagcctcctctgcctctgtttccatgctggttaggactgtagttaccactgggaacatttttgttagcaacattagcagtaggattagacatattggaggatttattgttaccagagagagtgcttaatctatcaagcttgctgtcaaagcttaggagtatctcctgcagggtttgccaagatgtcctttctcttgcttcaacctgtaaaacaataggcaggtactcaatatcgagtcctgaaagaacattggaaaccagaagagcttctggatatgggtcaccagcaagggccaataagcccattgtctcttttgtttgagataatctggcatagttgtggctccttttctcactgtttgaatttttgttctatactcatccatttttgctttggaatgagcaccaaagagggattcgagagctgtccaaacttcagcagatgaagaacagcccattacttctgtggctatactttctgtcatagatccatacaaccaacccatcagtagttggtcatggactacccactgttcgaactcaggattggtttcgaaaccaaaacctggctgaccatcgatccctggaactggtataagctcctgtggcttgattcttgcaccagttaaataaccatcaagcctgtggcctcttataatggcatttaccattgttttccacaatgagaagttgttcctactcctagtttgagagacaaagtggctgattacaaagtacctacccaaactggtaggaacaaccgtaggtttgatgaagatgaattgtattgagcactcattggttgggttagcaacattgctacctcgttggtgatggagctgcagatc

SEQ ID NO: 195443 - DNA, 1732 bp, Cannabis indica
atattaccaaataagccataaatatataatagttttgaagaaaaaaatagagaaaaattatgtagaattaatacgaaataaggtatacaataattgctaggaatttgggacagtacacatatatgacaattttacctcctaactataacaacttttcctttgggcatatcaaacaaaagtggcagctgactcatgccagtcagtaacaacactataaaaaacaaaatatgcaccacactaacaacgtttaaaattgaaaatatcttatatatagtagatatttaaaatttttgtagatataataattacaataaatgtaacgtgactaaaagaaatcttgtatagctagagacctactagtccactacacaacaagaataaaataatgaaattactaactttacacataatgaatagaaatatttctcaaaaaaataattataataataattgaataaaacaaatatggcagcagtttatattttattttattcactgcaccctgcacaataaataaattaagtcatgctaaggattttttttttctcgctcttactaatttttttcttatatatatatatattcgattccttaactatcgagactaccatatatatgttttcccatattttaatttaatttactaagttaattatcaaaacaggtacgtaaaacatgagtaactcatctgatctctaaagttaattttatagatctgaaaattgttaagtatagaaatattacttttgtccctattataaggactcacagcatatatacatatatatatatagagagaaattataaacagttttaaactatattatataattttaagtggaaattacatcagtaatattaattctatatatgactgaaatcaaatgaataatacaatatggaaaaagaaaataatatatataacttaagtcacaatcagtcattattatatattcatttaaatattatgaagagggggtagtggaattgtggattgaagatgatttaatgcaagtgcatcaattcccaactactactagtaccaaaatgaatcatgagcagtttatgtaataaggtatacactaatacatgactagaattaaaaaaaaatatgaaggaataacatactgtattaaggcatattttattaatgcgcacgcatagtacatataatgctaatataaataaatatatacattttgctatatgctgtgtggttctaatttcatcagcaccatgcagtgggattatgcacaactagtactatactagtattaatgctttactttagaatttggttaatggtcaatatatagactatagtctatatatgtaaataaataattatatatatattctctacatcaacattttaagaatttattcaactatataactttaatttgatggctttggaaaaagcatgatatcacattcccttttccttttctctctaatttgcatacaaatgatgaatatcatctacataaaattataattattatgtgtaatatattcataatacaaatttatatcataatagttaatcacaatttttatttaggggccggtttttttttttttttacttatatttttatactttaaagtagtttttttttatatatatatatatatataaaagtccacataacaactaacagagtaactaccagaacaactcaaaatataaatttaaaaaaaataaaaaaataatatatatatatatatag

SEQ ID NO: 195444 - DNA, 1251 bp, Cannabis indica
tagtatacaagtatgagatgatctttataataatttaatatggtaatagacttgcattgtcagcattgatatgtggcggcgagaacgctgaaggaggtgcttgtttggcgagaacaaggacgaagtgatcacatggatcttcatcgggtgggggtaggaccgagcttgattgccatgatctaggcggagtaggggtgtcgcacgatttcataaagagagggagatggggagttactagcatatcgatcagagttaaaaagaaaagagagagagaagaatggctaaaagttagagaaaaaaagtaaagacaaagaaagacttagtttttttttttttaataaatcttcagaacttacaccaaatcaatctaatgatagaaacaagttcagcagggacatttctcatactaaactcattatcaacattacaacaagattgtcgtgctagaaaatacgctactctattagcagattatttacaaacagtaaattaacactaaaaaacttcaaaagcattacattcctcaaccataagtgtgaaaccaaacaacatcgcaattgagctgtgtataatttatatggtcacaagactgtctcattccaccactacccttgagtattgaaagctcttcaaccagctaaatacctcccttatttcaatgatctcggtcaaatgaggagagaccaaccattcaagcacgaagctccaatagtttcgaagcccccagaacttgcacaccaaaaaaccaaagccatatctcccttcatctaagaataatatcgtccatgtttatcttaattgtactgatatcaagtcactactacaacaaagggtattcaagatggtcctaaaaaatatttttttgggggaaccattgctaaaaaaaattaagagagtgttcaaaatcgtcacagaaaatagggtatttcttgatggtttaaaactattgggaggtacaggcaacagtttttaaacgtgccttaagaaatcccgtgtatttgcatgagaattaccgacggttttaaacaactgataattcccatgcttaaatttaatgcgttttagatctttaatttcatttctcgcaccttaaatttcaaaattttattttccccatcttaaattccgttgccctattaagatataaaacctccccaaaaaaattatcatatctcattttttcaaaagtcgtttgtaaattttatttaatttcttcgactctctctcctccgcaaccacgagccatgccgt

SEQ ID NO: 195445 - DNA, 1102 bp, Cannabis indica
aaaaaatactaatcaaacaaaaaaaatgtaaataaataattaaaacttagggttagtgattttatattatttatttcattctttggcaaatggtcccttatcatcatcatcaacataaagtatattatccaccaaatatagcccatatttgaatagtaattaatcaaggctctatgccctatatgcaacaaagtaagttaattatagggcactcctaaccataataattaattatttattgtattaatcattttcttacatgaccacaaggtccaatggtcctataactatagccatacatatagatgtgtccttatatataatatgcatatgatttaataatcattctcaaaagaatttattaaagggtttgaggtatcaatccaaaaacattctttatatatgtactatcaaattaaagaaataataggttaggaagatgactaatattttcccaatacatgtttgaataataaaaataaatgtaggtgtttatgtatggtaaattattttatatattattttaaatttatcgttttgattgttctgttagttgttttagtaatttttatgtgaattgttatttgaattttaattataatttatattattttgttaattacttcataaaaaaattattttaaaatgaaaaatacttaataaataatataaagaaaatatataaatgtatgatgttgtatgtttggagttaaataacatgtagtaatttttttttttttttgtaacataataacatgtagtaattaagaaatgaaaaaataaatgtaatatgtatataggattggtgggtttgcaatttccaacatcacatgtttatgtttgtcccaatatgcaatgcatggtgtccttatctaaaagggtttattggccttagatttttgaccactctctctctctctcatcatattttgtttactttgaaaattcatgtgtgaaccaatgtttgatttgatattataatagtcaaaatctttgaccacattgtacacgtggcatctaatgacggcaccatattctccacatggcaagcgttggtgggaccacatcactattgccctttacactattttcataatttttt

SEQ ID NO: 195446 - DNA, 1759 bp, Cannabis indica
gtgggttaatagtagatcgacctaaattctgagttatcataaactcttgttcatgttattagtttctttgatttaatcgttaaaatttttcagagaagattcttacgacttctattttggaaaatgtaataatgtagatggatgggaacatgatttacgatcatggaattctgattttcctaactgatcgaatattggttccctttaagtgttaattctagaaatggaatgttgaacaaaaatttaaatgggatctaaattatactttcactagtgagttaatggtactaaaggataaataagttattagaaggataaagtaataatttacccaaaactaattacaaaccaatacatggagagcgaatcactgaacactgtagttaaactcaattaatataattatatcttttattttagggttataaattacttatacaacaaatatatatagttctcttctctatattattacaaaataggagtaaccaatgatcatacaatctgcaaaaagaaaaaatattgtatgtatttaatttctttcaataacaagttactatgagaaacaattccttagattcatgagcttcctccaatattaacttacatcttgttttaactcatgacccaaccatcttgattctttaagtagatactattaacccactttatccaaaggcaatcttcttttagaaactgcctaaaagtattttgccatatatgccttattccacttagaacattctctatatccaagacctccaaactttttgggcttacaaatcaattccaagatgtcaaatgcatttagcctgtattttatctttcaccccaaaaaaatttctacatagtctatcaatctccttaataactttatgtgaaagtaaaaataaaagtactcattcaataactttaaataccaatgagtatcgagttgatgagttgagttcttcctgcataaaatagatgtctacttgcccatatattcagtttaagtttaatcttttgcactatgggatcacaatctattgctttccactttgtacttctgaagctaactcccaaatattttagttgaaattcaccctcaccatattgcaccacatctagtattttttgtgtttctcctcttcggctgtcccaacaagatatatgttggacttggctaaaatagctttaagcccaaaataattactaaacaattgaataacatcatttagataattgaacgcgactagattacctttacagaagatgatcaagtcatctgcaaagcataaactaaccaattttaaatgtttgtaggaggggtgatacctaaaactctgctgatgaatttgatattggagcaacattataaagtattccattaccaaacaaaatagtaacaggaaaatcgagtctccttgccgattcacgtttctattggattaagagaaaattagagataatgattatgctattagcaatggagacattacaaataaattatagttattacattataaaagaaaatttttctatgtttttattatttacttgatttgatcataccgatctacttttctttttgtagatatgttagtggaacaaaaatgtttttcagattttttttctcttctgatattatagttttatggtataattttttggaggcatatctttcttatgtatgtcgcaacattaatgttgcaacctataaattagtttagtatgcacttaggataaacaataagattttttggatagaaaaaatccc

SEQ ID NO: 195447 - DNA, 1700 bp, Cannabis indica
aaaaaaaaaaagagatgtccattaagctttattactatttgaactgttttaagtgtaggttgaccaattaatatagcctctactgtaggccagtacatcattgaaagttgaatttcaaattggtagatttggttggtatcaataaatctaaaattcattctgtttaagtttactttttagatgctacatttttaaaatggtacgttataaatatttgtttctttctacctattctactggattttggacactagttccaatttcttagaagtcaaattaccaatctggaggaaatcactgaacccatttccaaaattttgtcaccttattacttttattttcttgctatatatatatatatctagatattgatatggaatattagtagtttttttttttagaataaatttagcaactttattaattagcaatcgttaataataatagaacgcactttattgaaataattctccaattgaagcacacgatctggggagaaacaaggattcctggctaaaatatgagtcaacttgtttgcagatcgtttgacaaaacacaactcaacattatttaaagataagagaaaagtacgaacattatgaactaaaagaccaaaagatgatgacaaaagaatttgagtattagtagtatttagtattatttaaaagtggcgttttatgtcacgatattttttaaaattattattttaaattatataaaatttaatatttaattatattagtattaatataatattgaaaaaaaatattagacagttacattttaacatttttcatatatgtactgtcaatttttattacaaagatggatcgaattggacaatttcttttttctttcacgctccccaatttcaatcgaaatgtctcaatcatcatcacccatttcaccaatcttatattataaaattcaataatttcttcattgaaacaaatatatatggatgattttttgatgagtattcctcctgatggttactaaataaatttaactatatgtattaattttaaaaatattaaatcatcaaattttgatctaataacgaataataaaagaaaattttgaatttttatgcttagtttaactacttaataataaaaaaatataaaaaaataacactttttattatataaaaaatatgttcatataaaaatatttaagtgaaattcaacttttactttttttttttatttttttttttctaatcgatagaacaatctcagtatatatgatgtaaaagtaagagatttttctatttagatagaaaaattaagcataaaacttaattttttctaattttaccaatttatgggtaatacacatcgagaatacatacatatacatatgaattatgaatagatataaaaataagtatgtatattgctgtctgttatagtgttaacccaagtggcatacccaactacaattatgtataaatttggcaaaaaaaagtcatcatcattcctctatattatatgtacaaataaatggagttagttaatctatttagcaactgtttatagcactgtgtaatgttcacatattgatattggtctgtagtttattgttttcgaatttaaactaatgttagactaaatttttttaaaaaaaaaaaaaaactcaaaaatacaagatcattgactattattcattcaaatcacatctaaacatattaattggtt

SEQ ID NO: 195448 - DNA, 810 bp, Cannabis indica
gtaatgactccgggattctggctccctaggccggcgaaagccaaggcgggagtctttccgacgttgaactggaagtgaatcattcctacggggaagacgaagacgtctcccttgttgagaagcttagcgaagagtgtgttaccgtcttggttagaagaaacaaaccccacgtacaacgttccctctgcgacgaacaggatttcagaggcacgagggtgagtgtgtggtgggttcagtccgtagggggcgaagtcgatacgcgcgagggatattcctagtgtgttgagccccggaaggttgtccacaaacacggccgtgacgttggagcccactgcattgtctgtgtttcctggaatgttgatccctgagaagaagaagtcttctgccttcaccatatcaggattcttgcagaatctcccgttcacaaacactgttatgaaaacacattagtcataatgttacttattattataatgagtatttctattagggtgagattgatttgcagatatacttacgcatctctttagggtcatcgatcgccacacagaagtcttgaagaggacttgggtcgtatgcacaagcaagatgagtagccaaagctaatgcagcgactgccaaaaggaaatgagaagtcttcatacttatttaaaaaaagagagtgttgtaataactaagttttgctgtgatgtgttaattacttggagatctttggtggtccgaacagggtatttatagatggggaagcaggaggagaacatgatggggttttactgtttagtgaaatgactcattcacttggaaatctag

SEQ ID NO: 195449 - DNA, 774 bp, Cannabis indica
aaagagaaaatcaccgcgcgtgctgactcaaccgcttacagttttccgacatctcggagaaccggatcttgaccttatctttgactctctctcttatcaaaggtcagcgcatcacagccgttcatcttaattaccacttaactagcttaaccgacagcgccacgtaattacacacacgtggagtaaaaactaagagcgtcgtgctgttcttagttgtaccttttcttattttttattttttcacttttgctcagtccacttcactaaaaactacctttaatttaaaaaaaatatatatttgtttttacaaaaatatatattatatatttttttacagtgtaatacggatcgtttcggaaagagtgacgcgtgggggctcttgattattttcacggtttcgagtttaccattttctaatttaattttaccttaggctgaaaatgaaattgatacaaaaatgtatatattttaaaaataattatttcatatgtatatatatatactatctgcggcagtatatatatctctattacatacacagaaagatataacgtatatagaatttttttcttttgaaactgatttctgtttttattttcttggaaagaatgtctgaatgtaacttgtcagtcaaaatgtccacttttgctttctcagtactagttattaatgatgatgtgaaataaagaagagcaaaatactatatattaattaataatggtaataataattaccaatggtacttgtatatatacttattattaaatcctttgt

SEQ ID NO: 195450 - DNA, 1665 bp, Cannabis indica
aaaaaagatattatggtcataaagggggcaagaaagcctaagtgaccctttggtaaaagcaatggaaaagctaattaagtgtatgagattaattatatttatatattaacatatattataagcttgtatggatataataattttatatatagtactagggaaggtctacacatgagtggctatatacctaccaacctaattatatatacatttttcttccatttgttatcttttgcttattgtattcaatacatagtacactcaagaataattaaataaattaaaacgaaattagtacaaatatggtataaaagccttcatctatgggaataccaaaaatggaaaattaattaacaaaaagaatgaaaaaaaaaattatatttttattctacttactatttaatttgtaaatgtagctagtactagttataagtttcttaatgctataacattctcataagtatattttttttttagcatatgatattattctaatatcacttcagaaaattaaaaaaaaaatagcattaataaaaaattaaacttagtgtatgatgactttttttaacaaattatatttatgtagattattatgacctatcacctactgttttcaaaatcagtaaattatgttatatatatatattgagtttaatattttgagagcaaatcataattttatttttaattaaatatagtacacatgtgcttgctttcacgtgattacatcaaaaccttatatatataattactaattaagtacagcttttttcataaacattcttttctagtacattgtacttatcaatttgtatatatatatattttatgtaaataatttttattagctctaaaatatatgtataaataactactcttgaattaatagatgaatatatatagtaccattaatattagaaaatattacaaaaaaaggagagttttcttgttttgtttttgttttaatacataaatttaacaagtattgaattagtgatccaattataactataccatatatataattgcctagttttaactaaaaaccttaaaagaagcataaacttttaagaatgcttcaaaaagagggtacaaataaggaaacaaaataaaataaaaaaatccatttaaaaaaaaaaaaagaaaaagacatcctatatgctataatatatatattttttacagcatattatcttattgaaagcaagttgccaatataatatataaaatatatgaagaaaaaaaaacagcaaaatggtccccaacctaatatgatcttcatccaaaatatcactatatataaaaacaaagaatagaaacaacaaacaacaaaagggttttctttaattctcttgagagacttaattatataacaatttaaaaggaattgaaaaaaagtaaatgataataacaaaagaatttaataactcagttcaccttcataataaactaaccaaaattttcatcaactactctaattattgtgacaagtaggttgtatatatattgatgagtacttcaataatacatacataataattatctaaaccaatagaaaacaatacatacatacacaacatatatatatatataaatatgtgagtattcaattgttacatgacctattatactaataaaatttttatttgtaaacttaaattaatt

SEQ ID NO: 195451 - DNA, 986 bp, Cannabis indica
caattgatgacaaaggttatcggtaaacgaaagtagctcatagcgtatgtaggaattgattgaacaacaactttcaatagtacctcctttccatcaatttagaagagttttccattccatgcatgtaacttctgccatatacactccttaacatcgttgaataattctttcttatctcgacgagaatatgcaggaagaccaagatatcattcatgacattcgctaataggcattcccaaagtttggtgaaaaaaattctgagcatcttgtgttgtatttgggaataatgacataactgatttgtgagtattcagtaattttcttgaggccatatggtagatctccaatactctcttaatagccaaagctgaatgattagtagtctcatagaataagagacaatcattagcgaatagtaagtgtgaaacagagcaagacatgttaagcataaacctttgagatttcccattgattccttaaattgtagcaccctacataatcattcagaacaaatcaaaaacaaataaggagataatgaattgtcgtgtcaaagacccctctttggttgaacatggcccattgttttaccattgagcataaaggagaaactggtagaagataagcaattttgaatcaatgttatccatctgctatgaaaccccatcttgcgcattacctcatgaatatattcacattccactctgataaatgcttttctcatatctaattttagtgttgaatggattctaactccaggagttttatgttttagatgatgaatcaactcaaaagccattaaaatattgtctatgatgagtctatttgaaagaaaactactctgagttttggagatgacaaatggaagaacctccttaaatttgattgccaaatttttcgatatgatcttgtaaataacattacacaaattaaacaggcaaaaatttcccataccatgtggcaatttaatttttggaataagagtaatg

SEQ ID NO: 195452 - DNA, 929 bp, Cannabis indica
tttccaatattacacacctcaagaacacataaccagtttcttcttgagaggacttcctactctgagcagttatgaagccagctgccttgcaatgtatatgacaatgctccaaaagggcagtgctattcccaaatatgaaatccacacttccttcgatataacaatctttgagatactgctttccataatgcaagtacagagtgtcctgccattattaaggttgcataaattttcataacctttcacaaaccatccttaaaagggttttttatataattgatcataaaagcaatctagtcaattgaaccagcaaaactctcttactctcccaatgaaaacagtggacatacgtacctgccatccaaggaatctgcaattgtagaaggcacatctgtcagctgtcactctaatcgccacagcttgacctgaaccctttgaagcataagaaaggaaaattttgtattagaaaataaaataaagcatgtatttcaagtttcaacaaagtcagaaacttggattaataatgctatgtgcaattgaaatctattaaaaaaaagaacaaatttgtgtgtgttttgtctcacattacttgtatgatttatattacactcaaagttttccccatctccacttaagacataacttttactagttcaaataacaattaagatgaaacagggtcaataacaataaatctctttatctccattcgaatctatgattcattttgcaaattcgttattacacgtagttcctacaaaacaaaggattggactaatgacgtatacaatacttaaattctcaatatagatgctacataattggttaactcaacgataaaatttcgataattgaattaatgtggcgtttggttgaaggtaataaaataaaatagaatggaaaagaaacaattccccattcctattcct

SEQ ID NO: 195453 - DNA, 1386 bp, Cannabis indica
tccatttaaggataagtatagtacacatgatatataattcaaaggaaaattgtctttcgccatctcctgcatatgcacgaaaataataatgaaaattctaattgactttcaaaataaataaataaataaattcttggttttgaattcttattattgtcaacttaattgtgcaaacttaatagttattccacctaattagtctttatattaatttaagttctcaatttattttattagatttttagtctttattaacggtttttagtagtaattattttgacaaccctgttaataaattaagaaattgtgtttgaacagatacttatcctcaatttttaaattcttatataacaacgcatttttcttaatgaattctaatttttttttaaaaaaaattaattgcgcaaaccatcaatactctaatgatataaatatatataaaaaaacttataatcttcttagtctagaaataagaaatagttgtaccaaaatatatttttctttttgaaagaaaagagataatttcattaaaacgtacaaaatttaaaaagattcaagataagtaaaaaattacaaaattaaataactaaatttataagtagacccaaccactcaatatgtgattcatctaataaatcaagtgcacgttttggttcatgtaaatttaattactaaaagaaaaaccttacggcacaacctatatatctaacaatttgtttttttatatcaaataacaaataaatatttatatgtacaaacttaaaattaaagtattaatattcatatcgcaattcaataatacgatctattaattatttgaaattaaaaatatgaattatttgtaacaatgattttatagtttataacacatcaaatcaactattattattattattattattattattatttatcaaatctgcaattattttgaaaaataaagactgggaattacgtaattttcacaaagtacaacaaatgcaattaatgttaatcaagggtaattttgtaattttcttggattgtattaaaagtggtacaacaaaacgttgtgcttgacattctagaaagaaattaaacttgggtttgcttttggcttccatttttcattaatgcaaagggacattttggtcaactcctttaattgttagtcttaaacatcaagcacctaaaaaaatacaccaaagaaaactcaaatccttatcattttttctttcttgtgcttcttaattagaagaacactctagacatttgacccttttaaaaattcaacctaagccctcatatatattaaaatcccctcaacaccatccttagagtacttattattatatatagctttcttcattttatcacaatcttcactacttaactctctctctctct

SEQ ID NO: 195454 - DNA, 2494 bp, Cannabis indica
cgaaacagataaaagatgcatcagtacatccttttttaagagaatgcattatagaagcaccctaaactatttaattagttacattcactacttttctttctttttcctttttttttttttttttgcctaaggagaaaattttattacttgatgttttattagataaatattttttaataaatacttttttactcttataatttgatgaattattatataattatcaaaatagacacattataagttaatatctaatttattttttaaagtgctaatttttttttctttctttgattaaacaaaattaataatttgtctgtgagtcaaaaataaaataatactggtaaaaaaaattaattttggacctcttctttgttaaaaaatgtgatataataatattaagatatccttattgtcactattttccttgttttttatttttataattactttttgttaatcttgaaaatcgttaagtaaagataccaaggcagtgacaaatgaaaagcaaggagaaaacgaaagaggcacaaagcaagcgactcctcagcaccgtgtcgtgccgcccaaagcaaggagcctcgctcctcaccgtgttgtactgtcgtgggaccaaggctcagtgtcttgtgatgttggtgccctagaggcaccatgccactgctttaaagtggcaacatgtcgctgatgcacatggtggctccatgtcgtgccctttcaatcaagcaagatgaaagtctcaccgaaaccttttcctgtcattccaaacaaatacaaggttctctcctacagccttaaacaaagagaatatctccaacaaccaaagaactccgccaaaggtatggatgccacaaagtaagaaaaggagaattttatcatgttagagcaaaatattatttatttattttcttaataaataattatttaaaattaatatttaaataaattagggacgcaaagtttgtctagagaagacaagatatcaccaccttcgttgttaagatgagggataacgccacctgtgttttatacacaataggttgtgtctattagattttgtatcctaaataaatctctattttaatgtaatcttgaatatttctttatcaataaagaaacagatttatttcattacttgtctaatgtgttatttggttcacatgtttatctcatgatcatttgtttgatttataaattcagccaaatcattatcacattgatattcttgattattgtgatgtcaacacagtggaaagtaattaagattatgtgattaaatgaattcctatgatttatcagtacacagatttcactgatatgataatctacaatgtagtttacttgcaccttagataagtgttatgtcatttccagggtattggtaaagtaagcttggattagatgtatggagtatgcatcggaagggatcgatgttgaacttggataagatataataaatttaccgtaatatctatctgattcaatatcacctagttgatcttagatcaaatgatctcaatcttgagatagttaggttctagttcaattgtattatttatgttttccaattttttcgttaaagtcggccaataggtcttctcgtgacatacagattaaggacgtggttattctattgagtgggagcgctaatcatagatacggaatctatagcttctaaaaatgcatagaaataaaataatgatttccttcgagcttggcttaatagagataaatggttgagtactcattccagtaattatattagtttattgaaatatcatttataggtagctcagtgttttaaggataaaatatattgaagggtggaacggtaaattgttcttactcaatgtagatcatctatagagaatctttgattattagaattataacaatggataattcatagcgtatctatattgtggaacacatagagcgttctatataattaagagtgcgattttgaatctatagtggcacaagcatgaattaataagttagagaatttacttggtaaattctagagctacttattagaagcttgattatataggtcgatggtccccacactagttgagaaaatactgcttgtaagactcagttagttagttttaattaatcaattataattctaaaattagactatgtcttatttatgaattttcactaagcaatggtttaattgtgaagaaaagagattttagggtttatttgttaattaagagactttataaagtctaattaataaataagataaatgataattttatttgataattaattataattattaaataaatagttttgacttttatagtattaaaattagaaaatatgacattagagaaataaaaaaataaatggttgaaagttccaaataataactagtggggcccatctatatagcaagccactataggcttaattttattattattttatcatttttttattctatatgatttaaatcttaatcctaggtgaaatagtataa

SEQ ID NO: 195455 - DNA, 1813 bp, Cannabis indica
aaaaaaacccagatagatcagttagctagggttccaaatggtagttccgagagcttcaaaaatttcattttgaagatttgattcagggtttcatcttgggacgggtcttttaagcttctactacgtacagcaagtaagtgaatatagcttgaaaatcttctttacttgttttacagtaattaagctctatttttccatatttattaattcagatctgtttttctttttggtttttggatttcattttcagggttcgatcgatcttactgggtttgggtttgggtttgtgtctaaagtctaaacttctttcccggcatttcttccaaacccattacagtttctccctcacttgcccttttccccacatcaaaatcgaatctttcaacttcttttcttctctccaaaggcctgtctcagagtcggaggaaactcactcacttgggtcccaacaccatgtttgaattgattaaaccttctgcttttaggaaaggtaatgggaaaaggtgttaaaacgattgaagaagaagctttagatggtgggtcttctgggttgtagagtaatggtcttgagtcaacccttaatcgaccggttagtgattttattcattaattagtttctcaatcatagctttatttatttattggttattacttattagagttctgggttccacttatttttgatttatctgatagattaagcatacttatattttgattttccttatcttaaatgaaaaatatggctaaactttgtggtgttgtttctcttgcttttattgtgccttaaattctacaaatttatttggtggagaagcccaaaattacactgtgagatcgttttgtgaccataaatttacattgtgagagcattaatattggacagtgtaaattcaacctggttattttgcaaatttaacaattttatgttgtctggttgtcttagtgtgtagattaattagtaatgaaagttgagattggacatgggctctcatcagaatagcaatatctctttgtgaaataataatgtgtatatgaacatagaaacttttagctaattagcttttttggacagagtaagtggattgtatctgggatttttgctgctgtgcttcttgggaggcatgatgcagaagccgtttggtttgccatggctatctgttgcattaaaacgattgaacaagaaactttagttgggtaagtgattttattcattaattagtttctcaatcatgggtttattagttctttttattagttcaatttattggttatttctaggttatggctaaaaagttgtgtggtactgttgtttctcttgcttgctttaaattctaaaataatccatgaaaatccagcagacccaaacctacatttgattcaaaaaagtcagtgaccaatctaatcttaatggttataagtacaactaatactcttcttcaattgaatataagggcgtaatatatattaagttcaaatctaataataagccaaatattaggcactgagagatctcttaaagtaccaaattaattatctttgtttcaagagaatcatcaaatctaggttttcaaataattatggaattagtaattaattactatttatggaatttgttcaaaatgatagagggtgtaactctgtggtgcttcttctataacaggtattaaggcattaaagaaatcttaagcttaaacttgagtattacgttttgcatggatgaatatgcacttaatattttaaaaaaaaaaaaaaacttaaagtttaaatatatatatttaatgtttcaaacagaacatatatatatatatat

SEQ ID NO: 195456 - DNA, 1719 bp, Cannabis indica
aaaattaatacaaaatgagatgtgaattgtgtgagtatattgagtttcacatggataggaatatttcagtataataatatgtaaatctagaatttgggttggaatcccaaggagtactcaattttagtgcgtatgggtaagtactcacatatcggaccaccaatatagcgcgccgctgttgtttgattgtgtcaagttggtgggtgtggtgttattttattttttcgtagaaaatttatctattaaatttttatttttatttaattaattaaaataattttcaaacatgtttaattaattagtaagcagaaatgatttctcaactccgtattttcagtaatgttcatgtgatcgtttacatgattttcaggacaaaaaaaaataacttttttcctgttacttcatattgtgccttcccatatgatgtattagaactagaaggagaacgacaagaattttatattacatatatattccgaatagtagtacgattattagatgtggtattttaataattctctatcgtgtaatagagcaccgatataatattttcaattgggtcgttttatctcaagaaacaacgaagctgatagtttgcttgcacagttttagacagcaccacaaatgtcttaaagaaagtaatttagtccacaattcaatctaatttttaatttaataaatttattttttttatcttctgcagcaactaattttaacagagacgatctctaagtacttgccatgtgtcttcataatttgtatagacatcatcagatatcaaatttctagttcagaatttagataaggtcgaaccttgtgacaacaaagcttgtctcatactaatatttcaaatactgtattcacagaatccaatttaatgcatagttacatacaaaaacctctatagccgtggaataaaccgctttgtccctattaacaatgaaccaaaacgactactgttttcggtaaatttctttatacccttttctatcacattattctatcgtgttataaggacctccattcctttttaatcatatcatttcatctaaataattaaaaaaaaaaaaacacactaaaatgactaatgggatttcaagaaaaaagttagataaacaagaaaacaaaaacaaaaataaatattacaaaaaaaaatggtgaaagggagagaggagtgggcttgagtagtacaaatcaagaagacctccacaactctgtcatccatccattcaaatccacccaacaacccacccaccgttaccataccataccataccttttctcttctttttcttccttcccattatttataatgagctcccatgaaaaatcttgtgacagaatctcagcagttacaaaatccagattccacattcctctctctatatatatttttttttcaatgaaccaaatttcccctattttctattggatgacgtcagcctagttttttcattctatcttcttgtgtgggacccattttttctttcttcaattctctccttacaatagtccttttccccttccaccactccactccagtactccacctcttcttctcagtcttcccttttggacctttggtttcccatatcacctggctctcatcaaacttcatacccttaaaatctgggattttctatctatataaatatatattaatatgtaaattttttttcttttaaagatgtacatttattttttttttttttgttggga

SEQ ID NO: 195457 - DNA, 1387 bp, Cannabis indica
ggttcttttaaaatgtaaaatatcacatcacatctttacttgtatatcaagtcctttttcaggtgtttagaatagtgcaattcattacaagacttgtgtatcttattctaaattaatatttatttatattttatatatatatatatataattcgatattaaattacatcaatcaaagaaattatccaaatggaagaaattatccaaatggcaatgcttaaaaaacaacgatgctcatcttttatgaatgattttgtgttttgaagatttcatcacatccttgctcttattttgaaatggaaatcaagggtggaatcatgttgtttttgcatgtatgactcttaaggagattcaaatatttatggcagtgtccaatccagtttccattcgcataaacgtgctagttttacacacaatttcacataaacagctactaaaacatgtatttatttaaaaagttacaatttttgtgtatttaattttatagtaagaagattgaaatttgacattagtttgaattggttgtttttttaaatgcaagtttggttcttaagaacgcttatgttcaatgatgaatgatgttgtgcacatcatcatatttaacgttggagtaaatgctaaaagacaccagtactactttgcactattataagacgacatattattcttaatgtaattaaatatcaagttctcatatatttttaatttaataattattaaagaaaatcaataatcaagcgccacctcgtcgggtgtgttaaacaccactacctaacttctattactctttttgagcaagtgaaagaccattcattggtagggttaatgctcctaaaatttcttaaaccaagttatatgtacttaacaaagtttttgaacaaagtatccctttgctgtttccactaccacctgaatctcaactcgagcttgacaaatcaatcaattggattgggttgggttaggttggggtgcactttactatcagatgatgttatcatatctttttatggagcttgtgcaacaaaagcatcttaattgatctgtataaaagtagatttgaacttgtttgtgaattatgagtttaacagcttatcttgagcataaccaatttccaattaagaagacccttgcaatcttgtgaatattactatattattgtaaccaacttagcaatgtgagtttagagtctaatactcaagaagaagcaaattttaatacatgaaagaaaagaaaaaaaaaaaaaaagaaataacttgcaaccacagaaaataatagagagagagagagagagagagagagagatacataaaacaactagtgtaatattcactagtttagttaagtagagtgcgagagttcctgctatgtgcaccaatacgttggcgtta

SEQ ID NO: 195458 - DNA, 670 bp, Cannabis indica
cgattaaaaaaaggaaacttccgaagtatagaatctattgccagttctcatatcataatgttatgatttattataagacactaaaaatcaaaaataaataaagagatgtttacattacacatatatggctatactattaattttgtgtgattttttgatgacaatattattatttttgccattatcaagtttgagagaataatgggttgtattagtgcctattataaaagaaaaaagaaagccgcattattataattatgcctcaaattatagggacaacatatttagtctatttattatttatggaccaagtataattaattaattccctgattactttttctttccttaactttccagaatatataaatatataacatattcacattcctaatagggatattaatttaatggtaacatatttgttttggctatatactaattattattttgtttgtctaatttataatcattacctaaaagattaatgagagaaagaagatactacacaaccaaatatggaaacttatatattggcaaatttgattatatgtaagaatattgtatttgttatgggagcattgattattggctatataattgatttactcttatttgttttgatattcagaatttgatatttagaagaaaaatttaatttttttttttt

SEQ ID NO: 195459 - DNA, 812 bp, Cannabis indica
ctacaaaaaaaaaaaaaaaatgaaagggaataaaataaaacattttcttatgatctttttttttttgattaattttaggatttttctttttaaataactaattaaaattgtcagagatatacatgataaataatagtatgaaataagttgcaacagtttgtgtttgcccgaggagaagtataatgtccatttgttattattaaaaaaaatagttcgtgaaaacaacatattatattgttgctgtgcaaactaacgtaattaaaaaataacaatctgtatttttataagaaaaaaaatttaaatctgttataatattgaaaaatctgggagataattttctatttttttttttatatatatatatgataatattttaggcacttatgttagtgtacactactgccattttctgattttcacgttgaagaaaataattaaaagaagagcttttcaccatttatttcaatttgtctggttagcatagttgtggtaggtaaccagctgccattggaaacccatctacaattaagtcacacctgaaatcctagtgccatttgtttctaacaacagacacagccagagattccaagccacgaactacaaacatgtcctattttattctatttttatctttttatttgaaaaagaaaaaagaaaaatgcatagaaaaaaacaatgattaatataacaagatttcaagtttcgtagagtggaacatgtttttcatgcatatataaaaaccaaactaagtcatgagttacttacttcagtctttacccaattcatgtgatcctcttcttcttcttcttctt

SEQ ID NO: 195460 - DNA, 550 bp, Cannabis indica
tattcaaaatacatatttgttactctttagcatggctatttactcatcaaattgtagtaaattatatatagtaacattaatattgtttatgatgatgatcagtttgtttggaatatgcttaggacaaaatagtagtgttggtcctagctttatttttggagatgctttgtttgatgctggaaacaacaacttcataccaacactttccaagtctgatttttatccctatggaatcgattttggtcaaccaactggtcgattcactaatggcaaaactgtcattgacatcttaggcaagactatgtatatatatatactctttttgctttgattttcttatgacaataagttaattaatcttttaattattattaacaggtgaagaattgggttacaaagatttcactcttccttacttgtctcccttattagcaattactgatgataaattattagatccaagagttcttgatctgggtgtgaattatgcttctgctggtgctggaattctcaatgaaactggcaaaatatttgtaagatatatatatat

SEQ ID NO: 195461 - DNA, 1667 bp, Cannabis indica
taaaaagtaaaatttattatgatgagtagcaatggcataagaaaattagtttaaaagaaaggattaaagttaattttattaatagtaaaagaagaataaaatctttaattaaattagtaaataaataaaataataagagaagcaattatttttattttagtttaaagattaaagtaaacgttttttttttttttttttttaattttaaagatgcttttctctttttgtaaaaatattgaaaattatggcagccttttattgacaggtacttgtaaaagtttaggataatagtaaataatttagaataagggaatatatcaataattaccaatatggtacttaaattttgtaaacaaaattaatataataatatgatatcattttaaaataaataattaatcaattctaaatacacttaataagcaaattactattatgttcacattatctatcaaaaatatttgtaaacagattatgaattacccaaaaaaaaattattaacaaaataattttgtatatatggtcacagaaataatcgtgaattacactatgcgactataaataactattatagtcgcaaaacgatcataaatttacattgtgtgaccatcatgattgtatagaataaattaagtgagattatttttattaattttaatatttcacattaatttagtaaattttacacttaaaatttataaacaatatgtacacttaatttaataatatgatattatttaaaatatataattaatttattaattctaaaaacacttaataagcaaattactattattttcacattatctatcaaatctggaaattaatataatatgtgcttcgaaaaatattttaaattttgttaaatatgtgaataaatctttgaaatttaatatatatgataaatattttttctttattaaaaaactaggattttatttttaatttttacacttgaaagtaggtttttttttttttgcatttttatgaaaattcacgtagcaactaataaaacaactcaaaacccacataaaaaccatttgagcaattgcggaaacaactgaaactgtaaaaaataataataataataataataataataataataattactaaaaaattataataaaacttttatgatttgatatcaagccttagatcaaggacagaaaaaaggtagataggtgtgagattgtgtgaaattaaaaaaatggtaataattaaattaatttttaagctccaatttccaagagggcctagcacctaagtaagtatacttagaacaaaaaatgaagattaattaattaggtttttgtttgtttgtttcttatcatatattaattagattacatgtttgtgatcatttgtttatacttagctttgacctagattttgtctctttgtccttggatgatggcctatttatattatatatatattaatttatttatttgtactttagagctaattaattattaattaatttccttaattaatattcacctttaatttgcttaccactaagcaaaattaattataatagaccgttgcttattggtaggtagtcatacttgtaatccttccttttgatactagctagttctacatggattaaaataaacttaattgagaggatgagtaataatacgagttatttaattatcttt

SEQ ID NO: 195462 - DNA, 1190 bp, Cannabis indica
gttgctcataatattgctaaatgaacattgactacgaacattactagatttattgatgtttcctcaattcaatgatgttacaagttacaagttacaagttcatgtgaaggggcagttacaagttcacttttaagctatcataccgaaattcggtcaaattaaccaaccaatgttaaacttcctaataaatagagggactagtattaattagtagtggtttggtttggtttggtttggatggaataaaaaggtgatatatagaaagaaattagaagagaagggtagattgaaaagatagtagtatagtgacgtagtagaaactagaaaggaggggcagagatgacaaaattaaagaaacaaagaaaaaaaacaccatttctttttctttacttattactattctttcttactctctctgcaccactactgctctgctacactgtactcctctctcccctgctccactctacactttttatttatatactgtatatataaataatttcataacacaccttacctcattctctgtattttcataacattatattgctatctagtaaattggtttgttggctttatcttctaaataaaatttaggcatgagttcaaaccttttatatattttgagtacgaggattgctattaggtgctagtggtggtagtgaagtggtattttgtaattgattgttattaggtttagtgtgtgtatatatagatgtatatacatatacaacttggcctccatctaaacagtggtgactcgatacttttgaccatttttagctaaagtagttgtaaagatgatcctcatatatttactcatacatatatttttatgacaatccttctaataagttccttagcttaaaatgttaagtttaggtccaatccaaggtacatgatagttattaatacatcttttttttcttcactaaacaaaattataaagtgaccaaaaaagaagctgtttttttcactactatctttttttttttttaaataaatgatattagataattgtataatacaagatttactgataaattctttatttgtttcgatatctgttaaaaaaatttagtctcattttatggtcatctacgttgttgtttaaattaaaatattttgtaaaattttgagagatttgaaaaatttaacaagccataaatagggttcaaatagtttat

SEQ ID NO: 195463 - DNA, 1624 bp, Cannabis indica
ttaagcatcttcaacttggtgatacttgttgtaatagattcaagccttgtgcaatttttcattgacaaaactcaagactaataaaaacaataatcaaaaatcgatgttccactcaaatctactttcactgtgttctttggaagctttggaaacttgttgatacactcacaatcacctaggtttagttccttcaaacacaccaacttacaaatcatgtcttttgatatttgagattagcacaacctcttagattcaaagagttttcatggacttcgattcccatcgatgatccataatgttgttgaaactaaaactaaattgattgcatgcgcaggacacttattggtccaactttaagatgaatagagtcccaaaaatgctatgtgatcaaaacaaaaatattacactcctcaactagtttccattggaccattgaaagtttggatgaaatgcaatctcacaagtattactacgtcgaaaagtttctcaaacgtcttagtaatgaagactgcgataaccttttagaatttgtttatattgaaaagaagaatatagatgatctcaagtataactatggctctgaaaagcttggagggaatgcaatttaaaatgaaggatcgctatgccaaaaactttggcaatctacatgagctcatgaggactcaaaaaatatgctagtgttgttggtaagggtaaagtttgaagatatgattttcactgatgcttgcttcatatttgagctctttatgtaagaaatcaacacaatcagaagaatacaatatccattgttatatggaacaatagaaatggacttgataaagtttgagaatcaaattccattctattttcttgagaagctatatgaaatatttgccaagccctaccactacttaacattggtgcaactttgcattaattgtattcttttctcttattaaaatccctaaaccggactccattaaaactctcccaattaaacacatgatgacacccttttgcaactatgtttttttaatggataaactcatagacactgagggggatgttgaccttttggttgttaagaaaaagatcattcaaaaccatcttggtagtaataaggaagtagcagatctgatcaataatcttggtcgaaatatgcaccttgtcaaattcatgatctactctgaccaatacaaaaccattcacgaaatctataaccatggctacaatcgtattagatctcttctcatgagaaattattttgataatctttggaagggaagttccactgttgttggaataattgtcatcattttcagtatagtttcatctatttgttcggtctggtcattaatagataagaagccataatgatgttatacttgttgcatgccttgtttgtagttgagatagtgggtcatggtatgtttgtctattgtatgtttatagtattgtcttgtctttgaattgcttttaaagacgatttgggggagagaggaggttgaaaaacatctatgagagctggatcatcttcctgcagaatcccttcctttgacatctccaacggattgatttcgccaatttcatcgctcagagtagcttgaattgcttcaattcccaatttctcacccttcttcttggt

SEQ ID NO: 195464 - DNA, 786 bp, Cannabis indica
agttgttcaatcactctctatcttattccgcaatacacgttgaaagttctaatttttttatagcggtgtttgttataattataacctcactctcaaaaatttagtatagtctaaatagtttatagtgatgaaaataagtttaaaattttttaaacacgtgtcgtaataagttgaaataactctgtttttattgatgtaaactattcattcttgaaaatttacaagtttgatatatggtaattataacaaatgttgccttaaaaaaatatattctgacgtgtgttgaataccaaggttgaaaatcaagttatcttaaaaatattgataataagtagctgatattcatgtacaatttttatttttttgttaacaatgttaactaattaattatattatatgctgataaatatataaatacacaatttattttctcagattaacgagtaatactctatcacatgacgaatggatactcttggaatacagttttcatctttaattttaatataatgttgaaatgatgggtgagtattattgtgtaaaaatgttaatatttatgtaagtatttatacaaacatatacatataccaaaaccttattaacactcaagattttgaccatatattctttaattacaatccgtatgcatggaccaccttccattttcaacttaaaagaagttgctatctaagccagtagatgaccaaattatagaaaactcataatttgatttgataactctttcacactatagctagttaattattatttttcctaatttatcaa

SEQ ID NO: 195465 - DNA, 1366 bp, Cannabis indica
ttacaacttttgtatggtacacaaacaaggagaaaaagtaaatctctttccactaaattcttttatttcgttgtaccatgtaaatgtaaacagaacgtttaccacccttaaaaaattttaggaaattactcctttaacaaactttttcttaagacaaaaaaaacaaaaaaaaaatggggacatgttatcatatatctgttattaaataaggtcctctaatgtttctttctttcctctatgtagacttgattttgtttgataccctttttgtaagtctactaatttcttcttcttacttactttttttttttaaaaaaaaaaataatataaaagtttcatttcattgtatattgtatctattccaaatcatatataaattttcaagaaattttaaataatttacagtactaaaatttttttatatttgacctttaattttaaaattgtaaattaatcataattttatgaaaatttagtttcgtcttaaaaagttataacgtgtagtatcatgaaatgataataatagcttaaaaagctttttttgaatattgaagtaaatagagaagtactgaaataatttttttccaaagtgtactataatttttttatattttattcacaattttatgacctaaagtatttatttataaaaataagcttttaaaattttaaaattataaaaatatatttctctaacaaaaagtaaaaaaataactaaaaaacaaccataaatcatatataaatacaatttatgacaactataattcaactgtgaataaatattaaaacaacttaaaaaataatttattgttgttagtaagtacgttttttgtaaataaaaaaaattaaagcgttaaaatcaaattattttcatgttatcattttttgtatcttttttaaaattttggtttattatttaaaaaattctaaattgttccattaataatatttattttgtgttgatatttattatgtttttacaaaagggttcgtttcatttgatatcaacaactttattagttgtataaaagggttcacagctctttataacactttcggctgctggaagaacctgattttaagattcttgttcttcccagcaaattcaaattatttttataattaaatcaaacctttaaagaaattctcttggtagaagagcttcctttctaagttgtagttcccactatacccttttgcaaagctcaggagaggagaaagacgagacttttgggaaaatcactttctttcttttttcctctctcgatttcaacaatctttggtgttagaagtttcttttttttttaatttactggtttctgatttggagaagaagaagaaaaaaaagtaaagcttgttcgaatgg

SEQ ID NO: 195466 - DNA, 1224 bp, Cannabis indica
acgaatttattgaagaatattatcccacatgaattaattgtaaaagtaataagccatatataagaatataaactactctattcatcaccaattcgactcgtccttattttttttatgcctaataacttattattaagtaatacataatttggttttgataaataaaaagggtcaccactagctaccctattctgttggcttttaaaaccatgcattgacaagatagatatgtgtaaacaatcccctcaacctaaaattagaagaaattacacattacacaaaattctccacattttttagttaagaatagtaattgtgttgtggcctaattgtgttaagtagataatgtttcaaaggcaaaccaagcctgctgttgtccttattgggaatttttttcgctctaattatgcttagtttgttgtttgtttagtcatctttacatgtgatattttttgcagctttatttttatctaacttgatgggtttggtcccatttgacttttgaatgaaattctcaattcaaaaaaatttatatggtcgtacgtcttgagttacaatttgtactatatatatttactaaaaatatatatttatatagatataaaccacacatcttgtgacataaaaagtgactagattgataaacaaaacttggatttattaatttaagggggaaaattttccacaatttcagcacagacgagcagtagtgctggaacctcatctccttcaatatatacgaagttataaatatttatatatatatatatttatatatatatatatgtataccagcgtgatccaggaagcatgtctctaaaacttatggaaaaaatggtaccaccctatatgcacagccaccaagaattataaaaatgataatgaaaaaagattagagatccttaaattacttgtattgttaaaatcataacctctagcgccagtaatatatatatatataatgcatttcctaaaaatattataattgtatatgaaactaactttatcttctgtttttaagttatgtgtttgtgtttagtacattatataatggtccccatggccatggcgctatagtactcgtacaaatatataaatataagagatttgttgttttttaaataggtatatatatataatttatggtaaccattggtggtcgttgcttatgtatagattacatggtcccccaacattagttattcctctatatatatatatata

SEQ ID NO: 195467 - DNA, 1556 bp, Cannabis indica
aaaagaaaatgaaaaaaatgaaagaaaatacttgacatattcttttaactttcatttatatatattgatattgatatttataagtaaaactttctgctatatcaattgtaaaaatattttaacactaattaattttaaatttgctaacttaattaaatccaataacattaaccattagtaaaaatatttttcaatcaactaaatattcaatttatataaaataataagagtttatattaataattctattaatatatttacgataatattttttttattataataactttaattgattgaaaaataggaaagcaccattacaaagaaagaaaagaggtctcttttatccatgaaagctaataacttatcttaaggacatgcttaccaatcccatgagtcacaccattaaagttatgatgtaatatgagagagaaatactctagaaaaactagataataaagttttaatgtctaaaaataagataccttcagcccatattaatcctactaatacagcaagagcttttgcaaaataacaaaaaatagataagaattagtaacttcttcataatatgtgaaaataagtaatttaaaattttatgacatatataaggtcatgaagtagtaatgttttttttaaaaaaattgtaatgaacttctcattgaagtccttggattcttaaataatcaagtgaataaagtaaaaacacacatgataacaataaatatgatatttttataaattaaaaataataactttcataaagcttttgcggaataataaataatagaataaaaaacacagaatatttatataattttgtagttaaatctacataattcacaagtcattcttatttctagtgtactgtagaattcaagagatgtaaaaaataaaagatgaatttcttttagggtgattacttgatcctttggccgtcctctgcacaatggttatccctcctatttattcggtttcgcatatgctaatttttttttttggacttatcttaataattaatcatgaaacatgaataattcccatgtttcatataattacagcatgtggtaaatgcataactgcctagtaaccgtcacttggatttatccaacaaattgtaatttcacctagaatccttcctacactgtgctgctcacaaattagtttagtagttctccatgtggacttcttttgttcatctcgcattataaactctttatgtcatgactcatctagccttcctatatcctgtatttccttttgtgtatgttctgtactcagttatctcagagattcgcaacatatattattttactcttgctgattttttatttaataattaattcttctgactcacctttaattattatttaaggtaagacttaaatataacactgtcaatagtaatttttgaggtactttaagtaccatatttattttccttaagtgcattctcttttatttgagctcttgtccatgtatcgtgactatatttgctgctccaaatatgggcataataattgttccctaaaaaattctttctataaattgaaatg

SEQ ID NO: 195468 - DNA, 973 bp, Cannabis indica
tggtcctttaatgtttatcaccaaattttgatttttcattatctttatcactcaaaacgattatatgttcaatatatattttatctaaatagcattgctattagacactaatagtgttataggacctgatacttagtcggaccaatagcgatattgacgtacctaagagggtgttagacaccactagtgctttttagtattaacctttatcttaactatcaatattattcttgtatttttttaacatcatcaataaagtaattaactatgttgtgaaacgtgaatacattaatgaatatataattgtaaatgtagaatttaatatagataaatgtgtagaatattttgtaaaatgaagcatatgtaaattaagactgtatattagatttaactctttactcttacacttacagggtatggttgcattacatactttgtactacagctaacatatatatcatcacatttttaataatttgttaatcttaaaagaaagaacaagaagaaaataatcacattaatatttttgtgaatcaatcctccaatagtccaattttgtatttacaactgctgattagaaaaaggtaattccttttctatatggtaacaatggttgggtgatgataagaatatatacgaagatcaaacggtccatagcattgtctgagagttttgtccagcgtgggaccaattccataaggtaggattttcccccactgcagtgtataggtacaaacgtcacgtgtcgacttattgtgctgcatggcccatgattcacgttttggtggcctaatggccaagaagcccccaataaaataaagcacttgcccactgtgaaaatgggaaaaacccacaataaaaacactttctttcaatctttggcttcagctcacccccatccctctaacctttttaattctttcttttttattaccgagagagagagagagagagagagagagagagagagaga

SEQ ID NO: 195469 - DNA, 1195 bp, Cannabis indica
tcagattctcctgtttctgcaacatcaactatctctaattttacagctacacgagatgatcatcatcgtaagcatgcagaactattaccatctgtagtacatcagcatcaggccattcaagacaaaattagatcaagcctctcgggtggtagtgtggattcttcaatagaaaatgttcccatagttcctcggacaacaacgaatacagctgcagagagagtcacatatgacagagagaaatttaaagcgaacaacaagatacctctcaacgacgagccatgttgttgccaaaggaaagagagagctgtgcagggtgttgttttagattatcaagaatcgcagctcttaaggcgacgagcaatgacttcagtgattatggagaaccagcaaacaagttgcaatcttaacagtaggcccaacaacaacaatatggaatcaaggtctgacatgtacactccaagcagtacttgtccaacttcgaaatctgaacaggaggtggttcatcgtccagctgttaattcttctggcaatcaaaatgctatgaggggttctgctgcagatgctgctgtagccaagtttaccagtcgtggcgattgtgattccatgagtccatcttctaactccatactcaggttgatgggtaaaaacttgatggttgtcaatagagatcaagatgaatccgtaccacaagcccaggctcaatcacaatcccaactcaaccatataacttcaccattttctacatttaccggtgtatctcccagcagtactacacagaaccatgtctaccgtccattccaacatcccaacttccaacgaggttcaatttttccaggccagcagtgtgttgatccaaggatctcaaatggtatgagaacttatgagggagcagcatgttcattttcaaaccaccgaatggatagcggttttgggatcaatatggagcttcgcgagtttgaagcagattatagtattgaaacaccacatagaaagtttaagactgtactttctggtgtcagtcctgttaaagaaatcatcaccatcgatgattctcctgaaaccgaagctgatttgaccggtgatcacactgcaaaatactcaagagggtttggggagaatcctatagtttcatcatcaggcattatgattcccaactataatgcaaaacgctctaatacttctttctatagttgtc

SEQ ID NO: 195470 - DNA, 1900 bp, Cannabis indica
atcctagctcaaataagttcggcatctgctatccctcttgcagccatacttctactggctttacctgatgatccatcaacagcggccattcatggtttgatcttggttgtaatgggatttttcatatcttggaatggtcccgccacgaacaagtgagtactactcttgttttttttctctttcaatcttcttacttgacaattcagcaagtatgcccctctagtcataaggctgctaaaacttattaaatcaaaattagaagtgaattgaggggaattttgatataagatgttatggtccttccttgcagtcctattttcgcagagatagttcctgagaaatcccgaaccagcgtttatgcattggacaggtctttcgagtctgtgctctcatcatttgctccccctgtagtggggttattggctcaacatgtttatggttataaaccggttgctaaagggtcctctgcatctgaagaaattgctgcagatagagaaaatgctgcatctttggccaaggctctgtacacagcaataggagttccaatggctctctgctgtcttatctactcattcctgtatttaacctatccaagggatcgggagcgagctcaaatggaagctttgatagaatcagagatgatgcagataagatcagaattacctgtagatgggcaacatcgtcatcaagttctgttatctgggtcagaagtggaggaaagaacagtaattgaagtggagtatgaagaagatgctagttttgattttgatgatgatgttgatagtgatggtgatgagaataccttgctgcaccgccagttgacctttgccaatccaagtgctctgtaaatataatctacaggcagaccttggcttaaattccacaaatctacaatatcggaaaaacttaagcttgtgaaggcataccctgctttttgcaggtataaaccttactaaagaaagtaacaggcggtaaccatacaaaaaatgttgacagtgttagctaagatgccaacttcagagtctctgtgatcccaactaagaaaaaggggagatggaaattcaaagcttgatggtaatgtaatctatgttaccctcaattttgttaagtggtgaaaattctagtcctatatagaaaagattttaggttttgcttacaaatcaatggacagtaaagaactagcgagaagtgttttcttcattcgtgtatctactaacatttcttttgtatacaacttttggggttttccagttacaataagtaaatttgagaatgtttagtgaacatgccaatgcattatccttttttttcttttttccattgcatattcgtaaaacatagcaactcgtgtttaacatagtacagatttatatgattgcatcatattcaatattcaactttcttatgtacagattttggacatagtttagctattatatagcatatacattccataaaacaatattttctaaaaatgcggctttgaagcagacagatgaaacggcaacatatgctcagttgggttttttggctgagatcatcacaaaaaggccattccttacacatgtgaaaccaactagcccagaagctctacaaagatcttctagttcgcgttgggataggaaaatgtaacttcctgatatttgccttgtattctggaataagaagcataatattttagcttatagattccagtcactataatgaaaaatacagcaaatagaagcagaaatgtgagctgagataattctggtccaggcaatgatagcaaagtgggtaaggtcaagttccctttcacatgttataacattaggaagacagcaagtaaatttcaagttgaagagttaacctggcgtatattcctcaagaatgggaaaaaactaaaaggcccatcaagtat

SEQ ID NO: 195471 - DNA, 2512 bp, Cannabis indica
atggacagccaagttcaaggtcctaggtatccacataactgaagcgttgtgcagagaatcaaaggtagaaaccaaagcaaaaaaatacttctctcacgccaattaaagggcgacctgcaaataatactattgattaaaacttaacaatgagagagaaaaataggtgaagcccaatccctatgcaaggccaacgaaactgcatgtagaagggttgttgactgcgggctagtcttatgcctagggtccactcattttagtgatcaaaataataaaaaaaaataatcttttaaaaatatataatttttaaaaatattatttatcttataataagaatccaaaaatttttatttgtttatagatcatttcaactgaggaccggccctgctccactctgaaagcattatcaacacaaagcttaacgatgatgggataagccatcaagctctctaatggcctaagcttattattgttaatgtttacaattttcgatacataaatttccctttgtatcatgtttgcaaaattatgtgaaagacattgcccgacaatgtcatcataagaaattcaattccttgtgtaatttgatgatataccccacctgctatttctacattactttccaatttaattactattattattattattattgtaaaataattatggaaagatatgtttatgacataaatatttgagcattgatattaggttgagtgatattttaaagagtaatttttttttaaaagttttaaggagtaattcatggtataatacttaagtttaattatcagttgtaaataaatatttaattttaatttttgacactaataatacttaagttatatttgtaaaactcgatagataactagttgttaagtgttaagtaaattgacatatagtaatccttgattagtccaggttatgaatttttattttttttaaaaaaaaataatttaaatataccaataaaaaatgacacgtgaataattacttgacatttaataactaggtacctacagatttttaaaaatataactggcattgtcactgctaaaaattaaatttatgtatttatttacaatcgaaagttaaacttaagtatttatactacaaattattctattttaaataattattaaattaaattatataaaatttaatacttaattgcattatgatatcttaagtgatattaggcacgcttagtatttcttcataaatatatggctatttagaattttcgccccttgaaatatagcatatgcattattttatctcttgaaattttttagctgtcaaaaatagctttgaactattcactttgttacatgtgtcaaattttggttacatgtgttaaataaaatgatgatgtggttgtatgttagcgccacgtgtataatttaaaattattaaattaaaaataaattaatgataaaaaaattatgtaaaataaattaaaattttttaaattatttttcatattaattatacatgtggggttaacatgatggcaattgtctaaacaaccacatcatcattctagttgctacatgtgttaaaatttgagagaataaccaatttagaatgtgaatagtttgtgaactatttttaacgggctgaaaattttaaaagtacaataataaatagatcataattcaagttgcaaaaattataataatctaaatatatatactaaaacttaacaaaaatattaatatatcatggtagaacatttgacttatgatgtaataatttttgtattttgtaaaactttattgatattggctgtagctattatatttatgagattattatataatatactaatattttgtaaatttttttatatatttatgttcaatttatttttattatttttttttttatatttttgcagtattttataaaaatacaaaaaaataacaaaaagatcacatgaaattaagaagagaacaatatctaaacaacataaaaaaataatatacaaataataaaaaatcaactacaaaataacaagagtacaatataaaaatacaactaaaaaatcgtattttatataaataaaatttgaaaaatcgtaaaaatattgaaaattccgtacaaactgtattttattaatttttattatttttatatttttatgaaattatcgctacatttatttaacaaacaattacttaaatataatattaatttgttaaacaataaattcaaaaaaaaattattaaggctatgtttagtagagaagaataagagttggaaagaaagacagcatgataaaataaaaaggatagtaattttttttgtttggtattgagaataaaaagaagatgatatgtataaatttaaataaaattaatcacttcagtctaatttaagtgaccataaaagttattgaacttcgtgtgtaggagttatgggatcgaatctgtaattcaagaatatttgtatgaaaagataattctaaatcaattgtaaaatataatgttgttaattatttgtatttttttat

SEQ ID NO: 195472 - DNA, 805 bp, Cannabis indica
gagttacttagtgtaaatttctctaacaacaaatattctccaaattaagaagtatatgtatatatgtgtatatagtttatgaatattttcaattaaatctttctataaagtttatatatttttcaactaaattaatctctctctctctctcacctggtgacaagagtgcccaaaaccactcgattggcacctcgaacagaatttttgtaggaatttcaatataatatatatgtgactccattaacagtatcgtatcattcttcttaattaatcaagtatatctatacaaaatcgtataatcatgttttggaaaaagaaaacaaaaaaattaactaattaatatgcaataatacgtacgtgtttggctccaaattactgctagaggccgttttctggaaggtcgtcacaatatgatcagctcttgcagtgcatattttatatatatatatatatatatatgtataggtattgtgtgtgaacatatatatatacatatattctgtttagtactttctgaagaggaatcatcaagtccagttatattcttaagactcaaagaatctttagttattgctttttaacaaattaaaggtagtacagtttaggatgcttgtcactctttcttttcaaattttttatgacaaaattccaaaaggattattgggtcaaactcctcttcttaattatatccacaataataatataattaatctactatatacacagtaccacatgattcttctaatatatataaacaagtaataaaactcactatattagttttatcaaaaaatagaaaaaaaaa

SEQ ID NO: 195473 - DNA, 2042 bp, Cannabis indica
gtacggccacattttttttcatatactcaaaagttgaaagtgaaatataccggactaagtttttgcatattaattaattaaaacatagttaaattataattttatcttttaacattataaaaggataaagtatatatatgtatcttaaattaataaaaatgtttatgtttgtggttgtattaatttgtatatgttgctttcaaaaaaaaaaattgtatatgcatctatcaatttatgatgatgatgatgatgaagagtatatttatagtagtgaatatatactacattactaattataataatatgcatgttgaggacacgtgttactatgttatagcttgggttttggcttgggtgagcaaatttggactgtagtattctattttcatttgtctttaatttcacttcgtgaattgggtgcgaatctctctattttacgaaaaaggaggtcccaattggataaatacaactagtttctccaactcacaagatgccctctgccctctaccgatagctacacccctattaataacttaataatattcatccatatataatgtatagatatattagatacgacagaaacaagtaatattattatttgtttgtaaaatatataatctctaaatatggaaaattttaggctactcaatttaaaaacaaacttactatttatggataatcatagagacttagtgtgcaaactatcaatgaataaaatatgtataaatttgttgtttatttatacataacaaccaaaacaccccttttaacatatactatataatatgttgattattttatgatatgaacaaaaaaagtaaattaataaaaaaaaaatatggacgtagctaattagataggaaaaaaataataaaataatgtatatcatgcatgatttagtatatagttttggatcaaatatatatgtagtaatatgaagccgtacgaagaacacgtcgtattaagttccgtatgcaatagaatcgtgtggttgtgacgactgtttatgattatatttatctatatacacatatatatataacaagtatatatatattataatatagagcgatatatgatttggttcactatcaaaatgatatcaaagtgtgatttggaagcgttgcaatattaataacacaaaaacacgtacagaaatatctaatggaacattctcatccatcttttttttaattccttcgctatcaaactttttcgattttcatgatctctctctctttctctctctagctaataagaatcatatgtaataccaatctatagctatagtattatagtgctatatagctagtaataataataaagtacacatgtacaacacaacaccccatcacaagaccctatataaacacatccttaccagcctaaatttcccacaacaaaaacatcatcaactcttcttactacaaactacaacaacttctactactttcataccattccagcctagctctactacttcttcttcttcctcttcttcttcttagtgtcaaatattattgttggcattgttacattttgatatattattaataattataatggagagagtgactaagatggcatcagagaagccagtggtgatcttcagcagaagcacttgttgcatgtgccacaccataaagacattgttctgtgattttggtgtgaacccaacggtttacgagctagacgagatcccaagagggagagagatcgaacaagccctcaccatgctcggctgcagccccactgtacccgcagtcttcattggtggtcagctcgttggtggtgccaatgaggtcatgagccttcatctcaagaggtccttaattccaatgctcaaaagcgttggagctttatgggtttaattaatcccaatatatattatgtttcttataaccctattacctttcacgtacgtaagtttagagttttaagagattatatatatatattaatattatatatataacggaatatgaaaatagcttatagaatgagctttaattaagttattataaaaataataataataa

SEQ ID NO: 195474 - DNA, 945 bp, Cannabis indica
aaaaaaaaaaaaaagcacaaccattaaaatgggataaaagaaacgttttaaccaaactaaaatgtatacgttatcattatgtattaggcttataaattgggcacttaataaagtgggaacttaattagcgtaaatatgaggttgtgtctcactcctctttctctttttgttttgtgtaaaagagtcgatcgattaaaaaattataaaactagtggaagcaaagcaaagcaaagcaaagcaccctctcttctctttctgtgtacctcatcatgccactggcaacagtcctatacgttatcacgagatgcatctttaaagcaaattattttcaaataataataataataatataatttattaggtaaggagtataataataagatttgtatggggaggaattgaagttaggggaacagagctcatggcctgtgaacccaaaaccaaccataccagcctgtaattatcctccgcatcacacttgccactaattttcattatttaaacaaaaagcaaatgtaatttcttttattttaaacaaatcccattaagctctaccactattttttttggtatcatgccaaacagaaagagagggtgacaccaattaaatatctttatatgaaaatcaggtgaattttgtatatcacaatatatattttttaagaatatttggggtatcttattttttttaataaaaaaatttaaaaataattttaaaaataaataataaaaatatattttaattgacatatgatattttacttaactaaatcaacacttaatagaatttatagtttagtgcaacaaacaaataacacatgtattccacttaatattatctaattaaaaattattaaaaaaactaatatacatcagtctagttattgctatataaatgtatgaaattggtaaaaaaataattttttagtaataaaaacaatacat

SEQ ID NO: 195475 - DNA, 668 bp, Cannabis indica
cttcaacttcggttgattataaccaacagcaagcaaatcttcaagccaagctgctgtgaactgcaaatctttttcagtccaaaacccttcttttgccatagcaaaactcaaatccaatattttctcgaataaatttcgcttagtagatctccaagaaaccaaaaacttaatcaaccgaccaacatttacatgaagatccttttcttctgcaaaagggtatccttcaatcttatcctctctaaatattgttggaggataaaccacaacagaaccaccaatttcccacaaaaccctttgtgcccaataacccctaatcacatcagaagccattgaactaacagaaaccggaagcattaaagcccaaaacgaattcgaatgaaacaatgtattgaatgaatttacaggtaccataacaccttgtggtaatgcaaccttaggagaattatcatcaaaccttatatcaaatgattctgaacccaattttctagttaagtaaaaaacagaatcaacatcaggtaagccattagataaaccctgttgaatatattgtgtacctccaaacacttgattatagtactcttcatgaccaacttcaccaacattctctaatggcaatccccttggccaaaccgaacgctgcccaaaatgaacataaggattcacaaccg

SEQ ID NO: 195476 - DNA, 1241 bp, Cannabis indica
atgctacttacaaatttaaaattatgccactataaataaatattgagcttatgctacttacaaatttaaaattttaaatacttatggctctattcacccttttatttttccccatattttgtaaattctaaaaaaaaaataaaaatcccctttaatttgggcaaaccctatttggatcggatcatcggagctccgaataagaaaacaaaatttcgagactgccactgtgatgtgtgagcctccatatataagcgcaacccatttcaaaggcaggaagcgactagactgctgctgactagtacaactgtcttgtcttttgttagcagcgtctccattaattgagcgggaaaaacccacacacaaaatccgaagggctaaactgcagagcccacgctttttgtaactgtaatcgaagtccaatactagccctagggtttcgccgataatggcgaatgttcatggtgttgttgatcaggaccagcaatggttactcaattgtttgtccgccactctcgaccctaaccaagaggttcgctctttcgccgaagcttcacttaatcaggccactcttcagccaggtttatgttacataagtctcaatctagctatactttcatttcatttcatttcaagcaggatgatgatttgttcgagacttcgaacttgagtttgatttgtattaggagaattgttcaaggaatcgatatttgatgcttgagctaagtatgtgtgttcgcatatgctttgggattcatgttggactatcttattgtcgtcttatgggaaatgatggtgcctgaaataactttgtacagaaagtataggagttacattgttcacaagggacatgaatatggattttattattattattattattattattattattgctaagcagttaatgctaatccgttttgtactagttatagtgtcttgatttggcatttcaatggatgaatgtgtcaatatgtctttgattgttttgcggttgcgtaaattacttgtttattttttgaagggtttggaagtgcactagtcccaggttgctgtaaacagagagctctcactagggttgcgccagatatccttttcctacgtgcttgattatagataaacaataatgtttgaatgtatatgccactagaggtttatcctttcttttattgtaatcatttattttccgtaattatttctaacatttgctaaacaaaaaaaagtggtctaagtgaaaaagtttg

SEQ ID NO: 195477 - DNA, 2044 bp, Cannabis indica
ccactcagaaaatcaaactgaggtatttgcatgaactcatttctcgttttccaaacacaaatcccaagaccaaattgaatgaactcacaacaaccattagagaacttcaagaagaggctcgagagtgctacgaaggatcaatcaaaatgagtatggatgaatttataaaagttatggtaatcgatggttgcttcatcattgaattgttttgcaaagacaacaatgatgatcttataggagaaaatgaccccatttttggtgtgaattgcatgatgtcaatgctaactcatgatttgattttgttggaaaaccaaataccttggctagttcttgaatctctgttcaaaaagatacataactccagatcatcgtaaacctccccttgacttacactagtcacaaatttcttcaacagccttttttgtagaggggtagaaatttgtcaagaggttcacaaatatgaaaacttgcacattcttgatctattaaggaactcgttggttttgccatctagtatagacaaaacaagaaacaaataatactttatcgaacgatgagtggcaagttttaccatcagctacaattttggttgaggcaggaataaagttcaagcaggctgaaattagtaataatattttggatattaaattcaagaatggtgtaatggagattccttctctattcattcaagatgacacagagtctctatttcggaatctaatatgcttcgagcagtgtctcccctttagtgaagaagtaatcaattcttaccttacatttttggattatcttattaattccaggaaagatgttgaaatattctcaaaggaaaaaattattggaaaactgggatagataatgaggagacagctgtatttcttaaccgaatcgttaatgatactagtgtagatcgtttctattattttgatcttgtgaatgaggtgaataagtattgtcaacgtcgatggccaagatatcgaagagtgctgatacatgactatttcagacatccatgggcatttatttcagtttctgcagcaattatactactcattcttactatcgtacaaactgtatttactatcattaaatagattttatgttttctaatttgcttgcttgtttaatcaatttattgttgtatttttctttaaaacttgtttttcctgagttgttgtgtggttggtttggttaattacaataattgtgatatttttttttttttttgaatggcaatgattgtgatatttaagtgttcatttaaataaaatttaatataaaaataaccctattttatgtaaataaaatacaaatttaaaattacgtgaaaccatattttattattttgttgtatttgtgaaattatcctttaattaaattctcaccatacatatttgatcatataaacattacaacatatcttatctcagaccacaaattaagatataactttttcttttcttttctaattgaggagatgaacatgaaccattccttttacttttgttaataacttttttttacttatttattattatgttatgacccttacagaaaaaaaaaaaaatgtagtattagcttctcatttcttggtattgggaacatattgactggagactactgaagttgacttgatcgattggcaacagtaagactaagatcaaccaactgcgatcaattaccagctgagaactaaaggtacatatcatatataattttaattttcagttgatgagatccagatttattaatatatataatttggagctgaatatcaaagctaaacagaataaaaagaagtgataacttctgtttatactttaatacaacgttattgatttattaaacagcttgtaattaattcttccttttcttttgtacttttaggaataataataagaaaataataatggcaaaaaaaggtgaagaaaatgatagtaagatgactaaaagtgatgaagaagtagccactgttaggattgatgttgatccattggcagatgagctagaaaatatgatgtctcatactgtgtcaatgttaccc

SEQ ID NO: 195478 - DNA, 1799 bp, Cannabis indica
attaatgacaaaattatttccactttattttagttaacatgttaataaacaaaaccaatggatctcattcaacaacagatgatggggatctcatcaaataaagaattggtcggttggtttgtctggtggtgtgttagatttggtgttgcattgcatctgaacccaaatagctatgttgcttactcgctcctctccgttggtcattgccaccaccgggattctgcaaggtgagccgggcttctacggtttagagatggcattatccgggcaacactgtgatccagtattgattcagtttgtcaaaatgttgtgactagattgaataaaaagacctgcttgattcttcttaaccatatttgatgttaggtttatcctacttgtattcataacattctcatgccaacaatggagaatggaaatgtactatgtcttggtccccattttccaatttgcttttctatataaaagtaacttagaatattttctatttataaaattgatgatcacaacttcatgtttactcactattgcagtttaggcttcacaatgaagtagaattttcatcttatggtagaaaatggattggtgagttcattcttgatataataatccattacccaaataaattcaaaaaaaaaaaaacatacatatagaagtaaaataaatcattatgatgatccaaaagactcatggcataacatttgcaatataaatccatactcaaaacttatgaaaacttccttcaaaatcttaatgtaaaactgaccccaaaaataaatttatgttctttcataccaagaaaaataaaacagaagtcctactaaaagaaacatcatttaaaactggagttgcttatgcctcaactctctcaggtgcctccaggtggagaattttaccagttggcttggccaaaaggtctgtgtgctcttggaatggagactttgtgaaacgagtttctctccagaactcaggtgtcaagaaaccataggtcttcaagagacactcaaatgtggcctgtcaaagttcacaaaaccaaaatcttaacactaaataaatgaaaaaaatgaaaattcaaataactaatcgatttttggttcataccctgtttagaaaatgatatttagttcataaaaaagctaaacttgtctcaatctgattatgccataaatattcatttgttacaattactttccaattttaataattgataaccgtaatagtcaaacaactaatcaaatttcgttcatacccagttcagaacacaatagaaatattcatttgttaaaattgcttccaagtttcgataatagataaccacaaatatcaaaacaaacaaaagatcaaattttggctcatacccagttcagaacaagaaattcagttcataaaaaaattaaacttgtctcaatttgcacatgctaggaatattcaattgtcaaaattgctaattgataatcccaaaaaccaaaacagcacaagtagcaatatttatcaataagaatcgtaaaaagggtaataaatcatagaaaaattaaccatgtaaacatcactaatacaaaatactaacataaatatataacagaacatacattaaaattaataaaagttgaaaaataacaaaccttgacgaagttaccaagagtctttgtggatcccctggatgatgtgaaaacatcatcaattccagcaaactgaagcaccttcttaggaaccctagcagcaacaataccagcaccacgaggagctggaaccatacgaacagtaaccgaaccacactttccagtaaccttacaaggcac

SEQ ID NO: 195479 - DNA, 1132 bp, Cannabis indica
attgtcaaggttaaggtctttatcacacctagagtaccaattctggttcgttgtcttcatcatgagtgactattacacaattcttttttctcacattgatgccctagtgcccatttgttatcacaacgataacaaatgcccttcaaacgcttttcttgcattttggagtctatcattctcttgtattgacccatcggtttccaatcattgggtgaaattccagtacccctccagtcctcattgatgcccatttgtctagagttactccagtaagaacgattgtcaaataaagaatgattcttgctctcaatcttcgaaaagcaagctcaattgctttattcaaagttccgagttcaaacaatcgcaattcttcccgtaaacctctttgaggccgaaaagaaaccgaccaagtgccgccactcgaataccccgtctaatggtgcgaataattccaaaaatccctcacagtgttcttccacggtactgactttctgaaaatcaagaaattgatcatgtaaggatccctttgaagtgtttcgaaatttatttaggagaagaagcctcaaatcttcccacaaacaattggacggtagcggagctcccaccaataccatgttagagccttcccttcgaaactaatcgttattgcctcaaccatttcctcattattaattagttgcagtgtgaagtatttctcagcccttagcaccatccatcggggtcattaccatcgaagatcgacagctccaaacagcgcaattggaaatctcgttagtggtccaaacagaactgctggtttccaacactggcatccccactttctcaaaaactagccgctgtgacgacttcaccatttattccaatgcttctgaagtttggtgaccggagctgggttcttgattaccgacgaatctagaaacctccgtcggtttctccaagagccgtcccaccaatctctttggaattattcttggagtcgaccaactcttccatctctgtcaattcctcagtgcgatcttggccaacttttcaggtttctttggcatcgtaattccccccagtcatccgctctgatagcaaaatgttacaacaaaaacataaaggaattgacttatgaagctttattaaggtt

SEQ ID NO: 195480 - DNA, 1494 bp, Cannabis indica
atgagttttatttatattttttacagtttaaaatctccaataacaacagggagtggcacaagtttagctggatcagaacccgggtctacgggttcggtaaccgggtcgggttctggaccaatacaagaggcttcattggctagttcatggctagcaaatatggcaactggggattcaatcaaaacccaaaatagtttagcttttgagtcttcattggttttggtcatgggcttgattctctcatttttgcacttgtgattaagattaagaagaataatttggttactaaaaatgacttaaaattatttctctcataatttttttggggaaaaaaaaaaaaaaattaacatattttgtatggtgaagttgagagaatacagattggaaagggaaaccaccaattttcaaagtctataaataattcatatttaatttaataggaaaaaagatgtattattgtataaagtataataattaattaataaaataggaattttcttaagctgcttttctttcttaatataatatatttttctcctttttacaaatagttattaatcaatatccccttgttctagtatgtgaaaaacaaaaaagaataaaggattaataatttgggttaatttgttatttttagactttaaaaagtggaaaaatgaagtagggtattattggtaaagccaagtgggacacatgcatgtgaaatgagattttggcttttaattactattttttgtgcacacaaaatatatacatgaagagaaattttatatggtatcttaagattttgaagtactaattgacatattattattcatgtgtttaatattggattttagatttaataaataatgtgtatgccaaaacaccccattatatttgaacttgtctcactctagtgtgaattaatgatttgttaaaacttgcataaaaggtttccttgcatggatgatggttaactataaggtagtttttattattattatttattttatttttttctaatgaaaagatattatgtctaaaaagttagaatagttaactcaaatgagatatttttaatgagatacatattatggtaattagaagttaaaagttggtagatatttctagtagtgaaatcattattgcagtgatgaattaatctagtttaacatctactaataatgataaattaataataaagcaattggctcctagccaaaatcccattattcaaaacctaatcatagataaatcaatttagtgaaaggtaataataaattttgagtaaagagaagaaattttgaaaacaccataacatacaactcatatatataaatttgatttctttaagcaaattataattaaatgataaaaaaaaagaacacaaaggatattaattgtattcactcacaatatgataattaaggacaaaaaaaaataagcaaattacaagttgtggaatggccataaaatactgcttttttcattgctatcattaatttttttttt

SEQ ID NO: 195481 - DNA, 1774 bp, Cannabis indica
agtcgacagatcggagtttcgtgagtctgtgttcgccgccgacaacgctgaaactgatgacgtggcgtctttcggccaggatctcgagctttcgtactgtattcgccggaagacctgaaacgacctgaacttcacggagagacctacatcgccgtcgccgacgatgacgttacagctcttgacgaagtgtttgtaagcttggggattatcgaatcgctgacgactgaccagactgtagagaccggtgcggcgatctcttggattacagcggagcatgactggtccgctctaatctcgtgcgtgtggtgacgcgccactggctcaggtaacggcgcgattatcgccggcgaccttctcttgagattatggctttggctttgcatgtttcctccgccgccgttgattcgatgaacgagtagagccgacctcggcggattcactggcattttcgtgatctagatcgattcttggctctgatattttttttctttatatattatcacaaaatatatactcaaaattgagagttgttttttttttttttgtagggtttaagctatagtgttttgggtttgggttgttttttttaatatatatatatgaaaaaaaaaaaaataagaagcaaaaaagagagagagagttgggttagtcactttccaattttcaagagggtacttttttttttagaggtgaagatttatacatagaaatatatactacaaattttataatgcacctaagacagtgtattgatttatttttatctgttttgttttgatagtacaagtgatttgtttagtttacttatttttgaatttttacaaaatattaaattttagacaaaaatttataatttcactatcatattaattttttaacaaaaatactatatttttataaaataattagaataattaaaacgatagtaaaacagttaaatatgtagtagtaaaaactctaattatttttatagttatgtacgtattatagttatttaagatatttttttaaaattttaaaaaattaagaaaaatttagcatgtcaaattttaaactattacgtgtgagtcttttattttatacgtgtataaaatagactgtttgaacattattttttaaattgtaaattattcaaaattttacagaatgtgatttttttttcttttaaataccaaaatatataatgtgtatcgacaaagctattttaagagtaacattatataaatatatatttatattagaaaaatagaaaataataataagaaaattgtcaaaataattaaaagaaaaaaacgagatgcaagttggtggggataaaattattaaaatgcccccttgtgtttgggcatttaattatgctaagattacaagttgactctcttttctcaatttgcattaaaataaattatcagtttcttttaaataaatatcgccggtgtgagttgagtatttttttggggaagaaaaaagaaatggaaaaaaaataaaataaataaatatatacattttttgaaataatttaataaaatactttgaacaattcttcttgggtcatgtgctatatttatttatttatagaactattttaaagatggtttagcttaattaacaagtgactttgtgctaaggttccacaaattaatacaattactaatacataatcaagccattattaaatgtacacaacttgggtgtaactatataattatatatactaaaaattaagcatgaaaattgacctaatctttaatacttattaagttattaattggca

SEQ ID NO: 195482 - DNA, 1233 bp, Cannabis indica
tttgtttttgtttttgcctttttagaccattaactttgactagggattacaaaaaaacctgaactttcatgctgcctcttctttaagttgtattggctccacttgattcaccctacttttggtggttcccaacccaacattgtattccaatttctccaatcattttagccacaaacaaattacttcattcttgcttctttttttttcaatataaacatatatatataatatatattaaaatatttctacaatacaccttgaaaaagattattaatgtattttctatttttttttatttagcatctgagagaatattttagtctaaattcttctatgatcggttacgttatagttatttaagacatcttgtaaaattttgagaaagattcaaaaaaatttaacaagctaaaaacagggttcaaaagtatataaacaaatccctttggtgcattgtaagaatttttctatatattatatataatatattctaactatttaaaagactacacttttacacattggatgaactcaatggcctcataccaaaaatatatgaatattgaatcctattcaaaacttctatgtttatatttaaattgatcatgtcactcttttagaaatgggtacaaaatttaacttcctaaagttttttttttttttttgggtaaggaaattaaacttcctaagttggaaaagaatgggttctcttatattctttgcttcttttattaatatgtcctgtaatacattattttgcttattgttattattatattttaataaaaaggcattacatagtccaatgaatctgtttccttttatttttaggttcttactgaacctgatagatactattttggttcattttcacatgaagacttttttcttttacatgtaaaattagttgaattatttggggactgcaatgtaatttaataataaatacgaggggtatttctgtaatttaacttggccaaatggatccaaatttatttcaacggccgagatgggttgggcccacttcttatactttgattggtctactcaagggaatgatccaactcttaattgggtccctcactgtcaaaatacaaaattctctttttaaagttccgaaagcaccactaacggagggaacagacgccgtttaaaaatttcaattatttgtttggtttttttatttatttaatttttttttaaaaaaaacgataaatgaaagataaattataatag

SEQ ID NO: 195483 - DNA, 2257 bp, Cannabis indica
gaaaaaatcacctaaaacaccaaatgaccaaaccagccaaactacactcgcagcatccccgtatcactccacccagctcgacaaagcccctcccaagaacggctgaagcatcaatcgcaagagcaaagaactcagaatgtggtggcatccaccgagtaggtcgttgtcaaacttggtttgaattgcaccgtcccagctgaagatcccgccgaacatactctttgaattccaataggtgattatgggctaaatctggaacaatatctaatcttgactgcatattatcaaataatattgagtttcgatcataccaaagtcaccataaggtaaccatcattaattcaaacgcctcacaagataaatttttaaagagaaatagaagaattttcgacaatggtccatggacacaccaacaaagcactaaccatacctccaatcggtgccataatggaattaagccaaagcaggaaaataagcttatgtttcagagtttcagattcttctccgcactgtgaacaacaaaagagtatctgaaccttccgagagataagtcagataagctatgtaaatcattttattttacatcaaaatttatgtttatttatttatagcattcttaaattttactgtatccgattattaatatagctcaaatgtcataatctagttatcattaaatttattagtttaatgaattctttggattataaaataacatattcaatgatagaaataatagcagatgtaatatatatgcatgagattaatttcgtctctttcctttcaaaatcagaatgtcatcataagtcattttaactagagttaatctgttctcacacctctattccactttctaaattatgcttcaccgattgatacccttacttacatcttaccttcattcatgtttttatcgtttcctttccattacttatatgttatttctaaattggcactttgaacttgatgttttattttcttcgaaacgacacaataattttgtcatgtttgcgagtttattattattccttactaatatatttctcaaattttgttagtgtgttgttgctgttgtcatggaccataaaagaaatcaacgacaaaactatttttcaaaaagacaaaacagaacacaaattgaggtgcaaattcgagatcatgaagatattaagagccagtttatgtctttatttatgagactggcttgattggtctgggccttcccttgccaactatggaaagtaggctgtgagggtaagtgaagcattgggcctagttgtttgaaggttacttttccaataaggcccaccattgaataagccccaacaatttgtgagaaattcccatttctttttgtgtggaaatgaataaaatttgtgagattcccaccaaattttataaaacatagctacaatccttttaagttgatgaaggaaatagaataggagacagggagatttgagtaacattttttttaaagttgtttttggtagaatggatgtagtggtggaaggttggaggacatacatttatttgtaaaattattatattatccttatacatattttttaataatatttttaacatattttttgtaactttattttgagaaaatgattttctaaaaccaatggcaacaccctatttttgttcagaaaaaaaaaaacaaattttagttttttaaaacaaaacaaaaaacaatcttcttaattttcttatataattatatatattgtaattatatcatgcatcttgctagcttttgaaacaaaatgaataatttttgttgctcaactaaagctttaaatactttgttacactcttcttatacataataaataaaaaaaatcatagtcacaacaagaatacaataattgtcctaattaaaatatacaccatatacaccaacattttttttttaaaaaaaaaaatctgcacctatgaaagatgataatttgtcataaccttaaagaggtaattgttaagagataattatgacataaatactcaaaattttatatttataataggtataattcattattttttttagtagtataaatattcaatatttgtaaaataacaattttaatctaattttcccatacaaagtctattttaatttattaaaagaagacttcaatgtaactcatatatgtttctttcaaatccaataatttagatttaaaataataataatgtatgtattgacaaaaaagagaaaaattatactttttttttttggagataaaatggt

SEQ ID NO: 195484 - DNA, 997 bp, Cannabis indica
aaaaattgaaaaaagaaaaagaaggtcaatggtaaagtagagaaacaaacattgaaaatccattgaacagcatccaaacgagcagatttcaaccaggtttgacaaacagtggaacaatcatcagaagttgcgatgcctttggatccaaaacaagtagtagttatttctctcttaaacaagttttcaatatactcatcctcatcttcagcaacaaaacaatatgacataatatctatacaagtatcgaaactttcctcgtttaaacatgactcatcttcttggcacaaaaggctagaaaaacacaatgaagtttcatcagcagtagcagagtctcccattcttgttgcttctcctcctcaatctctattttcatctataatgagagaattataaagccaaaatctctacaaaacaccatctgggtattgctttgattccatccaccaactcctcaagactaagatttagcacaattgagagagagagagtgaaagagggagtataatctggggagtgagaggaggaaagtagcggttttggtgccgccaaaataagcggatgagatatagaattagaagagtgagtggggaagttaatagtaacagttacatagtaatgtagtgtagcagagtatatatatacatattactgtatacatacacgatactatataacatagatacacatacttggtacactactacttccacccatggccatgatctggtttttttttttcttcttttattttgcatatgtttttttttttctgtaataatattaaatatgtattatgtatacgtggggtttgagtttagggtactgattaggtacatgctgttgtaccacttttttgggtgtgtccctaaaactttggacagctgtaggattgcaagttttgtcccatattattaagaggggactcatttttggtcatgagcttcatcattcataaccatcaacgcttgcattgctcactttcttttttttttttttt

SEQ ID NO: 195485 - DNA, 1304 bp, Cannabis indica
gtaaatgttgatggcgttatttttgcttcagagggttggtttggtgctggtggggtggcccgagactgccatggacaccttattgaggctttctttgttagtaagtcgggttgtgttgatgctgctattgctgagattattggcatcaatgaggctttaagttagattaaaagaaagaattaggtttggggttcaacttgaaattgattgtttaatcgctgtccaagccttatagagttcgattcatatgcctactgcctttggcgtattggttcatgagtgtaaggttttctatattctttaaaatttcttgagattcattttgtttaacattatgtaaataatgttgttcatagtatcgcttgtagctcttgtttttattccgttcgtactttcactaaaaataatcctctcatttattcattgcaaaaaataaaataaaaaaataatcctatgattattttgtaatttattataatagttaaaacttcttgttaataaaatatccatttccattaaaaaaaaaatattaagatgtatttaatcaatttattgataagaaaaattatcttaaatgaaagtgttagttgggtgtattgcttaaaaaacaactagttggtcattaatgtataattttgtctgtgtagcaatcactcaatttacaatacacaatctaaaaaaaatgatctagaagtttcgacttttagaattttttttaagggacttttagtaaaaatttgtttgagaggaatttctatttatttttataattttatttctattataagagaaaatttattttatgttttcactatccagaattatactttccttttaaacccctttacaaaattctactttgcgtatcagaccctccaccggatcaccgccttgcgagtcccaaaataaaaataaatccaaaaaaacaaaaatccgtttatttgcacaaagcacctcaccgtctgtcatagtacgaattaaatcctccataatactcatccacgtgtcattaagttatgactttattacatttttgcccctataaagtaactcgtaggctactctaccgagaccgtcatataacccaaaaccaaacggggtgtgattctttaaaaactccctcaactcaatttaatatttaatatttattttctaccagcagtgcaaaatattatggatggagttcctaggattttttaacctaaccagggttatttaaacctaaccacggttatagaccacttctaaagcagtttatattgagcgagaccctgccggggtttctgtaaacaaacttccaaaac

SEQ ID NO: 195486 - DNA, 1161 bp, Cannabis indica
aatttatgatttatgtaattattatttttttaaaaaaattagtttatgagattttttttttaaaaaaaaagttgaaaattatagaagaggaaccaatcaattaccttatattgtttctttttaaaaaaatctataaaataattttcttgaaagaaaaaaaacgctatatatttatttttattttatttttttaatttttatgatatataaacataaaaatgaaattcagcatatttatgtaccttgaaattacgacaaagattaacgtcactccagtgtcgttcatccaaatcagataacatagatgtacgatcatttctccaaacaacggctgtgattgaagatgagaagattactttctcaattgtatctgtttgaccacatgcttctagaacattgtgtgctgctcttacttccacatcagccataaattcctacaccaattttataaaataataataataagaagaaaaaaaaagtcaaaaactcagaataattaatatttctagaaatctatatctagatgaagaaaaagaagaacaagacaattttggttactaagagtttcttgtaacaaaatttaaactactagaccaaatcaatgcaaatttgaagtgttttataagttttgataattagacttttggtattgttaattagtcataaatacattttaatattgtgaaacaaataataacaagggatttgtgaaaaaaaaaaatagtgagatttttttaaaaaaaataatagttcattttccaatactaatgaattgtcaacttcactaggttaggctccctggtataaacaaaaatcctataaagacatctctaaccgaacttcaaaacactaaatatagtgtagttaatactatatttactctaaggggacactaaaattatacttataaatagttttgtctatagtgtctcaccaatttagtggagtactatagaccacattatttttttatttttaagtttttaataattaaatgatacttttaagagaaaaaattaaataattatatatatttagtattaaaataaacttattatattgataaatagtagttttttagtgttgatttaacactaaatttaattttttaattggagatggcctaaataaatatttaatatattaacccacctataacag

SEQ ID NO: 195487 - DNA, 1897 bp, Cannabis indica
gaaatcattttattgaacattatggatatatatatttatggtttaattatttttgtctcagaattgctgagaaaatgtgttcaggaaaatgtacattttctcttcaaatgttatggattagatttttaatattttacagtgattaatcttttcattgatttgaacttgttgagttttttttgcctttcaatacatgtagaaagctgatggcacaattaaagtattgatggaggaataatttagaagtgaattagttgaactctgaagaataacttgaacgatcaagttaaaaatggctgcaaatataacgactgatcaagatcctgatagaagtggtactgtgtggactttggatcagaagcttgatcaacccatggacgaagaggctagaaagcttaaaaacatgtacacagaaaaagtatacttgtttcttgttcttgacaatttcttttcccttaatctctcatccttttgaaataccttgtgccacagtttcactgtcaaactcatgatacctggcaaaaagtttacttcaaaagctttggcttttctctctatcaatataattatgttattaatttggatcagtttattatgaacaaaatatgggaaatagtcaaaacggatactactgatatagaaggggttactgcaatttatttatgtacttcttttcggggtagattacaaatctgtaggccctattttaatttccaattgggtgttttctgtaaatggccagcctaagctggcaatgagattaaagagttttatgaaattaagcataggtagctgtacggttcctttgttggtttgttttgttatgttttgtaaatataagcactgataattctgtattcttcacaactgagtcttcatgttttctaggaaatatatgcacttcttacttcaaaattttattctcgtgtcttctttatttgctgtactttttgcttgtgtgatgcactaaacatggttagctactagctatgagactgagagtagaacttttattgaaatttagcatgtgatgctaggtgtttatctcctttgttgatttggtttttgttttctcttgctcagaagctttcaacagtaatgcttctgcaacttgcattccagagccttggagttgtctatggagatttaggcacatctcccttgtatgttttctacaacactttccctgatggcataaaagacccagaagacttgattggagccttatccttgataatatattcgcttacccttattccgctcctcaagtatgtgctgattgtttgtagagcaaatgataatggtcaaggtaaagtgttctcaaccttgaaagttgacttgccatagccaatcttctaagtgcttgcatttgcatttcatttgtttattgttcaaagaaactgaaaaatgaagaaacaaagaaatagggattacatgtgaatagcatgctggaatagatcttttagagtatctatgtttcaaagtaaagatatgataatctagatgttacttatatattatatatttattttataagaaacaatacttaatgttgaaaaaaaaaagaaaaattatttacaagaatatgatgtagtatcctaacaatacttttctaaaagaattatccttaaatagaagaaatttaaaaaactctacactcaatctaaggcaaacaaaaccaacaccgctaaaagaatattacttcaagtgagagtcattacagaaaggagaaaatccttgagtttcctcatttactgaacctaacctttattaaacgaaaaagtttaatgtcctcaaaagttgcatcatcatatttttccacattacaacagccacatggtcttgcttttactcaaaacatatatgtttttctatctgtattgtctcacatatttta

SEQ ID NO: 195488 - DNA, 1147 bp, Cannabis indica
attaattgtaaaaatttgaatatattttattaataattatactatcataataagataaaagtcaagaatcaaaagaaacatttcaaatttaaatattaaatgataaattaagattattgcaatcgtaaaatacggtaagattgtatatattctgttaacattattccgaagattcataaataagttaatttggtttattaaataattatcaaaaaaattatatcgattatatatgaaaagcactaatgttggagttgtagggtttaacagaatagccaaagctcttaacgcagcctcaccccaattatgcaaacataattaccacaattctccaaaacaatatctcaaaaacgacgtcgactactttttcttcatccacaatcaaaatagatttaccatctacaacttttactctatttgttcccttagatgaagcggtgcgttttgagccctagatcgcctcgaaaaccaaattgtacctgcaaaagttgataggaaagctttcgaaacagggtcgctttctgagggtaccttttagatattactctaatcaaattatctgagctgtaacatatatttaatactattagtattattttttattttattattaattatattttaattttttttaaatagaaccctgagcgggagtctaaagcagccgcctcgtctcccttgtctcaggactgatcctgcttaattgtagtggaattgatgctcaacagatgaaaggtttgtaatattaatgatggacatgatcgtcatggaacttacgatttcttccaacagatgaaaggtttgtaatattaatattttatatatatataaatttttttcaatgaaaaaaagggattcgaacatataatatttatttatttactaaaataaaatacattttattaatgataataaattacaaacaaatttgaaattatttgtagataaatttttgttttaaaaaaacgaaaaactttgattttttttgtcaataatttgtgaatatgaaaaaaaaaaaattataatttacctctaaatctaattcatataataatctatataaatacacattttcaatatataaaatgttatgtaagattttttagcacagaactgttacaactatatataaaaaacttaatccttg

SEQ ID NO: 195489 - DNA, 818 bp, Cannabis indica
gggagttgttcttagtttatattttgtgagtaatctataaaatatttacaacagaaaaaacattataatattgttttcaattgacacgcacaactaaaaaaatacctaaatttacaattgtcatatgtgttggtcgatattggccttccccactatctaattctgactttgccactgattaatcgatactaaaaataaataaaagttaacaatgcttttgtctaatccataccaaaaatgcaagagctctactaatactaatgacaaaaaaaagatgatcttgatcatcataatataacattatccaatgaacatgattattagcaataatttcaattgtcattttgtccctagttatattattataagatttatattcctaagttaactatgttaagttatttatataatacttgaaaattttaatttgattgtattttatcaagttgggactaaagcttttttaatattttatcaaagttagctaaattttctaattaaatactactcatgtaatatattatttgatttttaaattacttcagttggtcaattaagataaagttgtatttggatggaagatgatcttcctaaacgctaataaaattatcaatgtgtattgaataagtattaatttttagctgttttattatgagatcatgagaattaagtttgactaaactaatatttactatgtatgttagattattaggttttaaattatgttctttttatatatattttctttttaattaaatcaacttaaatggtaactaaaatagattggatggatccaatccaatccaataaaaaaccaa

SEQ ID NO: 195490 - DNA, 1743 bp, Cannabis indica
gtgctgccatcaattatatttgaatggttaattagtaaggaatatgatttaatacatattaaagtttgaggggtatggtttagtaaatattaaaatgtgggaagcatggtttagtacataaataatcactaaaaagtaaaattgaattaaattagacaaaaattcttaaatttaacaattttaatagttcgaggaaaatttttaatggccaaaaaaattcaaggagcacgatttgatacatgtcaaggaaaaaattactaattagcctatttgataagataatttttacatgtaatttaaaatattaatattgtaccagacaatacatagattagtacgatatgcactataaataaaaaataaacttttagttaaaaaaattcttccatatttaataattaattatgtattgtttcacttatcaataaattgttatattaaattatatatatatatatatattatgtatgggataactacttaatatatatatttatatatatatataaagaataatgttcaattgaaaaaatatagattgattaaaatggagaactgagctactgatgtgaagttgtgaactatggcgcgtactttataactattggtataattaaaataaaatatgcattacatgttacccaactgcaccaattaaaatatagtggagttaaactgaaaaataaggtacatttggttatgattttaggttccatatttgtgtagtttgtctttccacaaaataaagtttaacacgatttaatgacaccatattagtagtcttatttgtaagaagattattaaaaataattttatgtttttatcaaaatataaaaagaaaacagaatcaaaactgatcaaatccataacattattatttcgtgctcttctgcagttccacgtagtcgaacttgatatgatgtgaagaatagtatcgtattagaattacttaataagatttgttcgattttattatattattaaatgttattttcggatctaataacgactttgtgacctggtagttcatcatttacgatgactcataaatttatgtcaaaatggcaaataattactatattgaaatttaatgtttttctaaaaaaaaataaacatagaaatttaatgaattttgatggtactattactatatacgtattaattatatacaccgataattatataagggaaagggatgttataaattacatacacgtggagatggagtagttagccttcaaagaaaagttttaaatattgaagaagtgactggggagacaatatgttagttctaaagttgtttaagctattgactagttttaaatattaaagagccatttgattgttttttcagaagatttttgtgtgtatcctatatggctagaaattgtatagtattaagctatagcaggatatgaaatacaaaacacattcttcaacaccactctctaaagaattttgacaaatgataatatagattttgggttgttttgatagtttagctagtttatttatatattaaaaaaggttacaagtatcttttaaaatttgtgccgtttctttacaaatgaggaagatgctgtttgaagaagattacaatttaattaaggtacgtacatgttaataaatcatggaaattggaaagcttaactcaatatatgccaagctataaatgagttattatggatgggatttgggcttgaccacttgaggcttaaacatttccattattgttcttgatca

SEQ ID NO: 195491 - DNA, 990 bp, Cannabis indica
ctaaccaacaaagactaacaaaatataattttaataactttggcccctaaaaactccttagattcttgctagttaggaatgtaagactttataaattatgctacaactattctatgttttctaaaaactcatttgtttttggaaaaccaaaactatatggtatagagacagaaatctagcttggttgagcagatggttgtttcaccaaaaatctttcttaatcaatagtcaagtgcccatagacaaatcaacgttgatgcatcaattttaaagattgactatgtaacaactttttttgcgttgctcatatggatggtactttgctattggaagcaactttgacttgtcaagaaggtttggtgtaacctaaggtgactgaagtattaagaattaaagaagcgcttagttgaatcaaggcaagagttcagcctaaggtgactgaagtattaagaattaaagaagcgcttagttgaatcaaggtaagagttcagcctacgtggttattgaaagagattgtgttgttcttgtgcaaacaaaacgtagcaggataccttttgttgcaattcgtatttttattgagcttaatatttattctaattttgagaatgtactatttgaatgattgtatttaatgaaatattctcttttatttttgttaaaaaacaataatatataaatatttgttgagaatatgttatagaatttttttacaatatacttcttaaaaaagaatgtactcttatctattttgatattaaaaataattttttaattatttgttttataattatatatgttataattattgcaaaattttaagagattttttaaatactatattttatgttataaattattctaaatatgcacgaatataaatgaaaattgactatttttttttctaaatgaccaaataagtaaatggtggatctctttgaaaggtgcattgtgtataagatactttttttggggagtgatatttgcacccct

SEQ ID NO: 195492 - DNA, 1899 bp, Cannabis indica
tttaccatcctactactaaactagtcctttgagaaaaacagagtcttaatagttgaagagactgaaaacatgagaatacaaattccaagcacagtggaacttcctgtccaaagatcattaaagtagacccttttgagtgttgccctcacaatgttaaacctagtctcatagaacctgttaagctgcctgcatttattagcataaacgaaattcgattcggtgattttataggtaagtttgttaactaactcagccacctccttgttactgccaagcatgttcttaatgatcctcttctcaaccagaaactcaatgtcctcagcagtgtcaacaagttgactcatcaaagcaacatagttgcagatgtaagccttgtctggatagacacattgctccaaagcgatgacatttcgcataagggtctctgtgttgccttgtatctcgaatgtaggaagctcaactttcagagaatgcaaaaatggtatgaagttaaacaatggtttctctatagtattaaactcgacaaacttagcttgtttgttcgccgagggagcaaatttaaccccggctttgttcagctttgtcgcgctgtagaggtacttttcatgttctcggaagggacaaccgcgcctttcttctcttctgaactccttggaaagccaaaactgccttaccaaatcagtaaaatgtttaatttcttttatcccatcgttttttcccttcacatgcacagaagagaaatttatgaagaaattataggcaatgtccaacaatgtactatcatcactgctactactactcctactactactactgatatgatcttcaggacttttcttagagcacacacaacaacaagacttaaatgataaaacccctttgatgaaatgaatacaagagttaatacaataacattcttctgagtcaggacaacaatagctcttaagtcgtaaacttccaactgtgtgctcatgtctaggtttggcaaaggcataaaacttgtttaaaaaagagaaaggaatctgattctcaaaaataaccaaatccaactgtacaacattcctaagccaaggggttttcaacaagtaatcatcttgatcatgatactgacaacccttatcagaaaaaaggcataacaactctaatataaagcaagagtctctaagaatcatttgatcaaacacttggtgagtgagctcaacagtacctgcataagaagctaagatttcagttgaatgatgtgaaacgaagttgaccagatcttgtttggtcttgtcagtgcgtttacagaaatcttcaaggtatttttccttgtggggttccattcctttaagctcatttctgccatggtgaaaaggtccaattgaaagtagttgaggagtgaaagatgattcatttaccttgcggagctttctgggaactctgtagataacgcaatctgaccagtttttaagatcttctggaatctcaattatcacacactcattcttcttctcttcctccattacattcaaaacaatggctgagaaaattttctgggaaaacaaacaacataagagaatgagttactatggtttatggatctgtgtttcatttttctaataataaataaatacaaaggatactaattaagaaaattgctaaaatgatgtttagtattctttcggtatcataattaattaaaaaaaaagtattgcttaggtatcagtagactattatattaaattatatcggatccgatatttaattaaaccaagaggaatattaatacataaaagggtattaagcactattagtgccctttagcatatttctttaaaaaaaaaataatttttaaataatatcactagccaatcataaaatattattcgtacgggatatcattgatatccaataaca

SEQ ID NO: 195493 - DNA, 2237 bp, Cannabis indica
tataaaaaaaaaaaattatgtagcatctgactatattttaagtatgatgaaaaagataaataaatttggtatttggtaacatgtagcatagaggaaaaataactcaatgttactcacgtgacaattgaagataattaaaaattaaagttaaaataaatacaataaaaatgtaaaacttacccagtataaaagttaattgtaccgtgtagcctctccgttaaaactaacaaataaaaaaaaatctctctattaaaccaacaaatgtcgttttatatccatattttatatataaaattggaacgattctcaatggataatatacattgatggttattaaataaatttaatttttatgtttaatttagctatttatttaaacaaaatataaaaaaaaaataatcttcctacactatatcaaaaataattatcatataaaaagtagcaccaacttatataaatgaatgaaaattattaacaaaatttgagtttttatattaattttgcaaaatatctctcattttcatattaaatgggctatgaaatgagttgagattgttcaatcgattgagataaataaggaaagtttagtttgaattaattatttttaatataaatgtatttttgatgtggtataaaaagagatattttttataaaccacataatgattaaaaatttgtttaaataaattttaaaagtacttaattttttttttcaaaattttaattcttatatttctttttaaagcaaaggtgaaaaatgaaaatagtttataagaaaattattaattttttttttttaaaaaaagttgcttaaataattgtcacaatgtttctgaatgtgtgatcaatattgtttataaaattcaataacaataatacactatacatttttaaccaaaaaaaaaacattcttttttttttgatttaagcgtttatatattaaaacattctttaattaacataaataattactctgcaagagggcggaaatgatcaattattttttattttattttctatttttcttttcctttatcgagctgcaaaaatatagcaaatctatttattttaaaaataccttacaagaaaaggaaaaaaaaaaaccttctagaagaatgaatagtaaaaataagtccaagagataattaacatctcaccaatcaatttaaagtggccataaataaataaaaaaataacatttaatctaacatatttacctaatatttttttgaggcaatactgacctaatattttgatcaataaagaatatggaatttcatatgtttatataataaaaattagatgggaagagagatgttgtatggacccttaactttaattattgaaatgttgtataccaatataggatatgtggcacttataagagtatgattacaaaagagcttaaatacgtggaaagtggtagagaaatagactgatcgaatgcatgcatataagtaatgttggccactaaatccgcatggaaaatttgataaaatatccatcgatttcagtttaattttttcccataattaatgccaattaatattgaccaattaggccgatttttatctatttcttatattacctttcccatttttcaacacactcccgcctctctctttctctactttctctccctctcttctgtaaccaaagcactaccacggacacaacccctaacatcaaacatctcaaactttctcaccaacccacgaccatcacaaaatctcatactctctctacaatccacgaccaccatggccacaccatcgcaatattgaaagaaaaattttggcactctctttttcatttcattatatttttgagttaaaatgtatgagtttattgatttaagattaaaatgtatgatgaatctctataatctgtgagtttatgctaaatttaggattgaatttggtcaaatctatgttttgagcaaaaaacaaatttttacgccatgtccgataaaatcatgatgcctttctgttgttgaaagagtaaagattgaagacgtggatcagatgttggtccgatagcggcctaatgctacccttttttatgttattgtacattaaatatgggtgcatcaggctaccattggacctacgccttgacctttactcatttcaacaacagaaaggcatcagaccaccatcagactatatcctacatttataggtagcattggaccaccatcgaaccaccatctgacctacatcttcaacttttactca

SEQ ID NO: 195494 - DNA, 2335 bp, Cannabis indica
atttcttttatatatgattatatgatttttataatcaatcaatcctctctcaaaatcaaaatttgggaaagttacaataaatataataatttacatgttaataattagaatttagatacaacaatatcttatatgggaatcattttatacaaataataggctgaccccattgctttgaaaatgttcttccaatgtcatctcaattatatgagtttgtgttcttttttttcatcttcttttggaaagaaatacggaagggctatcaacatcgctatcttctctagatataattaagggtgtgtatgaatcaatcaaattcaattataactgatcgattcaattataatcgaccactaaatattgaatatctaattataatcggatcagatcatatattacttttaaatatctaattggattagatcgaatattggatgaagtgttcaaaaatccaatacttctaatattcaatcaaattaactattattttaatttagtttagataaataattagatattatattgttatacttaaaatataagagaattaccctatatactatttttttaactttttcttttttaaatttacggttttagtttctaaagtggttgcagcgctagttgcaataggggtttctatacgattttttgttacaatttaggttgcagcgctagttgcaatagggatttctatgtaaaatttcgtaaaaatacaaaaaaaaaattgttttaaagtataaaaatgaaaaagccccaaaaatatatatgtatatataaaaaataaatattaaaattttgcctttttttgttagattggacaaatccaattcaatctaattaatgttaaatctaaaacactggatggatcaaatctgatccataaaatcatatgtctaaaatactagaaaattttgaactaatttaataaatacatataaaaatacattcaatggataaaactgatccaatcaatctgataactgaaattaattagatcggatcggatgatacgtagttcaaccatccagcactgcttaagaatgtttgacaagactttaccaacgagttactccaccaatagtgaaatatgtcattaaaactctactctaacatccaggaaaaacaacatcttaaaatcaaaagtaaaatactagactattaaattatataccttatcaaaaaaaattatataccatatttataatttttgaaataatattttagttttgaattcacgacctcaacctcaaataccaaaaaaaaaaaaaagcattcgataataagtataatagtatgaattctaaagagacgtctcagtcgcggtcgaaccaactgagtgtctggcttggactaaggcatgctagacccactcaatttcaggactaaccttactcaagtattaagaatattattattattaaactaaaattttcgcctaaccttattatatttggggataaaaaatttaacctaaaccttagggacttggagcaaatcacgcggctaactatttgagctatttcttgggtataagttataacaaggctattatagcactactaatattgttttgtagtttataggaagcaagtttgaatatattttgaaagagaaatgctaaaagcactcttaagtggtgtctaacactctctaaagtatcatatcgttatttgtgtaattaaatataaagtttcatataataaaatataataacttttataaaatatcgctaaccaatcacagtgcgccaccattaaagatgtaacttgggtggatgtggctcgccccgccctattaagctttatgaatcagggcgggtcatcctcgacctgcttaaatcggatcattgacccgatcatatatatattttaaagctaaattttttataaagaaaaaatgtttttttatttatatattacatattataattatattaaaactatatgtaattttttagtaaaattactcattttatgcttaaaatatagatatacacaaaaatatgtatctatataaatattatataaacattattaggaagaagatggagaagatgaagaagaagatagatctattttttttaattaatatatgaactaaggtaggtaggtccggaccccaaaaaaataattgagttggggcgggtcgaacctaacttgaaagaaaatgtaacggtgtggggcagggcaagacaaatactcggatagtgacacggatgtgtcggggcagggccttgacttgacccacgaaaaagccccattttgtcatcccttaacatggaactagacgctagtgcctaataggattgcccgttttgaaaagagatgttgtt

SEQ ID NO: 195495 - DNA, 1053 bp, Cannabis indica
actgactgctacccatgatacatcgaggtgttcttggggcaatgttgcaacccatgataaagaagatatatcatcaacactgtctgaccctggtccaatttgggatgctgaaccaaagtgggacagtgaagctacttgggatgtggaaaatccaattgaattgccagggccaccggaagatgtagaagcaggaacaaagaaggaagttagtatttccaggtatgacgataagtgggttgtgaaaaagggccagtttcttggcattttagtgtgcaaccatgcctgcagaacagttcagagttctcaagttgtagcaccaaaagcggaatatgatgacaacactctggatatgatcttagttcacgggagtgggcgttggaggctgataagattttttgttctactacagatgggcaaacacctttcacttccatatgttgaatatgtaaaggtataggagcttttccagaaaggtcttaaaattgtcttgattgatgaggcctaaaagtgtaattaagttcatgaaatagcactgtactgcaaaatattattcttccattgcagttgaagctggctgagagtgacaaagtagttactactttgatcctctggtatggtgttggaagggttatttgacgtattcacttgtccttttttgaagctgtatggtatatgggggataacctaacataagtttctgttactgcaggtaaagtcagtaaagattaaggcatctggaaagacccacaacagttgcggaattgatggtgagctttttccactcaatggacaagttgtatccttgcttcctgaacaatgccggcttattggccgttccttcaaccatcatgtatgacaacctcgaacttcccttttattttgtggttctttattgggtgctggggacagctaatgcttcttttctttccatattatggaatggaagcatcatcatcaccatccatataccaaatatagattaccttctgctttactgtttcctcagccctctgccattacaacctttgaacaactgagatccctgtaaatttt

SEQ ID NO: 195496 - DNA, 1040 bp, Cannabis indica
atagctttgaaaatattatattaatgattttagagaaaatatagtaatttgataatacaaaaatttcttactttctaaagaagtagcaaaaaattataatttcacactaaaattactttaatttataatttagaaattctttgtttatatccatataatgaaaaatataaactaaactatgatttcttatcaaatcacaaatacttggggtatggttcattctggttcataatagtacattaagcaatgaagaacatattgctatgcatagatagtttcacttttgatgtttaaacacaataaaatcctaaaatgagtcctcatttggattctaaaattgcccaaaaaaggctatatagattgtattggctggattagtcagaaacaattagcatgtaaaagagcaaaagattgcccccatagctttctccaaccgagttggcgagggggttcaaactaaacccgaaatcagtattgtgtcctataacgcctgcatcgagatgatgcaagcaaatacataagtattacagtaataatcgaagaactcggtccatctataaacgatggttgtgtgtgttttaccaatctaatagcggggcttcaacagcatcaataatcgcggtaatctgttattgttcgagtttcttttttatttgttcatgaaccgttaactctaaggttgctcattgacttggagaggccgtttttgtttccatacttttggaattcggattcaattgttcttgcaatctcagcatcatcggggtttggctcggggaaccttacgtggaaagacccttctttggttagttgagcagtttccaaagactcggcttgttgtctgacataagtgtagagatcttgatggaacggatgatctaaggtaaaacaattatcggcgattccattatcagaatgccgagatgatcctgatccttcccttctacaaaaatgtgggagggatccataatccattatctgcaagacaaagttctaagtcaaattaaccgaaaaaagaacatgtttttacgccaaatcaa

SEQ ID NO: 195497 - DNA, 1137 bp, Cannabis indica
aagaagaagaagaagaagaaacttcactagtacaagttcaagaaaaagaagaagaatttagttggtcagaagatgaagatgatgaagaagaagaagaagaattgggaaatggaaagcttagcacagaagaactaaacaagaaatttgatgagtttattagaagaatgaaagaagagttaagaattgaagcacaacaacacttgattatggtttaagtttttatatatataaatatgtaaaagtagtgtagtaattaagagtagatatataatcaagtagtcttttctctcatagtgttcatatttattattatgtctttgttatgagctctaggaattttctacttctagccttgtaattttgatgagtaaattataaagttgtgtaattaatgtataatctcttaataattatagtatatatatatattatattcttcttcttattttagacctttttggtatataatcatgatgatgatgatgatgatactttcacttcaaatgatttggattgtgctaaggcatgaaaaacaattggtgtccgtacaattcatgagaacatcaaaatagtaaaactatatagtgagaggttagttgattggaaaatctgatgactctaatatcaagtcaaccaatcaaaaattaagtagtacttaatagttatataaaataaatatataataaaattatgaaatagagagatatagtattatcaatgattgtaattacatggacatataatgaggagtccccatacatgaaaatgatgcttattaaaatgaatctaaatgtggtagatggtacctacaaatgtgtgcgtatgacaaaaattgaattataataacttcatttgtttggtatatggagctaatattgattgatttataataatttaataaagggttggaattattatatatatatattatataatttaatttcaaaacataacaaaagtgcatgtgggtatgccaccccatgagttactgaccctgatgaactcattcactatgaaaatctacctaatttttagatagacataagttaattaattcatggctaaattgttatgtaaataaaaaattaactagattatactttttatattcaataagcttctgtctcttacttttat

SEQ ID NO: 195498 - DNA, 1973 bp, Cannabis indica
taaatttttacaggaacgaagaaacagaaagagccgaacaacgagcatggaaatcgaatcaacaagggaaatatcgggttcatctgaaataccaacaaaatcaggtggggattcaggaagccaagtatctgaaacaactcacagataggattgactgaccaacaacaacaacacatcatctctaccagagtaaaaacaacaaatctttcactagctcattaaactacaatatatacatatataaagctcatttgggtcatgaatcattagctgttgttacagttgttgccttctcaggcatgtgttttggttcattcaagaaaacaagagatagatgctcccaaagttcccccacaagagtccccaaccccaaaaaatttggggtctacagagacatagatagagacaacaaaaaaagaggctcttgttgtacagacttgtctttgggacagtggcttgtctatttcattatcatatatacataattatatatatctttttctttcttttttttttaactgatttttctttggattactgtacttgggattcagaaaaagtattaaattggtttcatttcttttccctgtctcaattcataattattattttttgttcagagcaattgaaacaatgatttcctcatgccttgccttgttcatgatttttcagttcattcccaaatttctttttggtctacggtcaaaccaaaatttactactcattattatacataacttcttttttttttttatcattacaaaattctagtcttgagtattgactctgactttttctgtttacaatatgaactcatttatgtgacaaaacaacacacaatactatatagtagtaggtatttaattattagactcacaacataaataaatttggtaataatgaaaaaaaaaaactaacgtgtgaaaaggggtaacacaatttgaatgtaaaataataataatgtgaaaattcaaaaataatgactttgtaagtttgtattcattatttttggatttggaatagtttggttgggtcagaatgatttcgattccagctgagctgacaaggaaaggaggcatggatgaattgatgaaccgtttgtttattttggcgttttccattattttatttttcacttttgccctacttttttgaccttttttttcttggtccatactcttatttctaacggtcctatttttatttttttaaaaaaattgtattatgcattgcctttacaagtggtggaattggattagctcataggattagattagcagcaattatggttttaaatcctcatttaatctttacttagaagcttcatatttttctctgatttgctttttctttttaaacctaaaaaaaaaaaatgatttttcttaaattatgtttgccttttctaatacattgttctaaacaattcttctgcgttggttgatgttagtgtaatacacgtagcaaaattctttgtatttttttttttagagaaattaaagatatatatatatatatatcataactttattgtttaaattttctggagcagttatatttcatgtgatctgttttgataattcagcttcccgtgatttgacaaagcatgttttgcggttaaacgatgagttatcttagttcgagaaggttcttgtgccaattatggatgtttgcatcataaattcatgaaggtttctaatcactatgtcaacaaaaaaaaatatacatatatattaggaaaaatttatcatgtactcttttaaaatagatgtaccgatgcatcctatttgttttggtatcaaaataattttttagtcaaactttttctcatggtcatgtatgtttgttaaattttaagaaatttggaaaaatttaacacactaaaaacatggttcaaacaatatgttacacacgtagctattttattttatacgggtgtagaatagaatattcgaacactactttctatattttaa

SEQ ID NO: 195499 - DNA, 1654 bp, Cannabis indica
cctatttaaaagggctatatttccctaggaacgagtttggaaaggtggtttcttccaaaaaaaaaaaaaagttccattgtgtaatattttatggaaaaggaattgtttgatgttgggttagtttggtgggtggttaatggtgcggatattgctatctataaataaacaatgttggttgcctaaagttttggtccctatgattacctcgcctcaatctctagagatgaggcaatggttgctagtcttcttgcttcaatgtggggttagggtagagagttggttcaaagtaattttttggtggaggaggtaaactcaattatggcctttatgtggccattgcttcctacccatgacaaattgttgtgaagccatgagaataagagtttttatttggttaaaagtggttattggcttgctatcaaaaaattgagtttgagtggctcttcgtcttctcaaggtccttcaaaatggtagaaaaatttgtagagtcttcatatttctccaaaggtaaaagtttttgcttggaaggcttctttaagttagattcccactatgactaatcttaataagcacagaattgatagttatgacacaatgtcatgcttttggttacgataatgtttaacttgaatttgattgccaaagggcaagttttttaattcttctttgggtcttatgttacaagacattacttctcaatgtagtagttccataatgcttgtttttaataatatttgcataagaatactaatgttgtagctcacaccttagctaattttggtctgttaaatttggttagttctatatggtggtcgggttaccctctttgtattaagaacttaattttggttgatgcctagttttaatgaatattttccttggtcccttcctttgttttgcacaagaaggtggttctaaggtgtttcttctaaaaaaatggtggcttttatgtggagaatgtgtagcaatctatgttcttcaaaaatagtgtgattcaaaaatggtgggtttcataaaaagaatttacttttctacaaaagcctcgaatcttggatctaaagtcccattcggggaggtaatcttggactcaaagcttactccaatggtgtctctgataaaggcaactctagaaatagaatacacaatgaaaaacatgaacttctgaattgagtgctagaaacactgaatcttgaacgacttatctcattagaagatcataaataacgaatgttaggtctctttttgtgttgttttagagtctgttttagtatgtgtttttagtagttttatacattgttcagttatacacttgttttcttcttgtttcaagttttaatgttcaagtacatcatatgagttgaaatgggagaaaacatgctcaataaaagaattttatggatttagcataaattttggagttgtaagatacaatgggtgaaaaattctatgttgtagatgctcaacacactccgtttgtgatcgaaaatcaagtctgaagattaaagccaatttttgattatgattcattcactttcatgaaaaatattgtgaacaaaagttctatatctttcttttagctttctaacacatctaaaatcgtctaattttgagcaatattgagagtgttatgtgttgtagttaagtacgttaaaat

SEQ ID NO: 195500 - DNA, 1595 bp, Cannabis indica
agagaaagagagagagagtagtgggtgagagaaagttgaagactttaatgcttgtggtgctaatatgactatgaagctcaaagctttaatattaatatgaatgatgatcttcttcaccatcatcatcatcatcatcatcatcaaaaatttcagggctgtttgattcacgcgcctcaacaaacaccaccactacctagtattattgtcgtttttgtctataaacgacaatatttattatgtcgtttttttcccatcgtcgttctgagtctctaagcgatagtttttgtgttgtcgttttcgtttttgagtcgataaacgacaatatttgttatgtcgtttttttgcattgtcgtttttgtttcgaaacgacggttttttaattgtcgttttgagttaaacgacagcgttttcttaataataatgtttttcagttttattatgccaaacttttcggtcgttatattaataaatcctgaatatgttctccaacaaaaaaaaataataaattcgattttttttaataaggaaaatatattttctttcacataataataatagatcctttaaaaagaaataattaactaaggatttagtccttatctgaaaaagacaaaacaataaactaaaaataggtgtgtgattggtttaggatttgaaaactattttatgtttttgaaaattaaaatggtgggggtccacctaagaattcttgattggttgagtgttttcaaaaacaaaatttgaatactattttgagttttaggctaaaaaatgaaaacaccatttttatgttttttgtgttttcaaatcattgaatccaaaaacactccaattattctcctacttttttattttgaaattcccaaccaatcacatattcacttttttaaaactcaaaaacattaaatcatattacaactaatcacatatttaaaaacaatttttcacttacaaaatttaaaatttttgtttccaaaacacatttttaaaaaacacaatttttgaatcacaaaccaatcaaaccctaaattaataattaatctcaatgttttgttcatgtccaaaaaaaaaaagataaattaataaatcctgaatatccaccttaaattcgatttttttaaatatattttctttcacatagtaatagatcctttaaaaataaataattaataataataatatgactatagattgtcttataaagacaaaataaataatttaataaattatttatatattattattaattttcctttaaaaaaattaaaagatttaaacaaaggaaaaaacagtgaaaaaagaaaaaggagaaatcggagtcgtaatcggtaacggagaagaacgatagcgaaagttagatctgctctgtaaatttggtgtatgtaatgtaatctttactgtaagtcaaattcgaacccattttcaattctagaacaaccctttctttctcttcttcaagacgccatttttatttaacttacccaacaaacgaacgatttgctggtgagttagtgagtgaattaatctctctttaattacaagttactcttttaacgaaccttaacatctatgttttatcttctgagtattttaat

SEQ ID NO: 195501 - DNA, 3643 bp, Cannabis indica
atcaaatgtacgtatcgttttatgtactacgtatttacgaaatccccatatatattaaataatatatatgtttgtgtattgggttttttaattgtgttactaatttgatgtttgatttgcttgtaaataaaacgtgtcattcatgaaatctagagtatcttgttatgactagacaagaataagggtaattacaaactaattaataaattaaattgtatatattaaagtccaagagacatgattggattatgttgaaaaatcattcatgcaatttcatctcaaaactaattagtgatggctccctcaaaatagtggctattttttgttgctcgtcaatcttcaatcgtatcagagtggacatggtcattgtctgtataggtgatcacgtttaatattcaaccacaccaacaaattcaggtaagattccgaccaaatagcattatcaagccaaaacttaattaatatattaaactttattgtataattaaaattaataatgtagtttctacataaaattatctgtaactgatttttttttttccgtaaaattagatccacattattatatgtaaaaaaaaacatatgtatctagcattttatttagagtttaaaagaataccttttttaatgaaaaacgcatacttgatacaactagtaaagaggcaaatgactagttaattttcattgaaaataggctatttatgatatgttaatttgtaatagtaaatcataagtaaagtaattatattgttataagcaatttcaagattaaaaatttagaaataaaaaacagtaaattctttaaaaattaataatataggacaccaacaaatgagttggagtcaacttggcattttatgtttgttttacatatttaatattacttatacatcaaattataataaatgagactgagtttaaaatttttatcatacataaaatatttcttcacttattagaattcgatcacttagcctggctaggccggctaatgacttaagttagagatgtatactttggtcatttaggttatataaatgtgcactgtgtgaagaacataattatagtatatatatatatatatatgtatactaattacattccattatattatatatcataggtcacatctagtgctatatatgggaattatttttccttaattatatacactctgatctgattaagaaagtcacccaaagagaactttatggggaaaaaatattaattattaaatagcctagaagaagagaagaccaaaataaaataatagcattaattatctaaaaaaaataaatcagatattacctccctttgtttgttgaggttattttattggcatgtatagctagttataggacttgtgattgcattaatttatggattaattggatgcacaattagaaaaattatattgcgtatacatatatatatatagtaggaatctttatattaagatatatataggattatttcttagtgtcatcattctgtgcatatttcataccatgaatctatgatgtaatttcttctttatatatatatatatatatatatttttttatataaggtaagcttatcatgttcacacactgtagtgatttttatttttgttttctgatttttattaatagtaattaagtaggcaccaaaacacattaaatgtgaatgaattattcttgtatataaaagaaatagaagaataaaagaaaaatactaatcatacggattcataactatatatagttatgttataatttacaaactgtttatagggagaaatgttcttattttattaatgtgtggaagataattacatgaattattttattaattttaagatatactccatgcaccttattgtacagtatacacaccacattcatcttaaactaacatggtattagaattggtgtctctgcctttgaccttcatttgggattttttaaaaagaaattataaattttctgacatgtatagtactcctcaatgcgccttgtgaaattctttcaacatatcatttttgcctcgtcgtaatttcttaaaggtcgttcattaattattatattcgcatttttagatccaaactttaaaaatagtatcacattattaaaaaaaaatcatatacatataaaatgcaaaaactactactcactttcattaattttaatatagaaactcattccccttactatacactcactttcatctaaatattttcaaaattttaatttcataaagtatattccttttactttaacatatttggtctcacaaaacaaaattttaaaaatatatgagagaattttatccaaaacaattatttactataaaagcatttaaattgattagtgtaactgaaaaaatgtcctccaagtatgcattattagattttcaaaaaaaaaaaaagtatgcattattaggtaatatcaatttaatttatgattttttgtttttttgttttttatcctatcaccaaatcaccatcctaaatttggaaagtgttgctcatttttacggctaaagttaggagtgagtgggaaatgaaaccaccatatataacatatcttactatcttgatgcctttttttcaagaaaatgacacaaaaataaaaataaaaataaaaaatagcatgttgttatgtgtatattttatgacatgtcacacattccaattaaatattgagttctatataatttaatataataacttttaaaagtatcaatcgtaagaggatacatataaaaggtactagacattactagtgcccaataacaatactcatatttgattggagattaaagtattttttttctattttatttgtgctttgtgatatgataccaagcattactatagtgactttataatgttaattggatgtgagtaattgtgtgtgtactatgtggtgaggaataggatgaaacttgccccttcaacaagtaatataattaaggtggaatagaaagaaaataatttttattttatttatttgtttggttacattttaaagtattagaatatcattctaataaaatggtacttttaccattttaatagaatgactattctattttgaaataaaataaaagactattttaatgcaaaatttgaataaatttaataatttttttatatttttttaaatttatttcatttcattcttattctaatttttattgttattcttattaaaatattttcatttacactaagtgtgacctaagagttagtcaagttaattaatgttttcacactctatgcatgaaaaaggacaagtctacatatgtgatgtatccttaggcttaggtatggacattgaatattggtgatgtgatgtgaatacttttacattagaatataacacaggaaagttgggtggcttgtctacataataaagtataaagtcaaaaaatgtcattgtatggaaataaaaagtgattattaaatttaaggatgatgctgtgtagttgaaaagtagtgtgataacacaaagccaaacagaatcaaaagtagtgagtagtgagattctgttatggacagagagagagagagtcttttaccactactactactactactactactttttgtgttatctttaattattattttagtgcttctccaaactcctaattctcc

SEQ ID NO: 195502 - DNA, 1235 bp, Cannabis indica
ttttttttttattttttcttcaataactgaattttttaaacaaggatctataaccagaggataaaattttgcagggtgttcgaaattaatgaattcccatttaaacctatcaaaggagttgtaagggttcttcaaagtatgcatctttaaaacttttttggtctaattgtatcaattatggaagggatataagaataactttttgttctttgagcgttaagtgttgttgttgttgttttcaggttttgagcaaatgaatctccattaaagctctattgcttcaaacatcatgtcatctaatttctcgccctcatttagctgaatggtcaagttcttttctttggagttttactgattttgagtctctctagggctgattttggtgcagatgtagacacttgcagcgttgtagacttgattatggaagattatgttggacggtttgattacgagagtgagagtaagcttgtgagctttgatcccctatcacactccgatccccacccccaaccacgtcccgaccgttcagcattctcaaccaaccctaacctgatcccagccaccccaaccccgatgttatcaatcggccaccaaaaacccactaattttaaataattttttaaaaaataaaataaaaaagtaaaaatggaaaaaccctaatttttaccagctttggcactctctctatgccttctcctgtgcagcaccgacttaacatttctagcgtttggtggtcaaagatgaccaaaaatttggacaaacaaggaaaaaaaaagaaaatataaaataattttatgattttaaataattctagtttttatttatttcaattttcttaattaaaattataatttggactagtaaaaaaatttacatgtagcattttattagtatttatcaattcaattagaaaaaaagactaatccacttatgaaaaataaaatttgaaaactattactactaatttttaagattgagaacatataactacttgaaactagttcaaatgaccataggagagtacgtgtgtgttggaggtcctagttcgagtcccaaattatttacattaaatatttgtaatttttcttaaaataaaactcgcaaatggtatactaaaccaatgaagagaagcttctcatattttataagtcaccactcaaagtaagtagcattcattcacaattagaaattcatacacaatactaagttatttatttttttcctttgaagttatt

SEQ ID NO: 195503 - DNA, 1512 bp, Cannabis indica
agttattggtgcaaattattttctttttcttattttcttttttattttttgtaaaggtttaaagttttttttttttttttccaaataaattgaaaaccaataccattgagggctccatactacacaaaaatatttttagaaaaatgtataaaatgattacatcgatcaattcctattatccaataaagatatttatataatatatttaccgaaagaaagaaatattatataatttctttttcttttttctaacattcattatgtataaaaatttctatcttctaaaatctcccaaaaaatatagtagttaaaaaaaattattaatcaaataacttcaatcataataatagataaaacatcagaagcaataaaatttgaatagaaacaagagtcatattattttcagaacgaaaactaacttaatagattttaagaaatctaaaaaatccttacattcctaacttacactaatcaatttattatacacgacttaaataaccactaatcaatttattatctcaatcaattaaaatatagtaattagttacctcgagatgtaaatataagaatatttttttaatgagtagtcaattgagatacaaacttgaataacaataactagcattaaatttttgtcatttttagaaaggcaaaaaaaaaaagttataattaatcactaatgtgaactctttattagaaaaataaaataaataaacagaccaataattaagaaaagagactaatgaaaatttgaatatgtttaatcaataattgatactttattcactaccacccataatgcagcatcactttacaaatatatatatatataaatattttaataataattatctctaaatcatattaaaatattaattaaaatttccaccaataagagaaagtgaaacacaatatattattatagatatataattttttttatttatttttaatcttgttgtgtctagtggatggttggataaatcaatattactactaattaattactctaaagtccaataaattcaccagaaattatgcttaaaagtgcaaaacatgatattgatcataattaattaatgcccagattaagacagagtggtttttattggttaaagcctttaaatagtttcagacaaatttgactaattaagatgaagataacgatgtgaaacattaaaaataaataattattaattattttttatttttatatataagataattaatcaacattattaatcattaatttatatcctatgaaaaacttttccaagcttccatcatacaagtgattatgattcttcatattataataaatatacaattaattgatagacttatataaattaattaataaataaatatatttttcttcctctttatttttggtcctttcattcttacttgggctcaatcaaacctacaaaactaaagaatagatataaatttgtgtggactacgaaattggactaataattaaatattctatttttggggggtttttaagca

SEQ ID NO: 195504 - DNA, 1449 bp, Cannabis indica
acgaacttaatgaatggagcttaaacataaatttccaaaaatttacctgttattattttttattttattttacaatgttacttatttatatgctggcgacgtgttatttttagtttgttttagaaaattgggacataattgtaaggaaagggtgaattgggtgttaaatgtgaagacaattaaaattggaaactcaaagtgacatatcgggaaaaggttgggccccgtaggttaaacccagattaaaactagagagtagagagacgagatagaggcgaaatttagtttggcagttagggttttacagagagccataatgggaggaagaggacggaaaaggagggagaaaaactacttagcggcacatggaggtaattacagtcggctaccaccgccacccaatccttcccaactcgacgctttgccctctaagcttcgtacactcatctccttgacttctcctcaacccgaaggtttttcttttcatgatattatcattatttatttatgcagtttcccctctttcgattgtaaaatatatatttttatatgtatgcaattttagaattactatgttaaccagtttgctacggtttttccagggtctaccagggattcaaagagtgcccataagaagaggaagaacggagacgaggcttctgagtcagtaagcatttctttatatattacataattaagaagaaaaaacacactcatttgcatccttaggagaaaatttgtgtgtacatatttttttcttctttgaaataggtgatttttgttggactgacacattgttcattttttaagttggaagatttgggcgcagtctgacgatgctatgttttgcaatagtttgatttttaagatttcatttaatgttttttagtgtgcaatgtgtacacttgatttgattccttattcaaatttaaatttaatgtgaaggaaactcactattgtgctcttcatacttttacattttaaagttattatagactcttagtgtgaaatacacatttgtgttataataattataatgctgtcaatgctgaaattttttatcaacgttttgtgtcaagactcaagagtaatggatttggcatgcattttggctacctttgcttctaatttccttgttgagaaatgctaaatgcaccctcttttgcaccctcttatctcaatacagcagcatttcactataacctgtaatcattttgaagtatgtctatatatcacacattgagttaggaaaagtgacaataaagagtgtaaaatagagtttctctcaatcttaccaagctaccattactaactgcatgcaaattgatttattggttgcatatatgtatgttgtagaacaccggtaacaagatgatgtagtttgaaactactggattcaaagatagtgaattcgagcagtgatcacgatgacactgtcatgagtagtgc

SEQ ID NO: 195505 - DNA, 2589 bp, Cannabis indica
tttgatggtcgatttcggtttattggtttttataaacacccctacttgcggtgcagtttggaaaattacaactcgcactactcgcaccgcaaacacccctaattgaaagtttattaaaagacttggccaaagaagatagcaagtagttttttctaattaaattttcactttgcttaagaccaacttaatagtctattaaatgtaattatgaaagtaataatttagttgtgaaagcgttattattacgcacgtgtagtgtccaatactatcgagtttacaaatgattaataatattttaaatatttatttaattaacatatatgacctaatactcaggagcaaggctctaacaccctaacgtctagggaccttatatgtgtgcttttggaacagagccttgtaatagtagattaactatttaatcaaatccgtgataatagtaaatacttcaccaaaacaaattcatagcaataaataggatgacatcgctaaaaatttgtttcagcaatcccctcttacaaaagttttacaaaagccctatatacataagtaagtcaatacacatcaggtgcagcccaaaacatctcttggcaactcgactacacaaaccaaataagtcgatatgtatattattgtagaagactgtcatctcatggttgccctagtttccctttgcccttacttacaccacaaaacacctgtgaatcacaaagactcagcaaaaaaaaaagtaaagaataaatacatgtcaatgagataactaaatcagaataataatataattaaacagtaatacacaaatacttgtcttaaaagacaagctataactgttacttcacaaagtaactatttctattgttgcctaataaaacaatcctgatgccctaagttggcatctactcatctcttgttgcccaataaggcaatgttaatgccctatcttagcatccatatacctttgtcattgtctaataagacaatcgccaggtaagaaacttaataactgtttcaattgacgtcatgactttactttgcttaatggtaatctctatttctttatctgatcataatcgagtcataacgattataatcatatcttgacatgctatgtggtacgaatgtccttttttacctcaagttccaattcaagaatgtcggccggcccaaaatagtgacaaatcaacgattccgaaccctatatcacaataacaaaaaagaacaatcaaacacttgacctaacctattccaggtctttaattcatcaccataagttcccctattgatcactagggtaccaataccctaaacattgtgaaaacataaaaaaatggggttcctagcatcaccaaaaaggtaagttatttagaaaattacaagttgttttaagggtttcttgctaaaaacgatctctcagttttccaaaaatggtctaccatttttccaaaaacggtctaccattttctataggaaataaaaaccccgagtttcaacatctccaaactccaccaatacctaattaaataatttcaaacatcacaaaacagttatacaatatcattataacaatctattgatagaaattaaaatcatacccaaacatgaaagatgccataagagctcaagctttgagttcagaaactcaaacttggctctcacctcactacagttgtacacttatcaaaagaacatcaaaaacacttccattccatcctagaaacaaaaccaaaaccctacttatatcacaacagctacagaacaaaagtcaactccccaaagcctaaaggttttcatgaaacttaagtgaaaaaaactaaaacccttaccttatgcttcctcttcaagctaggctcacctactagctgctactagggcttgaggagctggaatggacaaaaaaaaaaagacaaaaaaaaggtttgttgctttgatttttctttggtcaatagaggggaaaaagacaaggtgttgctttgttttgtttttttttaacttatcaacttatatatacatattagctacaaaaaaaaaaaaaaagaattaaaagaaaaagagaaaaaaataataataaaaataaaaataattaatttaattaaaaaaatattaattttttccattcttaactattaagaaatctctaaccctagggaattcggtcaacatgaataccaccaaaatacctggtaattctaaaactaccttagctgaacaatctcactaatatgactaactaaaagtgttgtgatatattaggcctccgatctggtctctaaggaagccaaaaaaaaaatattattccacaaataacatacatcatacccacatagtccaataaaatctctgtaattaataaattacgcttatttatccacttatggcaaaatttcttaattcacgctgaattagattagtaggatcataatcctactcatcataccctaattaacttttgattataataagtccttattattcataattaggtttttgggatattacaactatcatctccttatcgaaattctgtcctcaaaatttacctgaacaactcaaaacactgctctgcatctgccactctaactccctaagttg

SEQ ID NO: 195506 - DNA, 1343 bp, Cannabis indica
ttcacgtgggagaaaggaagaggaactactgcttggatagagtgtcgattggatcgtgctttagtcaactccctttggttccaggtttttaattctgcttctctttttaatcttgaaatttcttcatttgaccattgtccattgtggctggaaactgagtttaagcaagttcatattcccaacaaaaaattcaaatttgaaaatgcttggctaaaagagactatgtgttatgaaatagttaaagattgttggcatatgggggctgctggtctcatttcagaaaaattgaagttgtgtgctgaaagtttgggcgaatggggtaaagaagtaacgggcaacttcaagattagaatccgaaattgcaagaatgaattaaaagagttgaagaagtaccgtgaccctatttctatgcagagatatagtgaggtgaaaaagaaattatttttggttttggatcaaagagaagccttttggaagcaatgtgctaaacagatgtggttaaaggagggggatcaaaatagtagctactttcacaaaatggcgtcaaccagaaaacaccataatcaaattcaaaggttgaagaatgacagaggtgattgggtcgattggggtagtgggcatcctttagttgttacaaactattttaataatttgttccaagcttcgggtagcagttgtcaggaagttgtagatagtgtggattctagtgtttctgcccttgttaattcagagcttcaccaacttgtatctgaagaggaggttaagaaggcggtgtttcaaatgcatcccgacaaaagtcctggaccaaatggtatgacatcaggcttttatcaaaagtgttggtccataattgggagagatgttatcgaaactgttaggaacttctttcttacgggagaatttgagcaagattgtggaagtgctaacatagttctcattcctaaaactcggaacccttcagatatgacgcaactaagacctatagctttatgtaatgttttgtacaaaatcatcactaaagttatggtgaatcgcatgaagcctttcatggatagtattatcactgagaaccaaagtgctttcatcccgggacgcttaatttcagacaacatccttgcttcctttgaagtgcttcattacctaaaaaggaagagaaaagggaaagatgggtttatggcacttaagttggacatgagcaaggcgtacgatagaattgaatggcattttttggcggcgatgcttcagaagttgggttttgaagaatggtgggtcagattgctagtgaagtgtgtttcctcggctcgatatatggtgactcatggtagtcatgagttgggacctat

SEQ ID NO: 195507 - DNA, 3214 bp, Cannabis indica
atatcatatttaaattatgcaaaataaattataaagaaatgtaaaatattaggtaaaagtgtttggtaaaacagaataaaaaaattagtaagataataaaaaaaaaaatagaatagaatattgagatgtcctgacatcttttcattttatttggcacaaaactcttacacaaactattgttagaaaaaaaaaagggaattatttacaaattaacaaaaacaacaaaaaattataaatttacagttagaattttaaatatttttacgatttttatgattttattcacataaatatggtgtttaatgtatttttatgttacacttttgtgaatttgttgttgattttatattatttatatgttattattttttgttattttgatgttgtttgaatgttatttttatgtaattctattattgtttttgtgttccttttatatagcatcgtaaaaatatataaaaaaaaaaatcataattattttagatattttatgtaattattctaaggaaaaaacaacaatatgttttctcaaaagattgagtttgttcatttggtaaaattaaaatgtatgcaaatttgtaaaatgaaattttaatttttttaagggtaaataccatttttagaacttttataaaagttaccaattagaccatctgttttgttaaatgacaaaatagaccttatagttttcaaaatagtaaaaataggaccatgagtttaattttcaaaaaatttatatttttaatataaccaactttaagacaatttctaatacgaatagatacagaaaatgtaattagttttgtcataacatctctatattagattattattaagtttaatttttacaaaaaaatcagttcagtatcctatttgtacaattttaaaaaatataaaatctattttaccatttaacaaaataaatctatttttacaaaatacaaattccaaaaatagcatttactcttttttttgtatggaaatttaattaagatgtgtaatccgattcctcctagttgaaagatgcaattgcaatctatatttacaattaccaaaatagcctaaatgaatgcatttaaatgaggttggtagagagtataatcgtgatttaagtcgataaaaaagttatatggtctatccactccgaatcatatccacgtcagcaagacagaaaatcaagagtgactcgaatgagaaagtgtaggaaaaaacaggaagctaccaaacgcaagaaaatcaaacccaactccacataacgacgttttaattgcattcctccattgctcccaaaccaaacccacatttcattcttctaccttttcttccctatcgattatctcctatctctcacaccctaatgctctttctcatgcatcaaaaacaaggttacgacttttttttattaattttttttttacatttgtgcatttgtgttgggttcaagttgaatctatctgttgttccctttctgagttttgtattttattattatttttttaatatttttctatgatgtttgatttaaaatggcaattgggtttgcctttgtggtgaaaatgcattgggtttttttttttttttgctctgttacgttttggtgaatctagggtgtgtttgtttctatagttgatctcggtgtgaaagttaaagatcaattagcgagttatttttgtggtaattgaaagaagaacaaatttctgggtcttaggactaagagatgggttcttgagcttaccttatttttttttataatcttttggctagtaacgactgatttttttgggtcaaagttggaatggtggttggtggctaaaagtaagatctttggttcggtctgtggagtgaaatgagatctcaaggttactgaatttggataatctaatttgtcgatttggattgatttttagctaacgtgtgggaaattgaaattgaatttggctctttggcatcagaattctactgggtttttcaagtgcaggattataattttaattcttactatgttgcaaaactatatattatcatgctatggtttgaagaattatattcttggcaaaccattgtggagaagaaaaagaaaagaatgggataggatgtttatattttattgggaatatgcattggcacttctggtaggttctcaatgaacttaatcttagaattatatgtgggagactatgaaactataatatgtagatgaactaacatcttgggaatatgcaggggcaaaagggggaattttctttccttcttttggtagagtgtaattatttttttgtcaatctcacaaggaagtcagtgactcagtggcatgcttatttagcagagaatttaaagttaaatggatgtttaaacggaaatcttatcctaatttgaagttaacagtttgcctaaagacattatttcattgaaacttatatgattatgctgggttaagtctcttgcttaagcaaaactagttgttgaatttatttgtgaagtggagtattaactgaggtgaagttagtaaagaagtggttctggtgaacaacttaatagctaagaaaattgcttatttatttattaaatattattttgagataaaggtgttatggtggaatcaccactcatgctttttgctttcttcgtgtaagtagtggaatcatctttttttttttatgaatttccttataaagcaagtttcttaaaagtagtgtttgctaatgctcttagaagcactagtgcaacacttgccattgaatctgcaatccaaggaaactctttaatattctagtttctagaactcttgctttgttaaatgcatttgatgatctagaatggatatatagtatgttatacattatgctctcctaatttggagattgtataaagtatcagtatttatgtggtatacacaagcatagtttgcagatcgtatactctgtagatagtttgtgtactttccaaaatcaaagtcaacatcctccttgctagttctggtgtcttttatcaggctattaccagtcaggctattttttgtgacaatgttttgtggttttatcttattcaggtgctcttatctggtgtagtaattttagaagttgctatttggaaggatttacttgttaacttcttgtgacgctgtagaaggcaatgaatggtaattcattatggaaataatggaggtgaatgctggaaactccccttccaatggaaaacaagcctcggaacaccc

SEQ ID NO: 195508 - DNA, 2678 bp, Cannabis indica
aaaatttagggactaatttgccaagaaaataaagtttgaggattaatttaccaaaatttatatagtttagggactaatttaataaaaataaaatttatgaaccaacttactaaaatatgtataaatttaagaatttgccgtacaaataaaccaaagtttaaaatggatattattctgtacgttgtgtatgatataaacacttgtaaaaaaacgtattagcaagttaatttacatgtaggtcaacattttcatatttgaactctctgatttcaagatatttgtataaattcttacaaattattatattcccggttgattttctttttcctcaatataattattaattattgtatttttgtccaaaaaatttcttagcggccactaataattaaattacaatcagatattatagtgattcgttttttttttttttttttttcaattagatataaaagaatatagaaagagttgaataaaattaaagtgtaagaaaaaaaataaaaaataaaattaaagtgtaaggtaatcattaatgcctttaaaaaaaataataccaaaaaacaaataagaggtatttgctgtattaaaacttaaaagggtattctatgtgcactctcataaaatgataactatactacattattaaaaaaatattaaatatttttaaaaaaaaaaaataaaaaaaaatttagtataattaaaggatataaattttatataaaataaaaattattaaaataaaatttaaaaagagaaaatctatatgtaccagaaaattatgataactacaccccaatatataaccaaaaattaagcttaatatatttttaaaaaattactcttactaatttttttctcatattattttttgttgatttcaatacttactttaattttattttcatatatttttttaaaaattatgtataatatttatttaataaaatttcacattaatttttattttaatttttttataaaatttaaaatataatttatttttatttgataaatatattttttaagaatattttttaaaaaattaatataattaaaagtatatgttttatataaaataaaaattattaaaatatgaagaaattttttaatttgtggatacaaataaaatttgtaaaagagaatgaagaataaagcagttgagataaattgatgttgtcacaactcacaaatataaactattatagcaccaccccacttttttacatctttctaatttagaaattgggggctgtggaactggtttggctggctataaagaaacactatataatttggatgtgtgctcttgtcgacttgattgagaatatatataattataattttaatatatattgctgttgatgttgattatgatttctcctttgtctttatctatttgtttatttttggtctcattcttccatagttagtaatccacgtcactaagaagatatatatatatataatatatatagatagatatatgaattattttatggaagtttgtagaagaagagtgtttggttgtatcattcatgatgatgatgatgatatatggtggtgagttggcttgggttttggtacctacgtaactaataaattatgactttcttaattaatgttcgatccaaaagagccgtaatacacatgatcgttcagatatataatacatatacaattacatatcaattacttaattatattatattttttataaggatcaatcaatatacatatatatctctattttatagtcttgtatatattattccatccatctacactaaatttggatctcatcagaaaataattaataacaataattagaatcttgaattaaaataaacagttcaatattaaaattaattgatgctaaaaaaataaactcatacatttagaataatagtaaattagtaataataacatctaatgttatcctcgaaaaatcaggagtattgattttgatactttttgtcataagatggcttctttatggaaaccaggaagagtattaatctttatgctttttaattttaccataagattgatattgagagaattatagatgggagtcgtgacgtgagcgtttatatttagaataatagcaattaataacatcttatgaaatattttggattgtttgtaaatcttagtttcaaaatacttcaatttattaagttatttatgagattttggacccttttgatgatgattattgggttagaacatcttcaatgtaaaatttaaatttggtacaaaatataaataaatattatatttgctaatatttgttagtgtccaattcacaatatataacattttaatatacaaattagtacatgataaatgagatatatactttcattatggtagtttagaataaatttttgatttttttttacgtcagtttggttcaattttatgcgtatttctttgttttcacgaaacgtgtgctaaaaatataaaaatttgagaaacgagctaaaatggtaaaaaaaaaaggggactaattaaattgaagttattatgctttccatgagtggattcaaagatgcaccgagtaagctgtgcaatctcacatcgtctgaagaaggtcaagtgttatgattataaagcttatctctcgttcttacaccacataagttaatttactcgtgattgttcaaaagttttcctct

SEQ ID NO: 195509 - DNA, 807 bp, Cannabis indica
agtattttggctgaaaaccctaactcttgtactctaaatttcttttggagaagaaaacctagagcaatattgactgagttttagcttgccccccttgaatgagaataaatgggtatttataggctaaatggtgggtatggacagacccatgacccacctaagattcctgcttaaatctcactgtttgggtaaattacatgcaatgttagagttgattggatggtcccgtgggtagcattatgcccgtgcgtgcaacaactggataatgaagaccattttgtaccacttgaacacttgccatgcaaagatttaactattaaaagtaggagacacgtgttgctcaaagatcattcctttacaagtagaagtcttaaatgtccgtctggtaaaaagatcattccagaaccgaatctagacctagactcgagaccagacccagacttgggatccggacccatacttgggactcagacccagcccatagtctgtatttggacagagtttattaaaaaaatattataaatttatacaatttattaatacaaatcaacactgtaatattttatttaataataccaatacaatataatatttttgttttgtgttggaagttaattaggtgggaatgaggagtgaagctagctaggctccacaggctggtttttggagtttttctattggttgagggtgtgacgtgacatccatgtgaggtgtccacgtcagcgtgattttctgcaggttttagtgtggtcattgtttgtcattaaggcaactccaggcatcagtccaaatcaaaatatatatata

SEQ ID NO: 195510 - DNA, 1730 bp, Cannabis indica
aaaatatatttttttaaatgattaaaaataaaatcctaattcctttcaaaataaataaataaataaaatcctaataaatctaaaattacaacaactatatatatttagtaatatcaaaatcttaatatatataattatataccacagttgaaagtgaaaaaacaaaactggcatcgatattaagcttctttttcttatttggaaaaaatttatccatagcttagtttttaatttatttttacagtttataatatatatataaaagccatattttgatttctttttttaataaaagctagatttgggtgacataggaacttaacaagctccaaagtttttggagatcaatttatttgagtaacactaacgttgaagatggatcaacgagcacatgattattacaccgcgacatatgccatgacatatcagcaacaacaacaacaacaacggtttcaataccctcctcagcagcaacatttaccacttctcattcccccgcacccaccaatacaacaacaacaacaacaacaacaacaacaacaacaacggtttcaataccctcctcagcagcaacatttaccacttctcattcccccgcagccaatacaacaacaacaacaacaacaacaacggtttcaataccctcctcagcagcaacatttaccacttctcattcccccgcacccgccaatacaacaattcccttaccaagttcatccccacacaccatcacaacatccccacataggtcttccacttgttgctccgcctcatccaccatcaaaccccgagcttcacaagcgaattgataaattggttgagtatgtcgcaaaaaatgggcctacatttgaagacatgatacgagaaaagcaacaatttaatcctgattatgcgtttttgtttggtggcgatggccacggctactatcgttataagctttggctatggacaagaggaacagctttggcgactaattcttttgttggaccattaagttgccaaaacatgccatcatcggttgcatctaagcaatttcttccaaattcggtccatttattaccatgtcaaactattaatgacggtaaaaaagtgccaccatatccttcattcccacctggtctaattccgggaatggtcaaaaagacacaaattggtagtggagtgccctactcttccatgagtccttcggacatcccaactgtcatacctccatcatgtataatacaagaagaactttttgaaagagtgtcgaaattctttaacgatattagacaagttaacacttctcaagaaccccttaaatttgatgctcgagatttcgatgatgataatgagagagattataaaagagaaacttcttcacgtaaagaaggggtttgcattcccctaccaccaaacattagcggtttagggtaaaatttgaaataagcttttttttcagtttttttttttataaactaataatttgatattgaaagaaaaacaatgtgtttctctttctcaatatcatcaccatcaagattagtagtagaacaagggatatagtcatgtttttgataaactaataattgtcacatgtatttgagatagaacattgctattagttatcatatagtgtctaacactatattgatgtagcacgttgcgattgattatagcagttttttatattttttattaaattaaattgtgtgggatccaatattaatttatactaataaactaataat

SEQ ID NO: 195511 - DNA, 1045 bp, Cannabis indica
ataataaattaaaagatgtaaatttgccataagatcatccaatgtcgttttcatttagcatatagttagctatatcacttagcctacaagcaaaaattaactttaagcaaactctctctctaacatgatgatgaaacagaagaaaattccaaaattccaaaatggtagagcatcgacaaagggagagattgaagataagaaatgtagtactgtgaatgataaggtgcaactcatcactttgttattggaggggacaacaaaacaacaatataagttcccttttcttttcttaattcttttcctcattcttattccaaaccccaatatatttactatcattattattattattattataaagaatcattcattcacatcatgtataatgtaagtgggaacattgtttttttgggtatatataagtaattgtaaattaatgggaatttttttcaggatcgacttcatgagggtgatgttcacggcttgaaaaaagtcatcagataaataattaatcatatataatattcatcaactatatatttatttatttatttattttattctattggtgatctcatacaatctatatgtatcttgttccactcaattacataatcctcatctcaatcttattatatatagcatgcgcataaagggagtgtcaaaatgagtgataactcaaataatatatacatagcaatcaccaagaggaagaaaaagttgtaacaaatatattagttttattatacataaacacatgcatgcaatcaacttgttttgtagtttatatatggcatatgcaatgttttttgtttcctataatatagattttttttatattatgaaattaatcagctcgtagttgttgagttttgagtcaccatgcatgattcaaaagaaataataaaattttacaaaagttgatcgaataaacccatgaaataatgattcaaatatatatacttttctacaaaggtctcttcataacaatgtaaataattttaaatgcttaaaaaaaactgcataaactttcaaaaaattcaca

SEQ ID NO: 195512 - DNA, 1209 bp, Cannabis indica
atttgcaaagtattaccttatagtggtgtttagcactctatttattctataactttacttattgacttctcaacaagctcttatgaaaaatctatgtaactattgatctatgtctaaacttagatctctttatgtaagacatagattgttacattgggttttatagtggatgttgttcgaatccatatttaagtatacaattgcataaaatacaatattatattgttaaattcatacactaagaaactatgtatattttgctccttttttaatttgttgcattattaatagtatctccttacaaatattataatttcttcttttcgtttatttcctccactcacatttaatatctaatacacatatttcattattagttattaaaatgtcttcatttttgtcaagacaattatattgactatattataccaaaatcacttcatacatagtatataataatactacttaatgaagtacacacaatctatagatacatatgatcaatattatatatatatatatatattacaaaattaagatatatatatatatatatttcattttgttctagctaataatgcaagaagaaaatctctgtaatcaccagaagggatggtctcagaaatggcttctctaagctcaatcccatacttgtttttgtaacatctttgaatttcatcaaaatctgaagactcagccctactcaccataactccttctatgttccccttaatacttccatgcaatacctacaaatattaataaataaataaataaatgataaaaaactaattatgaatcaaaggtataataataaagaaagaatttttcacctttgcataatagttaggtggattacaaatgcattttgctaccatttttagtgctccttcaaattctcctgatttttccctcttaagtgactgaaaaaaaaaaaaaaaaaaaaaaaaaaaaaccacacacactaaattttgattcatatagattttcaatttcagttaattattttatttatgtaaggaatatatatttatttattgaatagaaaaaaaataattgattagaaagagtaagggtgagactactaaatttttgtatctccattatagagaaaatgagaaaaaaaaattacattaacaattacgaagaaattaagagcatgtttgacattattttatattttttattttaaaaaagtatttttagaaa

SEQ ID NO: 195513 - DNA, 974 bp, Cannabis indica
actaatcatataaatatatgtatatttacatgggcagatttggatctggaaaaaaaatatatattttagttatatatatatttaattaaactttaaactatagttttcatttttcaatttatttatacaagtagctgtgtagcaattagtaagaagaatagtttaattgaaaaggaaaaaaaaatacatatttattcattgaaataacttctcatcagcctacaccactaggtcatcataatctcgtcagcacatacttcacaaaattgaaggctctaccagatgaaatcacaaaattccaacctcacattccctgcacttgtgagtaccaaacaaaaattttgatttctacaatcaataatagattttgcaatttcttacatgacttaatgaattttacaattctattcaagcacatactcttataattaattaattattttccattactatcccaaaagtattttctatgatcttccacaaagaatgtcaaaggaaacttggttttccagtgttctaattctttcatactatcgtagcactaaacatgtcattttatttatcttaaagtttaaactaaaattattataattaatattttgtagatttaatgttatattatttatttttaatttaatatttatattattttataggaataaaatacattttatagaaaataaaaagaaacataaattggaaatgccgaattagaaatgacactttaagaaaatacgcccaattcacactagcctaacccaccggcaccccattggtataggaggtgagaaaaagaaaaggaaagggtgtaagtcaattatgtcgtaaataatgttataaaatatttgatagggtaagctagttaccttattaagttctaatcttctccagacactttaaatatttaataaaaaaaaaaatctaaaaaaagtacagatttgtaattgatcccttatcttgaaaaccttttcccc

SEQ ID NO: 195514 - DNA, 1801 bp, Cannabis indica
ccttatattgagctttatccctttagaaatgatatattaatttaacacacctactagtactagattagatatatataattatagcttcaaaatgtaacaacatttaaattgatttgtgtgacatgttgagcttaattcatgtaaataataatattggttcataaatcatacttcaatttcaaaaatctttggtttatatatataataaattaagatgagcatttagtcaatgttgacactacattttaactaaattagctatcattgttacttgagaggttgataatttttctataaagctcatgattaatataataaaaactcaaaaatctcacatgacatgttaacagccaatggggaaaccatatcattggctcatgttacgagccaacttaagtgtcatatgctccatggacccatttttgttgtttttggtattaattacatacactctagctcaaaataatttctatctcttagtgtaatttaaatagtctttttttcatcaaattttgtttttttttttaaaaaaaattattttgtttattgactaaaatattacttgtcttaattctattctagttaattaatataagaattttaccacggctttcatagagccaaagtcacgactcacgagcactttaagagttcatttggtacgttgtattacattatattacatcgtattgtataatattatattgaattgtattgtatgtaatatttttatgtaaaactatatgtggtattaacttttacggacatttaaatatataatgttttagtataaattaaaattaattgaacatagtattattatataaaaattcgttatataatctaattcaatataatacaatacaatacattacgacctaatacgacgttccaaacgagcccaaatatatgtaataattaaattaaccttgttagttaaaacagttagttagttgacattagtgaattgtaacagtttcctgctttttttttttttttgatctcttgtaattcgactgatatataaatacatgcgtctcaagtcagttcggtttgtaggcccggtacaacttgttaatttataattttcgtattgtgctcaaattcgtgatgtacttttacttgggctactctatttttaggttaaccagttttcttatacagctagcctagatttcaagctccaataatctactattattttacaattaataaattaatcactaaattatatatatattttttataatttcaattatttttttataaattttcgacaatactttacacataattatataaaaaattatcatatcatgtttttgagctattctatttatacttatgtgtcgtgtttttagatttatcgtagtgtgtcgtgtttaagtttatttttttttcatgtcgtgttaatttacagtatcgtgtcgtgatcatgccagtgccttccaaactctatatattggaaaagaaaaatggaacaattaacttctttctctcatttaatttaacatgtttaaacaagtgaaattcggtggattttaactaaattgatggtaattatatataatcacaagaagaacagaaaattgatgagagaatctattttatcttccctaaacaagaaaacaacaaagcctatatataacttccaaatcatcatcatcatgaatacaattaatcaacaaagaaatgggaccacccatacaacttttctcaactttatttttcataacaaaaaaggtatgcattaacaaacaatattattgttaaaatatatcgatcgttaatttgtttccat

SEQ ID NO: 195515 - DNA, 1599 bp, Cannabis indica
aaaaaacaattgtccaaataattaaacagtacggttctataaaaaacatatttatgttttaatacacatcaccttcaataaatatggtgttttaattggacagcttgaatctttgtgttgcttttgaaggaaaatataaaaagattgatgaagtggtagtgagaatatttggatgtagtattgtgagagagaaagagaagaaccaaagagagaaaattgtctgatgtgtatttggtccaggttacattcataagtatagtttccattgtacgtagtctgtacaaaaaaagagtatagtttccaatattgtccgtacaaaataagagtatagtttctattgatgtttaactttaggatattttttcttaatagagtattttcaagtatgtatgctcaaatttcctttcctcaacaataatcactaagaacaatctggaccattgactttttttgactgtggaatccaaatttctcaagagataaaaaggcttcatgatatattattttttttctttatagaaagctaataataatcttcttttacataatttctccataatatttcaacttctgggttcatttatgctggttgtggagtatattgtgctgagtgtattataaattgtatgtttggattcagttcccaaatggaagcagtagtatcaaatgccatataaagtttcgggttagtaccataagttttaaaagagaaccctaataaaaaagaagaaaaaatataaagagtgagtaaagagacatttgtctcaatgaattgatggtggctatattaataattcaatcattctgattcttgttatatatgcgattataacatgtcatgacttagataatttcgctttaatattttgatgaccatggtttgctcgcacaaggcctgaggtatgagtccctcttgggttaataagctgggagtccagtttcaaaagaaaaaaacgatttgacccaaataggaaaaaggttactcaaatgcctttaattaacttgattagtttgattttttatttcagctatgattgtgtaagtttctgtttcttctttattttctatcgttaattttggtcaagttgaacttgcaactttctatgattttgtaatactacacagatggctgttgtcgattctgagattgtttgccttacgtataacaacctgtgaagattggaattttatgggtccatgttcatttttttgatttgccaacagatttaattttagagaggattgggttaggatattttttataattaaaattattaaaatatgttatttttggccagattgcagtggagggaggaattgatggaaatttaatgaaattttggaaaattgtattgagtagttgggtaagcatccaaatggagctgagtttcctcattcttcccagtgcccaccttttgattttcctttagttttgattgcttatttgagacgctgattttagttttggtatagacaagtaaacgtttatatccaaccaattatacactttaactcccaatttacaagtataactgcatccaatttacttttgcttgatatttaattttactgtacatactttagaatgggtgcagtggc

SEQ ID NO: 195516 - DNA, 1941 bp, Cannabis indica
aaatattaaattttctatcaaatactaaaaattatataaaatacaccaaaatttatttttaatggtcataacataccaagagctcttttgataaattgcattacaacaacactagcacctcattaaattttgtccaattatatagagattgacacaaattttaaattttatgctacattaatttaataaagttggtaatagtaaaagtaatcaatcattcattataaataaactaagctatttagtactcatatcatatgctctactttatttttaaaatatatcagtatttttttacctcatacttttatagaacatcatatatcatattccaacttttttgtattgtcttttacttcatttaataataataaaaaaacaaataaagagaatacaaaaaaaatatataatttagctcacatataaaaagtgtagcacatttagttaagctttgagctaaaatagctcaaagttaaaatacaatacattaagacaacattgtttgaattttcagctacatttgacatgttcagctattttagtgctatggtaaattcatatacattcaacataatcaaatcaccacatgtttaataatctacaaaacaagtaagtttgtagctaatataagaaataaattgtattaagtactagatgtcaaaggaacccaaactaaattatcccatggaaagaaatggcaaacaggggaactccttggctcaatcccgagcactcgaaacgacaagtgatcgcgatcccaccgtgaagtatccatatggcaaatggcaaccgcttccaccctctcgccattggctcccaaaagtgacacttgaaacaccttgttttcgctctccttccccgggctatggcaatagaaaaccgcgtaaggataaggcattgtatggcacccgagcattatgggagcgaaaacctctttaggttctcctaaaatggtgtagttttgcaactgcgtgctagtatttttcaaaggggttgtagtcaaaacccgaaatctaacaccgggcccaaagagattcgatgtaaagtctagcatggattctaaggtgctgacacagaatctagtctccccttggataggttctagctcacattgcttgagggtgtactctatggccttagcttgaggtgattctttggggaatgagaaaaaatcgaggagaaaaggaagtttggatgaagagaaaggaatggaatccgattcctctcgggtgaggaaccgaggggaatgggagaggtttttggcagggaagtatatgggaaacgtattttgaattttgaggtcctttggtgtgaagaacactttgagtgaagggtcatccattgtcatgtgatgccctttagaggatgaattgatgatgatgcttttctttgttccaattgttgtttttctgccacttccatgctctacacactgccaaaaaatttagaggtttactactaaacttgacataattcagaaggataattataacctcctattataatcttttagttaaccttcacgttcgaaattacatgtcaaaatattttttttcaaatattttttatagcggtattcgttacagttacagaattatatctgtaaatttttgaaaaattttcaaatagtttacaatgtcgaaaacagagttcttgatattttagtttaccacgtacgttcaaaaaacttcaaacatattttcaacactgtaaactatttgaaaatttttaaaaatttacattgatgacgttgtatgtataacaaccaccgccatgaaaaaaaattttaaaaaaaaatttacagaatatgttttcgaacacggaagttagattataatagaagatcgataataacactcctcttcccactaaaattacacacaaatttaacacagattaacgagtaattttaaccaataattgttaagagtaacttgatta

SEQ ID NO: 195517 - DNA, 909 bp, Cannabis indica
atcaaaattattaaacacaaatttctaaaatttccattatccaacctaaattcataattttcaaaattaaaaaaataaaataaaatgctaaaattacatccaaactaaattcatattttcaaaattaaaaaaaaataaaaataaaaaatgataatcaaaattatgaaacccaaattattgctaaaatcaccaatatccaaactaaattcatattttctagccaaaaaaattcaaaaaattgaaaaagattaattacctggtgattgtggaatcgtgttctagcagagaaagcaagatgaacacccttagccatatcacgatcataaacagctcttctacaaggatcacacaaagtctcgtacgcctcctgtacccgaataaacctcttcgtatactcctccacccgacccggcggcgaaacgtccggatggtactttctcgccaattgcttatacgcctgtttgatttccaccaccgatacactttccggaatccctagaagctcgtagaagcttctcgaattcgtatccgccgccacgcaagcatcgtccaccgccgcttccgatctcaccgatccgattcgagttcgggtcgggttaacgggtttgggcattcgaaccgagaagaatctgacggcggtgttagtggtggtggtggttgttgtggtggtggtggggatgaagaagcgtgaatcgcttgctgatgagattgttaagccatggcaacgcattctctctttctctctctactttctctctctagttttggttttcttactcttctcttctttctttcactcactcaaaatttatatatgagaaatttttattttattttatttttaaaaaaagaaaagcaattaaatttatttttttttttagtgaaagagagaaaattagaggaaagaat

SEQ ID NO: 195518 - DNA, 1416 bp, Cannabis indica
taataaataaactgaatctatacttgtgtgacaagaaatgttagtggacggaaaaaggcaccatctttgactgagaaaaactaagtacatatttatttcaattaagcaaaacaagaagaaggtgaagctgaaaatataacttttgtgccatgagatagatatgaaaggccggtaatgaatatattacaagacttgaaatcaaaagagggacaaaggcttaccagatcactttctattcgaacaccaccaaaatctttaaatctgataactgcttcacggttaaaaaacctggcagtgtttgagttttccatagcaggcaccaataaagcatcaatgaagtagcaaccaggttctactgttatcacctaaaaatataacaagacagcctaaaatgaaaccaaaatatacttcacattttaaccaacggtaaaaaaaaaaactaaaaatcaagtcatcttgtaaatgagttgatctttaaattatcagataatgatcgacaaattgtatattaatggtcaacaaaccattccctcttggagttctctgaccgtacgtaaggactttaacccaggttcttttggcctctccattccctgcaaatcattcttgtcatcccaagcccaatcaagaaagacactctcaaaattagagagagtgatagagagacatcagccagtcacgttaagcattaaacctttagatagcctccaggatcatgtgtgtcaaggccaaggaaatgcccaagaccatggggcatgaaaacagcaccaagtcgttcagccatcatatcatccacattgctagaatagaacccccaaaacaaaaggtcaatagactataaagtgtctctatgagtaatggaaatacgcataactagtacgctggaaggcagtcaaactaagctacagtacccaacaagaatgcctcctcttagcaatgactggagaacaatcctttctgctaacctgtaataaatacgagacaaaccgtgaacatgtctgaatcgatcacttaaaaatattcaaaataggcaacaatgtcagaaatatagtaatcttaattttctttttcccataaactaatgaagaggtcaagaaacgacagatgtatgtcaggttccattgaaatatatgcaaataatttccgaaaaaacatgtatccagaacttagaatacggcacagcacaggaccagctcaaaaatattatcatcgatcctcaatccagtaagaaacaattctcaagttttgtagtcaagataatgaagagcttgaaaaaccaatgctaaaatcagacgatacttaaatcaaggtaatgcaaatgagctgaaaaatgttggaacatcaccatatataactacacagtttaacagataatgtgtaaaaaccttctttggcactgtctggcaccaggagatt

SEQ ID NO: 195519 - DNA, 1441 bp, Cannabis indica
ttttatttttttaaaacaaaaacgtaaaaataagtgatatgtggatttggcaccacaatggatcaggttatcattttgcctgtactttggaaaattgtgatttgtcttcaagcttcaatggtgatatatgttttggggggtttaaatcttccttccaaagtgaaaattttcggatggaggataatacaatcttctcttccagtggcaaaattgttatttcacaagaaaattttaaactcagccacttgtttcttatgttcaacggcttggaaatcaataggacatgctctatatattttggcaaactactggttcatccataaattttaaaagagaggatcatatgaaggatggcgacaactttatgcatttatcaacatttttttcaaggtctaaattagagaagattatatgcataatgtagtatatatagtcagatcggaagaactttgtacatggtaaacagtctaaaaattatttcaaatttcgtcccaagctgctacatatcttcaaaactttcaatactttaataatgcagccaaaccagtagtctcttgtcaaattggtctagtagcttcatccccgtggcaacctcctccaaagaataaattaaaaatgaatgtcgatgcgacttttgattcttcgaggaacaaaattagtattggtgatttatttggatgtgttcttgctgcactatctaaaccagctcttggaaattttaggccacagaaaatgaaggcaaaaacaatgttctttggttttcgttgggctgagcaattgcatctacaacctaactttgtaaaaattgattgtttgatacttgttaatgctttgaatgatagctcatcaaataattctagtttacatgatttggtacaagatgtttcgtatcatttatcctcactctctttttctgcttgtgtatctcatattaggaggaatgttaaccaaaccgcacatggtttggctaaacaagctttacagtaggataatgattgtatttggttagaagaaatactttctaccattttctttgttgttgtaaatgactatgtttggtttataataacaaacttttcctcataaaaaagagaaaattttatttgcacctcacaaaattataaacatatcttaatatttaaaagaattaaattagtttttaaaaatcactcacgttttaatttttttactatttaatgttagtttcaattattgtctttaatttttttttaatttcatgtatatatatttctaatttttaattctagtaaaattttaattataatttttattatgacaaggaataatacaattttaaaaaactaatataaatttgagatatattattttataaaaataaattattaatataagatgcattataaaatttggggtgcgattaaaattctatagcaatttttctaaaaagtaaattaacatg

SEQ ID NO: 195520 - DNA, 645 bp, Cannabis indica
ctctctctctctctctcatgagcctttcatttgatgatgatgatgatataaagtcctaacttcacaacctttttcttttgcactcttatgaccttaattattatcatttttcctactataagctccaataatgtcagatcacatcactcatgaagatcaaaaccaaaccactactagggttttagagagtcgaagaaagagtactacatcatcatcatcaaagcgcgctactatcacctcatcatcaccatcatcactattgtcgcttccaccagatcatcgtgatctgggggaggcagctactgctactgctgttgctggtgctatgacaacagcagcaccaccagctccttgtggtgcttgcaagtttttaagaaggaagtgtgttagtggatgcatctttgcaccgcactttggatctgatcagggtgcagctcggtttgcagccgtgcacaaagtgtttggtgctagtaatgtgtcgaagctgttgttgcatattcctatgaataggagacatgatgctgttgttactatttcttatgaggctcaggcgaggctagctgatcctatttatggatgtgtctctactatactcgctttacaacaacaggtttttacaagttatatatacattttttttgttat

SEQ ID NO: 195521 - DNA, 1089 bp, Cannabis indica
caaggaagaagaagaagaagatgtactaatagtgaaggaagtgacaaaggctgaaggtgtgaagagacaggggaagaagaaggaatctcaagcttacaatgatgtaatagaagagactgcaagcaagcttttggagaagagaaagaacaaggttaaggctttggttggtgcctttgagactgttattgattatgaatctaaataattaattaagtaataatgcgctttatacatgcatttttattacttaattactcttttgttaattattagttaacttgggtttcagttcaattggatcgacaagtacttgtatacaaacgaaggagagactcatcaaaagatattgttttatttaagaaaaaaagaaagagaggtatgaacgttattgtggggatcatggagattatgatttctgctttttgttaaattatcactctccacaataataaatgttattatttgtgtgatcataaatacgtaccttttaagtagctaattggttttgtaaatgatttttcttttattgttatttagattctaattgatccttgtttttttcctactaccatgcttaacttatagagaggacatatcaaaaatttgcaaaatagaactaaaattaaatatttaagattcatatacatatatacaacaacaaaatccttgttatttctaaaatatattgacttgttttctcaacaacacaacaaaattatgattaaattatggagggaaaaacaaaactgattgaagtctaagcaacatcaagcaagacttacaaattagcaaatttttcattctcatgatctccaacatcatgtgatctccattctttggtgtctgctcctccttcaatctgctttagtttatctggccaaccagatgcccttctcctagcttcactacgagctgccctctcagctatcttcatttctttgaattcctgttcaaacttggcttcatcctcaggtgaaaagaagaggaactcagtgttcccaagttctccataaagcttctcaattttggttttccagaagagacctgtttctgtgtccattttgcggtaaggtgttttcagcaggtact

SEQ ID NO: 195522 - DNA, 1689 bp, Cannabis indica
cattaatttaatgtgatttgggatcataataagcaattttaaaagttgtaaaccattgaagtattttttttaagagaagatgataaatttaatgtgaatgagagagaaaataaaaaaaaatatatattttaaaataatgtatgtatttttgtaactatatgtgttgcttttattagagatgctctaagttctcctctcttgtgtagattcacttacatgtgatgaatatggctgtcacaattttaaatgcaagtaaataaggtgagtaaatattacataataaatttatgagttttgatggtataataaattaatgttatcaaaggatactttgcgtgttgcatgtgtgtggtttttttatggtatatatctctaataaaggtgtaacattatcataaacaccaacagctaaaaagaacaaaacaaataataaatacaaaaattggacccccaaaagtctgtaaaaccttcacactttacagtttacactcaagtggcagtgggattttacacgccaaaaaactctacaacagtttaccactttttttataattgactaattaattataagattaatctattactaaaaacaattaccactgttagtagtgctgcataaactatattggttattttaagttaggggtgggaattatacttacgggtattcgcccttaatggaacaggggcaggggccgactttcaaggacaggacgattaaatgtttatactcgagtcgaaaatggggcgagagtaggagaatagataagcactctgaacccgcccccatatgatatatgttatatttaagttttaaatcataactactataattaatataactttatgttctatgttttttattgattatagtaatgaaacattttagttttcataaaaatatctacggtgatgcatattaataatcacatgtttttaaaaaataacacttactatttattttcaattattaattttgtatttattaactctatttattatacacactatttcacttatgtttattgttttactcagtttttataattgtttttttttaattttctttaagacattattttttttaaaatatatgtgtaataggtaccgtatagaaattcttccccgtcagataatttccgctctgctgtcgctttaatttatagtattaggacaggtatgagatgaatttaaaaaacggatatgggtaaaggagcaatgcccgttccccgccccgtttacatttctgttttaagctctctcttattttccctttcaaaactggtcagttactcatcaggtatggataaataaataaataaatagataaatataaaatgtgataaatttactgctgtggacacataaagaatcaggtctgttttcacaagtatgggcttgatgagagattggataaagctgggtggctggctgtgtaaatttcgtcaaccctttttcatttcgggtttgagccatttactgcccctctaagcaaccgactggtgtcggtgccaacccttttttccccatatgggaatttacaaatctgtgtgtgtactactatatttactgcacccctgcattgggtcatatctctcacatccaatcccaatctttgaagatttaccatttatcttttgattctttctgataccattaaaaagaaaaaaattaatttcatgtcctttt

SEQ ID NO: 195523 - DNA, 1758 bp, Cannabis indica
atttatttttttttttttttgaaagaaatttattattattattattattattattatttttttttttttttttgtgaaagaaatttattattattattattattattattattattagaatttaattgcttacttaagagttaagagagggttgaatataatgtgagttgtcaactagcggttgagaagaaaggcatcaaaaattaaatacttcactataattgtattattggtcaatgactattatttattttaattttttttttttaacttcttagtctttgttcataatgagtaagaaaattgcctatatatggttgttattattaattatttcttagagctatttacattgcaaatttgcaatactagtcatatatatgtatttctttttatatatcaaagttaattaaatctagagtattaatattatgcaataaggtgacatagatttatctattcaaatttactcaattagctagttttatattcaaagatttttattcttgatgtaattaacttctttttaagaaaaatatataaaaataatgagcaatcataattattttttaaagttttttctatgtagaaataaaaaatattcaaaacttcatttctacctcaatttgatgaacaatatgtagtttagtactaaatgaataccacatatagtttttttggttaggtaataaaaaaaatgaaagatttccgacaattaattaacaagaaacataattaaataaatataaccaatatctattccttatatttatcgatttatttttttttatatatttattttggcgtaaaagattgtcttaaaagttttttaagtaattgtatgcttcaccacacctaataaaaggtgcaatctcttatatttttgttatgttggtagtcataattctaaataacattttacaatgatgtatcttataattattaaaataacatgtaaatatttaaaaattcaaataataataagtgtactatttatataattaactaagtataattgataatgagtggagtagtttatgcactttatgtatagtatttaagttccacacattatcaatacgagactctctataatagtgactatttttactcaccaatcttgcacggctcaatcacaagtgactcttttggctcactattctcgggtcccaagtgtttattttggctcttctttttggaaaccgataccatgttagaatttaggattaagatgaatgagtcccatctcaaaattaattgacaatgagagaagtaacacatacattttctgtatggtattaagtttccacatattaccattatgagactcaggctcggccctatatatagttatacaagctgggctactccacagggttcaatatactttttctttaatactttttagttttttttttttgtatgaacccaacttttcaatgggctaacaatttttcgttgatcactcccatgaaaatatatatatatatatatatattactactatttattatttttaaactttcatatttttttttatctattttttaagttgtattgaaatcaattattatttaataaaataatttgtagttttttttagtaatatatatatataaccatatgataagatatttaaaaatattatttataaattatacttttctcttttgttatggtatttaatttttaaaattagaacaaagcttccaaaataattaaaatgaccctagtgagactctctaatatcaatagttt

SEQ ID NO: 195524 - DNA, 837 bp, Cannabis indica
atcatcatcatcaagaagaataataataaaagttatttgttcaaaaaaatatacataatatggtaaactaaaggttccaaaaacttgtgtggctataattctgtcagccaaaaaaatccatccaactcccctaaattgtcctctcctccacgcaccactttctaaaagtttcataacatttcaatgtggtaaatttgacttagctcaatccatttatttcaacctctgctttaaaattctcaattttgctaacaccaataaccaaatgtggaaagtgagtcataatatatgtacgtaatattataaatcttgataagcattacgtagttggttttttctttgtagataaaattcgttttttaagtatatttttattaaataaaagcaatcgatcttaaaaagttgttatttttaaaaatacaaagttaaaaaatgattattttttaatttattcttttgaatctgacttgttaaacttataccgtatatacggaattttttcatatataaaaaaaatcatacaagtcatcggctgtataataaatagtttctatagtttaatgatttttgattaagcaaactacttacttatttttaggaattaaggtacgtaactcaaaatgtattatgaatttaaaattattggcttggattttataattatctaattgttattttatatattattagtaaaatttatactgaaaaattaattaaataaaattacaataatgaaaaaacgacggggtgattataataatatattagataggtcaaattgaccttagacagttttttctttcatttttaacccatagaaccctgtttgaatttttg

SEQ ID NO: 195525 - DNA, 3206 bp, Cannabis indica
ggactccaaaaacttatctagtcgagctttgatggacttaaaaggggttttttgtagtagtgacaactatccgagttattctcactattgatgtgagcgaaaattgggaagttagacacttggatataaacaacgctttcgtaaatagaacccttgaagaagaagtgtatatggtacaaccaccaggctttgaagacagcagcaaaccagattatgtatgcaagttaaacaagacattgtacggctcaaaacaagctcctcgagcttggtttgatagactaaaataaactctactgagctggaagttcactaattcaaaagcttatacatccttgttttctaaaataactgagcaaactgttatttttgtgctcatcttgttgatgacatttttgtaacaggcaatgacaccagtcagttaaatcagttcattgctgatctgaacagaaactttgctcttaaagatgaagggctgctgcattttttcttgggcaatgaagtgcactgtgacactacaggcatgtacctttctcagggaaaatatatcacagacctcttggaaagttcaacatgaccaatgtaaagccttgccccactccaatggtgtctggcaaaccttcatccaaaactgatggtgaacaacttcaaaatccaacaatctatagaagcatgattggggctcttcaatatttatgccatgtcagacccgatattgcttttgtcataaataaactcagccaatttttgcaatctccaaccacaagccactggagtggagccaaacgagttctaaggtatctaaaaaggacaatccatcatggtcttcatatctccccaagtgacagattagcaattgttggatattcagatgcttactgggcttgctgtccagatgatcgtcgatcaattacagggtattgtgtatactatggagaaacattagttgcctggtcttcaaagaaacaagttgttgtctcaagatctagcacagaatcttagtatagagcccttgctcatgttgcctccgagatagcctgggttgaatctctgttaaaagaaattaattagtttcgaacttccatgtactccaataacctggtgtgataatcaaggagcaagtgctttggcttcaaatcctatttaccatgctcgaacaaagcatatcgaattagatgtacatttcatctgtgataaactgctgcagaagaaacttgaaatcttttatgtgccatcctcaaattagattggtgattggttaacaaaaggtctttcacattcttgattcaggttccttattgacaaactcgggatgaagatgtcacccctttgtttgaggggtggtgttaagaacctgaattctactgttgtaccctcatgatagcagctatgcacctcacctcactcaatactctctcttcaacaaattgggaagattcgttctctatggaactgattcttcattgctttttgtgccttttctgttataatgaattattgcatttttatttgtattgccacctgtcaagttttgattgtgtgtttgtactctgctttggctatataatgaaaagtctgtactcagcatcctttgagctcagaaatacaattgtcctctttcttcactctcttatcagatcgagattcatatgttttgagtttgtgggaaactagtggtactcttcattttaatctgtgattatgtatcatgatagctgctaattaattgattcaaaatttgtatacagtacaccacgtccacacttttgctaatacaagtttatagacgtttttgtttatcttaatataaaccatttattatcagttttctaatccagatgtatattgtattatataatattataaataaaattatggtatatatatatatgatatttttaaacaatattattttaaattttgatttatataaaaatattatatgtttatattcacagacaaattaataccaaacaaatataaaatataaaaatataacatataatacaattcaatatcatatcaatatcatattatataacaaatatagagctttttgtgcttgatgcttagaccccacaagaggctttgaccttatatattgatattaaaaaatatacatatttcatatctatatcactacatatactaagagcccgcaagcaataatatcctattatagtcgtgtttttgacatgttagttgtctctttgtattagggtgtttgttttccttaggaattttcgtttgtttggctgttgctatatatggtgtccagtagcgagttggtatgagatttggaatcacgttgggctgatattagtctggaaaaaggaggacgaaggtggtctcttggattctgagattgtttcagatgtaccaaaagaattggttattgatacaaaatggtgtttggtgggaaaattgttaacaggtagggtctcaattttaatgcctttcagaatatgatgacatatccttggcaactaggaaaataatgtatgtcaaagagttagagcacaaacattatttgttccaattctatcacgaggctgatatacaaaggtagcccttggacctatgacaggaaaataattatttttgagcagtttcctgatgggattaatccacgaatggtagtgctgaatcagctggatatgtgggtgcctgtatgacttgcaatcgagatttatgactgagggaggggtgaaggaggtacggaaatatattagggagtttgttgatttagaccctaataattttattggttttaggggattacctacgtataagggttactattaatgtcaataagtcaattaagagacggatgaaaattcacaagaataattcgaattgattttgggtcaattcgaagtaagagaaattacccactttttattttatctacagtattataggtcattttgaatgattttctgtcaaatttttgagactcctttgcatttgatggcaaagccatatgggttgggatttctagctgttcattcaaatgaatttcacaatattagtgctcaatggttgagatcgggtgcagatacgcgataacagagtggggagggtggctgacaaaaattagagggtgggagcctagtagagatcatggtaaaaggattatgattgacaatgcacaagattctgtgaggaaaaataggaggttaaatgaggaaataggtaatcgggggatt

SEQ ID NO: 195526 - DNA, 1210 bp, Cannabis indica
atggatagtttcttcttttaactcgcaaataggacaaaggtcatgacgaactaagttgaattttgtaggaatccatttagtagagatttgtcaagccaaaagtctaacccttaaggaaggtttaacatccaaatattattattttgtagataattaattgctgtataatgttatttttttttttcatgtaattactaatagtgcatttgcaaagtcgttttgtaatttcattcaagtgtgattctcgataactacttaatttgacttatttatttgattatgcaattatacggtataattacagataattaaaggcttctaattacactcaccaactctttattgtgtaatcaaacaagacaatcaaaataaatatttttttttttataaaatatttttttaatgaaatattagatgacaaaacttcataaaaaaaaggcgaaattactccctatcatcatctctttggtaagatgaaaagtaattactgactcgacctgctccctttattctcgggcttgagattccataagacatgccaagttcagatgtaaatatgcacgttccgtttggcgatattcaaatttagtgtttgacttgagccttgccgactttatgcatagatgcgaatacttgatgcaatgcacctctcaactctgtacaccaaaatttatatggaatctataatctatactatgtggtcgacatggtttgagagaaataaggttgtacataagggtactgcaaaaccagcaagcacacttgtctctttgctacgaattacttgcaaaattttcgggatgctcaaactagttatcatcagaatgagaactctgtttcaagatctccttcaccagttcaagcatttaatccgtggcacccacctgctctgggtgacttaaaaattaaatgtgaatgcgactgcagataaaactagactgatgccttgatggcttcgaatgctttaaatgcacatctttctgcaatttcttcctttaaggatttaattgtagatatttctaactttctatcctttttttaagagtcaatgttactcatgtcaaacgttcagttaatatggctggctgcccattgtttgtctcggtatgttctagagttggatgaaacttattcttggatggagaatttttttctatcgatttaatatgctattgtaaatgacataaatttttaattataaaaacttaat

SEQ ID NO: 195527 - DNA, 1020 bp, Cannabis indica
aactgcccaatgagtacttaatacattagtaattatcttgtgcaggttgcagagaaagaaactcattgcttccagaaaaaagtactgctaaaagaatgaagttcttgtttcgttcagctgaaaagcttcgtagcgttgaaactaatgttcaattagatgatgtcattactagatcaccctctattaaaggtcaatttttatgtatttgtatattcggtttccccatttttattttttgctggttacctgttaccacatacaaatggcaacaattcatcccatgttggcacaaattgacagggaggggagaaactagttggacaccggaacgacagcacgaccaagaggacggactagctaggttttattttctttctgccaacttgataagagatatctaataagatttatacatatacatatattaaaaatatatatttgcttttgttgtttctttttacaatatttcagggctcttgaatcgtttgcattggagttacaaaaacttaaaagcaaaatcaaatcagtaactagcaagaaatcatccgaaattctgatgtctgttgtagaagatatccatttgcgtttgcacaatgtggagtctcagattcaaacagatatgtaagtactttcaagtgcatcttcatagcgaaagacgatgatttcttaagtatgctcttaatgatttttcagggggaagctgaaaagcgttagtacgttaaaaagaaaacggatggatacaaaatttgaaggtaaactaacttgatctagtctttcatcatcttctagcaagtatgggtttgatttggttgccgcactatttacagatccagtttcagttttagaagctctcgggttgaaaataatgtttctgatatataggcgaacaacaaagttctgcagggttgactgccattttaagaaaagtggtaaatgtcacttggtatagtggtgtggtgatgttccctacagaccttttcaactaattaaaagttacttagaaattaacatgttatagtt

SEQ ID NO: 195528 - DNA, 3358 bp, Cannabis indica
ttttaaaaaaaaaaaaaaaagtggtcagcccaccggaattgaagcagacggcgccgtaggataagtgaacactctggggagtttttgctacttcgcaaaaatggcggtctgtaatctcgggtgtccattcccgtcgtccttcgcccgaaaatccacaccgttcagtaggaagcggagcagttgtagaagtaccattttatgtctcggtctcaatcactcggccaaggtcagctcttcttcctcttctctgagaatgagaatctaaatcctgagaaagtttttgtgatatttgaactccgtctcggtaagcagtttaggagggattacacgagcgtaatgatagtcccgacgggagtcggagcatccattggtggatacgcgggcgatgctatacccgtagctcgcactctctcatcggttgtggattgcctaatttctcatccaaacgtaacgtaaatggactcatatcgtttcattcttccgtgcctttcttaatttgggtttctctctttttacctctaaagctttccgttcaggttctaaacgcagcaatgctctactggcctatgcctaacacattgtatgttgaaggttacgctcttgatcgctttgcagaaggcttatgggcacttcagcctgttcaccagaatagggtcggtcttttatttatttactttattttattgttgaattaaacttattattaatgtggtgaatagtgataattgaaaaaaatcttgcgttggcggagcaggtgggactggttcttgatgctggaatagaggaagatcttaggcttcgccatttacaagtggctgatgctgcaagggcttctcttggcttgaatgttgtggaatatgttgtcactgatacacctttagaggtatttatatattcattttatctgtcaaaaagaaaaaaaattataaaaacagagcacgcgtttattagaattctagtttcaaatgaattcctgtttttgagatgaatgtaaactaataatatatgagctggtcttattgtccaaattaattgagtgattaaactctataagctttattggataacttgtagataactgacactgatttttagttcatccatcattatatgtattttgtttatccatctatagaattggatagtgatagatgtcagcctgtattttgtttatttatttttcataagaaacaaaataatggttcctaaaaaaatgaattgcaattggggaaaaaggttctcaacaaattactacagattagatgccaaatccctaacaaacaagtcacaaaacatatttcaaactacttttggaaagattatccataaagttgcccaattcccggttctatgtattcttcgtttctcctttcttgtcaaatcattcacaaattgctaagttagctgaactccaaagcttcttattcttacattacgataaggagcactgaatatatgaagaagatccagatgtcttagaaacacccattgaaccattaaaacccccgataatgtagaccaaaatcttctaaaaaaggtacaaatttaaattaaattttttactggtccagaacatagacaaatggtatcagtcttccacagatgccaactaactaatgacttagctttcggtggagtgaatactttccagaatagatgctggggactatctgtacaaaagaacccacaagctaaaagtgatggaatctcaatagtgattttaaatggaagcaacattttttttttagtgtcccagtcttactgtcctccaaaccattgcaaatctgaactgctttgaatagagacaaaatttgtagcttgcattgtctccctcttttcattcagattttgtagtacttgaaggttcatagagtgggaataacctaagaataaattaatttactgtagctagaaattttcacccttgaatgttgaatgtcgtaaaaagcagaaattacatctttaaaagctactcctaggaagaaatcttcttaaaaatctcacttgagatgctatttgataatttattttttcagacaattatatgatttaaacttccaccacttctggtgaattgtgggattggaagactgaaagaccaatttaagtctcaagaggctttatttttatgctattaagccaagcctttttgaacataatcgttttggtctactaaaaacaggagtcatatccaactggagtgaaaaatctgtgactagacattaagaatgaaattccaattcctccttttagactgcacttcaagagtcatggcctacatgattgataacatggtttacttgattgataactaacatatgggcttttgatctgtagaagctttgacaggacctagtgtgatatagcgtagcacagagaaatggagtagtgtgtcatcaatatggactatggaatagatcttctagtgtgatatagtgtagcacagagaaatgaggttattaattttttttttcctgctactactgcagtagattgaagtgaactagttttacaggtagaaatgtgggttgatccaaagggtgggcaatctacggggaggattaggcaccctgattcactattgagagctgtccgaaatctagttaatcgatcaagagtgaatgccatagcagttgttggacgcttcccagatgaagatattgaagaaacagatgactatcgacaaggattggtatgcaatcttttttatataatcacaattcaaaagcatgtgaagatttttatgctgcacggaccaagccttgtgatttcctttcattaagtacacacaaggccttctattatggttacatgagttactggcagatatcttttattacgtaggggacttatattttgtttattaaatgttgtaccacaaaattcatatctaataccgtcttgcaatatctctccgcagggagttgatattttagcaggagtcgaggcagttattagtcatttagtggtgagggaattctgtatcccttgcgcgcatgctcctgctttatcacctccttccctttgtccatctctttgcccaaaatcagctgctgaggaggttagtaatctcttaaattaacttagtctctttgcctattagagtagaacttattgcttgtagatgcattagtgtttgctgtgagaattggaaaacaacttgaatagcattagcagtatttatggttcttaggggtgtttgttatggggagaagtgttgggatgtggggcttttgaagggaacctcttatttggtgccttttgtcatgtgggaatgtggtaggtcctacaaacttttagtgggtaatataaatacatttctacacttgagtttcataattcctttatccacatcctc

SEQ ID NO: 195529 - DNA, 1929 bp, Cannabis indica
gtagacagtcacacactacaccaaccttttgattttgtaaaaagaataatataaaaataagagaaaggttaaaatgtactcttagtgtctaatattttttctcgatctcattatattattattagtgtaattagatattgagtctcatataacttaagacaataatttttagtaatattgctaacgtccaatcttaggacactatacctataaaagatgttagacactaattatagtgtccaatagtaatgagaaatactaaaaggtaacatgtcaagcacctttctatacgtgtcaatatcgctattggtacaattaagtatcgagtctcatataatttaatgcaataacttttaggtcaactccaatagtgaaactcaaatttagtgttaaactaaaatcaaaaagacataattttagtactaaattcatttcttattctgaccataacaccaaaaggtataattttagtactaaattcatttcttattctgaccataacaccaaaaggtataattttagcattatttttttttctattccaaccataatatatatatatatatatttatatatataaattcaaggaacttaattcatcaaccattatttaatctaaaaactaaagaaaatgattttaccatgtttacagtgcttcttaaatttggtgggacactatagataatctcatttataaatttgggtatgtagtcagttggattatatttactatttttggtatttgcagttggaaataatcttaaaagtattgttaatcaattacaaaataacacgcacaataataatgttgctctataataaataaataaataaatacaactctaattataatgcacacaattttacctgtaaatttgctacgacctaatgtagccaattgttttattaaattaataaatgaaaaattatttgtatagagagagcttccaaactcaacaaataaattaataatattactacatacaccttccactttttcttttagaatttcctttaagacaatatatataattattaatagtgaatagtgatatgatcaaatactatttgttcacaaaaagttgacaagtcattcatctatatatccggataacatcgacttgaaacaacatgtcaagtactctataaatgtatattatatatacatacccatctcatatattatctaattgggaatgtatacaaatatactattttttaaaaacttataaatgtcatatatatttgattgatagatatgatgttgagcaaggttggttgaaatgcaaagaaaaaaaggctaactaattaatataatgtggtattttgaaaatgacatgagatagattgtttaagtaaattttaagaagaaatttctataaagaaaaaataattgaaaattgtaaaaatatatatatatatatatatgaattagcaacctaaattaatttaattaagtatttatataaaattatattatcatataattaattatgtgtcattacatatataatgaatatttgagttcaagtgattttcaataaattagtgcggtacgtatagttgtaagggcaaaattataaatttaatatactacgtgccaattagactatattattatatagtatattcgcttaaatgtgttgcaagtgatttttaataaattagtgcgacatagttataatcagatattttggcttaaaccgcgtttgggtccagttttaaataaatagtgttaagacttttaattaaatgctacttcattatatatgtgttattggataatggaagtgacattgatgtcctttttagtggaatagtgatttaatcttgaaaaatgatgtttttgtaaatgccaataattatactacatttcagtaaaaatacaactataacagtttgcagtacaacgatagtcgactaactccg

SEQ ID NO: 195530 - DNA, 769 bp, Cannabis indica
aaaaagtgttttgtaaacttgtaaattatggattattgaagaattttagctcaagctaaagctaaatcccaaagttagctcaacccatctacgggattatagcaaagtaaagtcctcagattgtagttgttgttagaaacaattagaaagaaaggatgcaaacctattaataaaaacaaggaatagccaaagggaaaaagataccaattcataagaggaattatgaatctaaaacaaatagtttaatcaacaacaatgaaaaagaaaaacaaatggaaaaggtaatatttgaaagagagtagctgtcaattaccggcatgcttcacatagacattgtgtgtcatctaaaaatatttgattgacaatcaattcaactaatccatttgtactgactataagtctcatagggtcttcatggcaagcaaggtttccaatgatcccaaggcaaatttcctagaccaacaaaaaggaaattaattccaaatatgcataaaatctctctttttcttcttttcgaaaagaaacaatacattgtaactatatcatcaatatcatcccaaattaataaaaagtgcataaaatctgtaattaagcgtagaagtatacacttacagtggcacgcgaagattagctgaactgtgagatttgctgaaagcacttgaagcagaagattctccacctacatatttcaaaattagagaaagaaattttcaacaaaaatgaacgtatatgtatagagaatatatatagcataccataaaagtcaagc

SEQ ID NO: 195531 - DNA, 1468 bp, Cannabis indica
ggtacggtcctttatacaatattaatattgtatatattaatataaataaataaataaataaataacctttatttattctttttttttgtgtgtgtgaaaacatttaaataaatattatccttcactctttgcccaaaaaaaaatatattatccttaacaaattatataattagaaaaaagtatgctgaaatataatgtatgaaattataaatacatttctaagaacaaataaatgaagtagctatatatccaatccaattattatccctttctaataaatggatcatgttaatgcaacctactagtataacttctcaccaattggacaacttatgtgattgatagccattcttcaaagtttttaaaaataaaaataaagaaaaaccttgctaacaaacaactataaataaaattcaatgtaacactataatatggtattggttgaatatgtctttaatataatcgaatcttttgttttattgcattgaagatgatatctgcacttcaaaattggacaattgacacaactccaatcatcttttgggaatttttccaaaaataaaagtttgaactttgccaccacctaggtgctacaacaagttccaaatttaaaggctctgagtacatacctactatccaatatccatatatacgatttgtttaaattttttatattttaagtagtttttataagttattattatacgtgttttctgagtaacaaatgaacgggtcaaattaagtgatacatagaatggataaagaataatctttttgttccaaccaggactatccagccttctttaaactcctttgtggcattgatcgggagtgatttatgatctaagacaggattttatggctgagttcttattattcttgggatttccctttgacaattgattcttttttcttatgtttttggtggcttcgtgattctggtgtggttctgatttagggaagatttacagggcatcactcggtggttcttgtgggcctttgcggtatcatttgagtcttcttggttggatgggatctctttaattagggatcgtctgtcagaatctgggacagttatggtgcttcaaaggcttgtcagcgagagatctgcgttgatctcttaattgcgatgtatgtgggttggggtgaggtttgtgctccgctgggtttcaatggatgtttaggggttatctcctgattggggttcacacgatttggggcaatgctttgggggatcgagttgtcttgtttcagaaaagagggatcagtcattgtcaaaaaagggtgtctggtcatagtttagtacccaattttatcatgtgctgtctttgttgggtatttttaattttattgcaatagttttcattgttctattttattttattattttaataatggtgttcttgcacgaccttactagattagtagagattgttattgatgaagaccgttaaggagtttgttctct

SEQ ID NO: 195532 - DNA, 849 bp, Cannabis indica
aaaagttcaacaaccattcccaaaccatcttgccagagtttagttctaagattcaaattcaacaaaataataaaaaaaaagaaattacaatatcaactcaaatccaatataacaaaacgataaaaataaaaattcctaaatcattttagatctaagatccaccatatcctgtcgaccctaaaaaagaaaaagaaagaaaaaatagtcaaatctccgatctaagatccaccatatatcccaccaacagaaccttgagagagagagataaaaatgagatagaaatatttgaaacaaacaaagaattaccattcttcacctgtaattttgaatccatttgttgtaatgtgctgatcattgaagatctgatagtggaatcaagcaaatcatttagggcgagctcgaaagagaagtacccgacaatttttggaaacctatataaatttggtgttctctttctttattttttttagaattttgtatgtgttcgtgtgtgtgttgattaactttaatttgggaggattgtttggcttgatttgggttgatgcaaacttcgagtttttggagaggaaactcttacctttgctagggtttctttgttgtgtttggaggaaatgagttgttcttgattgttttaaaaggttttgatattgatcaaaatacagtagttttgattggagtcaactggtttatttgacttggaaaattgaccttgataactgatttgtgttatctattgggtgtagggagataatttcttacatattgcatatccattaatagtgttgattcattggcagttcatttcctattttaccgtttactgctgcaatattacctaacaagctaatg

SEQ ID NO: 195533 - DNA, 1736 bp, Cannabis indica
gttatattaattttttattaattacatttttttcttaattaattgttacctctttcatggtgttttcatcccataaaaggaagaagaatgacaagaacccaaaaaagaggtacttcattttctcttctaaattttatagttttcttttccaaaataagtataatattcatattcacttggttatttaactttttaacttttaactgaaaaagttaagttattcgtgtttgatactgtattttttttctttagagaaaaaaccacttttaaaagctattcttgcatttggaataaattgtataatttttaatttactcgtttaatttttaagaacccaaaaaagaggtacctcatttttttttattattatttatcattttaatatatatatatatatataatttttttttagtgttcttcaattttatccacataagtaacaatatgtaagatgaatgagaaaatctcaaaaaatgagattttttttttattttatattgttttctttagggtgacgctttgcggtcatgtctgtcaaatatatttttaatccgaacaccacttatataattcgtttataaatgaatatgtcaacccattaatatattaatatttaacaagactcaaatttatttaatgaaaacctagactcgctaatctttgtatgtattgtgtctaagtctaacccggtttggccaatgtattttttttctgaaataagtttaatattgaccatgcttagttattcagcttatttttaagtcttttttttcctaggactaaaaagtggtgtttgttagtgattaagtgcatttttttcttctttaaaaaatcacttttataatttttaaattaatgagtttattattattattattattattattattattattatccacattatttaaaaaaaaacattaaaaataaaaaaattaatatattaattattcaaatgcatagaaaataaaacacaaaaatttttatatgctttttaggtattaaataataattattatttgcctaattaattttcttaacttttgtcagccagaataataataagagtgatgttagttcttgggagagactaagaaattacatgaagaaagtttggaaataaagcttgagagacaagcaatcatctatgctatgatgaattgaggtacattaattaattaataattaaataatttcttatgatttgttttgtgcatctaaatcttatagtcagttaatcaaagagccacgtcatttaactacgcgtgaaaaaaataacaaaaatatgaatattttgaagtgcagattctaaacaatctaaataatttataaacatattatattttattttgagtagtgagaatacaatagacttgaatcatagtgattttttttttaaaaaaaaatcacacataccaaccatatataatattaactacatatcaattatatatatataattaatttattaattagcgtcctttctttttgtaggtgcaatattcttatgatcataaggacaataatggccgagaagttcagtttgttacattctttcctaaaatatttgagattttaatatttaatatttatttatttatttttgaataaaaagtttgttgtgcaaaattattataaaaaatattgttaattttgctttcaattaattatatgatgaaaaataattcaattttgtaagatttgcttattaataaatatttttgtttttgaaaaaa

SEQ ID NO: 195534 - DNA, 1676 bp, Cannabis indica
aacaggtgcaaaagtgtaaacatagtcaatggcatgttgttggttatacccttttgtaacctaaacgagccttgtatctttcaacttcacctttagagttgtattttattttatatacccatttttgttcctaataacatggcagtgaggtgggagagaaactatataccatgtattgttttgtttgagggaaaagaattcattatctatggcttttagccattggaaaaggtttgattcttaactgtatgaagtaggctcgagtttgatgtatgcttggagaatggcatttcgataagtgtggagcctaccatacttgagatatttgttaaggggatgtgcagtagaagcaattcatataaaatcctttaaatgggcaggtttaaatgtttgtctggcagctttagtggtgtggtttggagcaataggcattggtgtaggatgtaataatgaatccctgtaagaatcagtaggggttggtagaatttctatattgacctgttgtaaaggagtaggatctgcagtgtttggtgttgcaatgcgcttggcagaggaaaagaaattgtcaagttcaggagttggggagccttttaggggaaaaatagtctcataaaaaataacatccctggaatgaaaaatagtattgctacccagatcgaatagtgtataggctttcataccattggggtaaccaatgaatatgcaagcatgggctctaggagaaaatttatgtctcttactggtgagagagtaagcataagcaaggcaaccaaaatttcataagtgatcataagtaggttgtttattatgaaagagttcaaaggattttttttggtgcaataaaggtgtggaagtcttgtttataagatatacatcagtgttaataaggaagggtcaatataccagtagaagagaggattggaaagccaatgccctagtaacatttaaaatgtgttggtgttttctctcaactactgagtttgttaaggtattttaacacaagaattgtggatttggatacccttttgagcttaaaaaaaagatggcatgtttaactctttttcattgtcacatctaattgctttaatattggtagaatattgtgtatgcacaaagctataaaactgagtaatgtattgttggacatcagattttgatttcaacatataaacccaaaaatatatgctatggtcatccatgatagtgagaaaataacaaaatccttcacctctttaaatgtgaaaatgacgccgaatatccatgtggattagattaaaagaagaagcagcaaaattattttttgaattaaagggaaaccttttttatttttctaaatggcatatagaacaagaagaaagtatagtagagtctttaaaatgtaacattttatttataaaacttgtagtatacattgaatgatgactaagtctagcatgccatgaatgagcactattacaagaactattacaaataattttattgtgaacaacaaaagtggaattggaatcgtacagcaggaataaagattgagcaatacgtttagcaatcctaatcctcttgttctgtgaaccctgaataatgtagcaagaattagtaaaaaaaatgttgtttgttaatgtttggaggaaagtgtagaatattgaacaaattgaattggaaattaagtaacataaaga

SEQ ID NO: 195535 - DNA, 608 bp, Cannabis indica
tgtcttataatttgggtcactaaggggtcactaaaaattaattcttacaatttcttttatttttttaataaacgtgtcccaaaccacctagcacgtaactatatcataaccatgaaagaaattttttagcaaaataatatgtgtttaatttttttataagtatacgtaacggtacactttactgacttattgctttttttttaatcaccttattgccttcaataaatgtaattaataagtaaattaaaaaaataaatatagataggttattttatttagtaaaccctacattacaattagtaaaaatatacctagagtcgatctctcaacttctttcttttttttttcttttcttttgagatctgatctctcaactccatcttcactcctagtatttagatcaaaaaaattccatcttcacgatgactccatgcacaaaaatctctccaagaccactgccgtcgtcggaattgaaaggcaaaagtgacccccatcggcggatgacgcaccttgaaaccccaaaaatctcaaagcctctttgcctagctcagccacaccgactgcacatctgagatttgacatatcttcaactatttctctctctctct

SEQ ID NO: 195536 - DNA, 888 bp, Cannabis indica
gtgatgtttcattaattctctactattgaaaatattttggttatatattctcttcctaacaaaaaaacataacttcaaaatcttatttttacaaagaaaaatgatgacatgtcaagggtataaatcttaataaatagaaagtcctcacaagataaataaaaatctgcatcacatataacagtaagataaaaacgagagagaagtatgcataatcgtaacgtgtattatatatacgcgatgggcaagtgttttctccttcgcaccacctatgaaggtcgcaccttcactttgattatatagtccaaagactataatacgcggcaacccatatgagccttcaaattctaagttgtcagtatatgaatggttgatatgcgactaaggaagtcgcaaatgttccatacttaattgtaagcaatcaaactgttctcaatcatttattttttgaatgttagttatttaatttaatacatttaatgtaaaacgatcacttaatgattgattatgtaactaataacatttgttttcttataaagggatgatccacttcataataaacctaaacacaaactttctcctcaaaaatagactaggcaaaccgaactcttgctaaactactatatttttatgtatcttttacttattctttgcatgctcgttgtttacattctgttttattatattttatttgagtaacagctaatttaagtgaatactctttgttattattgtgggtgttcttgtttcacttgaatactcacatgttttggtattgtctattttccttcaaactaattacatgctcatataatatgatatatggaagaaacagtttaggaaataaaacataatctcaaatttaatatacttgtggagacatacttttta

SEQ ID NO: 195537 - DNA, 764 bp, Cannabis indica
gacctccacccacctatttgaaccctgcctctatctcacgtaaattgatgaccatagagctcaagctcatagaactcacaactagctatcgccctttgaaacccattgagcaaccaagtaggataaggttacctccccttttgctgccccctaagatagaacattattataaccacccaataagtaccatagaagtgttgaatgatcacgcaaagtacacatgagatcccaagtgtgtcgacaaaggctcatatttggctaaccatgcaaaccagttaatctccactcctccataccagccgcttgaactatgagatctatatgatttgtgtaatagtcaataatttcaacttccttgtctaagttccaaaccaaagctaaaccgccgtagctaccaccgagaacaactcttcaaaaactaaattacacatcaaaatttgaaacacgagtatcatcacaaagtgtctcacaaagaaaaataaaagtgagcttcttttgagaaactatctctttaaataatcgaacaatcgctgagattctaagtccatggcaattctaacttaaacaactcataatgattgacgagccccgtgaacaagcccaacaagtacaaaactaatacttagttccaaagcaacaaccaatcaaactataatttaggaaaattttacaattcatcttttgaaaggggtgcatcgatacacctttatttatttcgatattaaaaaaagaattagcgtatatttttttttataatcatatac

SEQ ID NO: 195538 - DNA, 1652 bp, Cannabis indica
ttaggagaatgatttttctcagaggatggaatcccaaagaatccatcccattagggtggaaaggaaaaggtggactgtatgcagttggggttcacaagaagaggattatctggtgcatctttggatgccatgagtgtttcacatgacattgctaaaagctggaaagaagagactaagcagaagaagaaatctgttgcagctaggcatagaagatgtatttcacatttctaaatctaattattaaatacaacaaaaaaaaaaaaattaaaaaaaaaaataccaaactgttttttgtatttttcaaactgatctaacaaaacccaattgatcagtttgtgtagagagaaccccaaaaaaaattatattattatttatatatgtaagttaataattatacaaaaacacaaggtagccctctcctagacattattaggggaagatgaggcttattgtaatttctatttatttatttattattattattattttgcatttatgataattttatttattttactatacattgtcaaatggaagagattgacatattcctctttctttgtagacacaaaataatatggttccgaatccaattactcattaatattgatatgggcttttcctgcatctggtctgggcccaattaatatagtgggcccctggtccatcatatgctccccaacttgagaattattttcagagtgatcactatgaacattgaacactactaagcaattcatattgggaaaagggtttaataaaactcttgtgtctctaatgttgagctattaccattacatatgcacatggataagagcccacaaaaattatataattatgtatatatatggataattcttatccatggacggtggttgtggtgttggtaacaaaaataatcaatattgaaaaaaggtaaaaaaaaaaaaaagaaaaattagctagttccaagtaaattcatgagtatttctagttattttacctaaaaacatgtgtttataagagaaattagtgttatagatgatgacccaattctaatttcaaggcatatatatgtgtgtcttgatacttgaaatttcttaaaattgtgaaattcctttgtaagtgtcaaatataccccaaaacatttgcttttcctttaaatggaaatctcaattttttaagctcccaaatttcattattaaactatatgttaactctggttttgaagttattttaggtgtctagtactattatgaggtgatactctataattagttaaatatttttattgggtactagtggtacctaataccttctataaataaatagcgttttgcgattggttagtgatcgatatttcttaaaaattattttttaaaattatacaggacccgatacttaattacatatataacgtactagctaggtacttttagtattttttataatattatatttggctcaaattatataattgtctgtctaagaataaactatatataaggttgtggtacatacacatagacatgtaccatatatatatttacacaaagagagtgattataattataaacatagtccaataatattatactttttcaagaagttgtaaattcgaatctctcttaatacttagctcaattaactaatttattttcatataagtatta

SEQ ID NO: 195539 - DNA, 3704 bp, Cannabis indica
atcttagcaacaaggaagttaattcgttatttctaagctcatcttgttttggtatacaccgaccagccattacgccaagtattgttaaaacccaacgcttctgaaaggctacataaatggccggtagagttgggtcagtatgaaataatctttgaacactgaacaacggtcaaaggatatgccttagcagaatttgtagttgagtgcatgggcaaagaagaaagcagcataagggacaacctagagccagtacaagaatccctaccaaacaataataaagacaaacctacctagaaattgcacgtagacgggtcagctatagatcaactatcttgtacgagaatcgcccttgtcacacgtaagggaaacatctgcacggggcaggcaaattttgattccaagcttccaataacgaagcagagtatgaagccctcattgctggcttaaaacttgctcagcagctgaatgctgaatacattgaggtttctagtgatttgcaattgttagtaaatcttgttttaggagagtacgacgcctggggagagaaattgatagcttatctaagcaaaatacaggatttgcttgcacaattcaagggttacactctcaggcaaattctaagagaagaaaacactactgctgatgccttagcccgacttgcaagcaacacagtaactgataaggccaatctagtccttattcaattcttagaagaacccaacatcaattgtgcagaagaaatcgaaatgatagacacaacaccaaactagatgatacctacaataacctacctcaatactggagaacttccaaatgatagaaacgaagctcaaaagatgatgaggaaagttgtatggtacatcataatggaaggtgtaatgtatagaagaggattctccatgtcattaattagatgtgtaacaaaagaagaagttgtatggctcctattaaaagtatgtgatggattctgtggcaaccacacatcagggcaaagcctatcaaagagaatactaaggcaaggatattttttgccaaccatgatggatgatttaaaggtgtatgtaaagaaatgtgacaaatgcaagagattttcaaaaataccctgtgcactgcctaacgagctaactcagatgaaaagcccttggccttttgctatttgggtaatagacctgataggaaaatttcccaaaggtaagggcagggtacaatatgcagtggtcacagttgattattttacgaagtggacaaaagccgagcctttggaaataattacacctaaaaaagtattggacttcgcggcgaagaatataatatgtcggttcggactcccgcacaaaatctcagacaatggcaaacagtttgacagccaattttttatagagttttgtatgactcattgaatcataaaaagttttttcgtagtgacacaccctcaactaaattatcaggagtagtcaataagacacttaaaggcaccatgaaaaaaagacttgaagaagttaaacagaactggccagaggaattactagaagtactatggtcatacattacaattgaaaaaatggcaaccgggcaaacaccattcgctgtggcctatggttataaagctatgcatcccgtagaattagaacctccgtcccacagaagattgagctacaatcaagcaattaatcatgctcttctagtagaatcacatgacgagattgaagaaaaaagagcctcaacaaacctgaagttagtagcccatcaataaaaagtggcttgatacttcaacaagcaagtgaaggcaatgaaattttttgtgggagatatagtccttaaaagattattcctgaacaccaaagatagcacggctggtgttctaggaccaaactgggatggaccgtatcaggttgttcatgttctagaattgggggcattcaagtttggaaagtatgatgaaaacatggagctcgttctagtaccaaggtattagaatagggaacatctgagaaagtactaccagtaaatgtacaagttcagatgaccactataagtacaccaagtaagaacatttactcctaagtagatggccttttggacggatcccgcccaaaggttttgatgaaatatttaagtactcaagtcggatgaccaccttaaaagaaaaaattttaagtgcaattttttatgtttaaatttggctaaatatcagattagatcatgtaattgcttttataaatgtaagttactacggtaacaaaactgttccgaccaataaatgagtaaggatgtttatttatattctaattgtgtcaattgtgttagcaagttagaaatataccattaaatgcatacaaatgtctgctcgacccaaagagctgaatggactaaaaccatacttgtgaaatgcaaggaccaagagtcataagatggtagggatcttgggctccttgtacggataacttggtctgaaggggccggagggtcgacactctagacggtaggagtcttagtgctgtggtcgattggagctatggaattggcctccttaaggtgtttttttgtctgcttgacttgcacattaattaagatatgcctctttggaatctctgagataatcaaaatttcttgatgggttggccttccaaaattcataaaagacctccacggtggcagtaatcagatttccacctccttcaagatctcctcttcccttgtctacctagacttgatgtcatcttctaggtcggctttttccttggttaaatttgaaagaagagtacagagactctccctcttgtctttgagcgcattgacctccttggataaggcatcattgtctacctcgagctgggcagttgatggcatctcttgaatctcttttctcagctcattggcccagttgttggcagcaaggagcttcctgttcacctctccgagctcatttctcacttccaacaccttcttgttggccgcatccacctccctttgcaggttgttggcggtggcaagatgcttcgccactgtggatttggctcaagattacgcatatgccatctttagattgacctgcacgggaaaaaagttaaatcttgcattggtaaaaagacaggacaaaataaaaggaaataaaatacttacacgtgttgcctccttcagaaccccacccatcagcagctctaaggacagttcattgtctgccctagacagttgattgatcacctcaaaaagtgactgatcaaggtagtattagagcatttacttgcctttcttagcctctgctctcaataccatggcggtggaggagacctttgtcagaccagatccatctgagcttccccctttggcactcttcgacttggataccttcttggttggaaggtccacagcaggcaccaactcctcaaaaaggttgatcactatctcaaccgggcccttctccttggatggaacatcatcacctctagattgttcgggcaggggagtctggcctgaactatcaccggtcctcttcttcagagcttggagtgctttctaagacatggctgcatataaataaaacaagaatgccagaggcaagtatcatgtaaagcatgtcacggaacaagaaaatattagttaaaataccttgcacgtgagtaggagcattctcccaaacaagtaaggatggagcctcatcgtctgaagagtcttcttgttcttgatccgttacgatggccttt

SEQ ID NO: 195540 - DNA, 625 bp, Cannabis indica
aacaggaaaagactccctaatagtgtaattacaaataacaaagctacagccttgaaaactattctacaataaggctttttaggagcgaaaattgtcacccctcaaaataaaattataatttcttagattacttttaggggcgacaaattacaggcgacttttctgtcgcccttaatagtacttttagactcgaattattagagacgattttttaggggcgacttgttgcatctatagtcgttaggggtgattttttatggttaacatagatatttgttgtagtgccaggtcgagagaaggaggatatcgaatccaagccctaaaagaagaaattgacaaagagaagaaatctctgagccaggtcaaccctaacaccaccccaggagaaaggatctcggcactggagacgactcgaaaacatagaaggggcttcaaaggaatggatggaaagggcaatttcaaattacttcttagaccaggcggctaatggtgaggctcggagacctctcagggaggctcaaaagatattacttgtaatttaaatgttgccttagaaggctaccttttagtaattgtctagaagaaattaacaatttcttttaagtttcttttgtcaaaaaaaaaa

SEQ ID NO: 195541 - DNA, 1008 bp, Cannabis indica
agcaacaatcagtttaagtagttaaaagatagaactaaaagtctacttttttttagtagggacaccaatttccaatttgtagatttgattagaaggtgcatattagcttaaatattagtttagatagattgactatttcatgaacactttgatataagtctaataagttaatttttatccgttgtagttgtaaacaagctcctagaattcgtaaagaagcaaagacataactaaagattaaattaattaagtataaccataacatatgattgtcaatatgctcaaattttctgacttatttattggagaagcaatgacctgtttgttagctctggaatcaacaattctttggaagcattcgtttgtgataactgagagtgatgattctgagacggtgatcaacactctaaaggaaatttgttccatttggggtattgataactatgtgtttcaatgtaaaaatctttcaaaccttttgattaattagttgtaacttttcgtttatttctagactatataattttgcgacttataatatgactaagtaagcttttgtcagcgatgtaactggtacgatcgattcgtcctccatactaaataaattataatgtaatgacacaccatgaggtctaccattgtctagttttaatatatctaagcattttattaaaaaaataaacaataacatatatatgattgtaaatagatagatcaaattatatatggaaaatgacgtttttataaaaataataaaaaaaatcaaattattagttctatccatttcttgtgattttttttttttcatagcatgtattattatgttaatggtagttaatcaactaatatttatccctctgtaaacaagaaaaataacttgaagatgtatatataattccttctatttattagtagaaaaaaaacgaaagaagaaaggtttaaactaataaattatatattaatcacgtacagacacatattatttaggtttgcttatgctatagtatgatc

SEQ ID NO: 195542 - DNA, 1720 bp, Cannabis indica
gttacaccagccaccctcaagctcttgaaaatatgacccaacccccatgttcccacaaccccacgacccatagatctgaaaccctaatagcccctaaatctaaatgaccctaaatgggcccccccgagtcatacgcctccaaaatgcaaaaactcaaattccacaactagagaacaaattcacaagatttgagaaacccaaacactgactggacaatacagacaagaaccctagatgttccaaaccagtgcactcaaaaacattcctccaaagaaaaaatagaccttaaaggaaagggaagaaaacatgactaatgtcgaaataggaaaggaagaaacttactttccgactagagccacatttaaaatcaagaacagtcaacgagccctaatcaaaataaaagcagagacgtgacaacaatatgaaaaatttaaaccctacatagttacgactggatatattaataatttcaccatgtaattatttttataaaaagaacaaatttcacacttagacaaatgtattaatcattagcttttacccattaattattagacaaagccaaaattgtgacattaacatgacatgcaagcaccgacatatattgaatataacaagtcggcaaagacaacttattaggcatatataattcatataattaatgtacacttttacctttttttccttcaactctcataataaataatgaacatttttcttcttgagaaataattaggaatactaaaaaataccagtgctatttaattattatctttctaattgttatattattatggtacaatttagttttagattccatataattcatttaataatttgaagagaatattgctaattaatcacaaagtgttatttatagatggtgctagataaatattgttattggacagtagtgtttaacactttctataggtgttactttacgattaattagcgatatttcctaaaagttattttttttttaaaattatttgagatctgatatttaattatactattaacggtatgacatcaaggaatgtgctaaacactaataataccttttagcatgtattgtgctaaatactactgatgcctaataacaagaatacttagtaacaatactcaaaactaataataatgaaataaagagtagtataatatctagctcgaagctatagctatagtagtgttggagcattaattactaaaaaaagaaaaaagaagtaaaccctaaccctaaccctaacccacccatgttacactgcatgactttttgcctcactagcattcaatttggtcacctactcacattaattatttctatattatttatctatatatttattataagattttatcagatacactatagccgttggatttgtttagagagttcaatctcaaccgctgatcatttgtttatatatataagtttcccatgcataaataataactatagatatataatcctttttcccaagattattatttctctttcaagaccaacctgtttttctcttgaaactttctggattgcattgaaaatattaatgtgtatatatatgttgagaaagtaaacgtttaagctggctgaaaattttgtctgatcagattgttcataataatatatttatgtatatttatttatgtataaatgactgcttttttgattcctaggtcaactgtgtagttattacaaatttatatatatatatat

SEQ ID NO: 195543 - DNA, 1092 bp, Cannabis indica
aggtacaatgatacactttgctggcatcactactcatctggtatctactcggttcaaacgagttatcattatgcaacgtctcttgaagatattaataacagctcaagctcgtcttcaacagatcagtggtggaagttcttttggtcactcatgttaccacaaaaaatcaaaaattttatctagcgtacttacaatgatgcgctcccctattgctactactttggtcagactaaaacggatgctacttgctctatctgcaaccaagtatgggaatctattggccatgctcttttcatttgcaagtatgcaagagcggtttggcgacacttaaatcgagttattgactagtccaattcgtccacgacacgcaagggagaatatctagttcatttgtctataatatacacatgtgctgaaatagaacacatctcttgcatcctttagttgatttggacagagagaaactgagtgatacatggacacaaagttaaaccagcaaaggacctggccatttttgcaggaaactatctgcataattttttatctgcacaagcaaagtacaactccaaaactagcgcaccagcacaaccactttcttcagatgctaaacctgtctcttggtcacctccaatgcttggaaatctcaagttaaatgttgatgcagcagttgattcaacaaaaaaagtaactggcgtggggactactattcgtgactcctttggcaatgtaaaaactgccctttcaaaaccaatcattggtaactttgtggctcacgaaatggaggcattggcgatgtttcataacttaaattgggacttcaacttcattagccaattattcaagtggaaatggatgctctatgagtctccaacgttttatgcaaactttgatctccaattttttctttctaagatttaattgtagatattgatagttttgtatcctttcttcttaatgtgaatataactcatgtcaaacgtacagttaaggctactcagaagttaacaaaatttagtttagggtggatgaaacttgcttttgattgaattgtatctctccacctataaattttgttgttgtaaataatttacc

SEQ ID NO: 195544 - DNA, 779 bp, Cannabis indica
  modified_base (42)..(42): a, c, t, g, unknown or other
ctttttttttttttgaatttttaatgtcttttttttttaaanctcagaattaaagtttacttgaataatgcagaaaaatcgatgataacacatataaagatagtacatggcaaataagattctggcttgaattgagggatgtgacccaaatctatacactgcgtattgcccttgccactgcacacatttccgaattacaggtatgtcatatattattaactactactacatttttttatacatgttttaacaagtgaaccagatatttatgtgaggggaaacttaatttttggtaaaatatagaaaaaagaacaaaaaaaatgttttaatgatgtatttaatcatgatgatatcaggaaaacttatttcttttaattgattttttggctaaaaaaatgattattaacgatacatttgcaatagtgtgggaaaacattgatgttttaacgattcatttgggatggtctgcgatagtttgataaattttggcgacaagacataaaaatcaagttttcttgacactatcacaatatatgaatgaatcgttaaacatcgttttgtaacaaaaaatcatatctttttggtactattgcaagtgcatcgttaaataattttttctcttttaccaaaaatcaagttttccttgcaccatcacaaatgcattgtttgttagacctcttttgtgccaaatttaagtttttgtgacatctattgcaaatgcattgtcaggtatcactttttctatatttcagagttcgaaatcttcaaaaaaagaaaaa

SEQ ID NO: 195545 - DNA, 1436 bp, Cannabis indica
catatatacatacatatatgtacacatatatagttgggtatcacaaaggatagggtcgaccaccaccatcagccacctggtcggcggtggccatggtggccacgaggaagaggaaacgcacgagaggagcaaccaggggtcaagaattgaatagacccgaacgggtcaagtggacgttgtatgtcctgccatgaacggacagtggtgcaccgtcgtgcatggggcagtggtcgaaccaccttggcccctctcgggactcacgtccctttgcatgcatgttaacccatgcatacatcaaccctaggttgactcctccctagcgaagcatgggcacgatacccaatgcttttttgcatggtcggggttcctccacgaacccgagctcacatgcatgtgatgttttcgatatgcatagccagattttaagattagaaactaagctcacatgcaatgaacattacaactaataatttttacgtaaaatttaatttaaaaaataaattacataaaaattcctatgccctaattggcttacattattttctaaaaaataatagcaataaaacctacacccaattatactatataattaatgatttttcacctctcatagattcacaataaaataccatccattcacatacatattacatatatataaatgtataaaacccacacaacatttaatgtatacacattcatggaactgctctaataccaattgttagttttatggtactaaatcaagtatacaacggaagagttttgtattatccgattatcagtgtaccatagcccctagaatttacatatgtgttggctatttttggaagttgaattttggtcggaagaaaaaaagagtttttccaatattatacttaaaattaattttatttataaaaatacatacaacaaaattatttgcacaaatactgatgtgccacgtcagcacaaatactgaaatctaaaataattaccgaaaataaaaaaaaacttgaaaaatcttgcttttagaatttttttttttgaacaagaaaaggatctttattcaaaacaaacaaggatacataacaaactcaaacaacaatagaacaaccagccaacactaccaattattgattacattaattatatagctattaaatttctttttttccccgctgctacagcttagtatctaagcttaacaactaatctaatctctctactaacataagctgcagaattacatttcatctcatatttacagcaattttgattaatccaaacaaagtataaagttgccaaaacaacaacatttaacaccttatcctacgcttctcgaaattttactgttttgctttaaaggttttttttttttttttttttttatttttttttaaagtcaagtttttagttactttgtatgtaattaatatatcaattaattaatttta

SEQ ID NO: 195546 - DNA, 2930 bp, Cannabis indica
tatattgtaaagaaaaagaatgaagggctgtgattgtttagggagaagatcttgagcgttgaatttttgggcatagacatagtgttccatatgggcggctgaggttgtcccattgttgtccccccaaaagataggcaagtcgcctcaatgctgctgctcttgttgccgacacatcacccttaattgccctttctccataattcatgcattcaaatttaataataaaaataacaaataatattctaattctattattatttaataaacactaccttccccttattctttataattaataattcattatctataaaaactatatataatatacacccttgtattcccaccttccaaacattattattgttgtataaatatatatataaatcttcaaactctaagaaatatttaacaaaacaaagaaagaaaaaatctcaagagaagaatgaaaatggaaagtggaatggtttatgagaatgatctgatcaaccttaaggcaaccgagctgagattgggtttgcctggtacagatcgtgaaactgagattactcatcatcatggtaaagctttgtcatcctcatcatctggtattggcaagaaacgacatagttctgatattgatcatgctgctactgctgatcaagaagatgatcaatctgctcctcctcctgcaaagtatgtatatataatatatatatataaatatatataatgatgattttcttattatgatcatgaacaacgtctaattaaatgtattacttaattatgacagaacacagattgtggggtggcctccaatccgagcttacaggaaaaacagtcttattattaatcaacaacagaataataaagataatactaagaagaacaagaaaagtagtaatactaatggtaatgatcaaggttcatcatcggatcatcagaatatgatgacgattggtgggatatttgtaaaagttagcatggatggagctccttatctgagaaagattgatctttcggtttataaagcttacccacaactcttaaaggccttagaagacatgttcaagttcactgtgggtcaatattctgagagagaaggctataaaggctctgattttgtaccaacttatgaggacaaagatggtgattggatgctagttggagatgtaccttgggagtaagttatactcttaatttattaccttcttaattaattaatttattattatttgaagttgttttacttatatcattattcttgtgattatgtttcagaatgtttatgtcatcatgcaagaaattgagaatcatgaaagagtcagaagcaagagggttggggtgtggtgtatgaaaaacattgaaagaatagaaagaaaaaaaaaacgaaacccacagaagtagtgatcgatattattattctcttgattagaaaaaagagaagatcatcatcatctgatcacggcctgggttttcgaaacaaggaaaagaagtacaacaaaagagagctagagaaggaggaggaaaaaaatgagtttcagagaaagaaaaaatttattgtgttaatgtaaattgttttcacacccaatgatcatatgatcatataatattggttttgtgatgattatccaatcaaaccagagttgacctgagctgagatatctgagaagacttttaaatttatgagatcaatagtgcatgtataaattaaattaaaaaggaagatcaggtaggcaagaaagaaagaaacaaattagaactgatcgtatgtgtcattgtttttattttttcaagtttttggttgtgtttcaaaatatatattgtgaatttgtaatcatatatattataccaaactataagcttttgcaatttagttttgtgtgtgtgattgaacttggccaagaaatttgatgttctaatcatgtgaatatttatatatgttcttttatttcattattattattattgagttaataagttttttatttttttaaaattataggactgtgtgatgagttatatcttaagtaagcttataatttcgtcattaatgaattagagatacatagtgccttagccaaaattttagttgtggaagtatattttaaaacttatcaagtttatttggaaatagctggagaggaaagaaatacatatataaaagcactcattaaacaaacatatgtagttgtaattaagttcttttagggtcaaaagatgtctcattaatttgtaggtttgatctaattttagctcagcattttcaaatatacagaaacacatcaagtaataaataactgtatgttgatggaaaaattaacctttcaaaaagttcatatatataaaaattgtctatatagagatatcttaacaatcttgagttctatatcatatgttaatattaatttatatcataatagatttaacatacaaatatctagtcttctcatataataatccatccaaaaaataataatttttaaggaaatgatatccaaactccaaagcaacaaaaataagatagatacatgctaggcataactaatgttgcctaacttttatcattaagtcacaaaaagtaaggataaagtggtcatatacatgaactatttttgaagtccttcccattcaaactcataatcctatttttatttattgagtaaaacaagggtgttatgatgcagatattatcacaagaaataacctagctcatcaacttaataataataataataataataataataataataataataatatgtttgtttgtttatgtacataaacacaacaatcaacaattttagacttgtaccaatcatgtctttgacttttcaggtccgttaaattttttcttgaattattgagattgttagatttaggattttgtctaatttcattcattttactatttcaatgattattatgtacaaataatgctctcc

SEQ ID NO: 195547 - DNA, 942 bp, Cannabis indica
gttgtcgttcttttactgtttgttattcttgctattctttaaatgcttgtactgatacgtgttcttatgaattgtcttaatttttattcttttttacattgagggaggaagattcgaacttaggacctactctttacgaagaaaagtgtaaaaccactagtaggctaagcctgtaaccatagttctcttaagattagtggttttcttttaaagttatgattatctcttttaactctattttatcttatctatgttgattttttcattcattgagttgtggtatgacttgttctgtcttaatattttttctattttattttggcacatctctctatcctgatcccttccaaatgaaaaaaaaaaaaagaaaaaaaaatcaaatttaggaagaattatttatttatttttttatagggactcaagatgatttttttttttttaagggtattcaagaagaagttgaaccggtaaataatttcacctgtttttttatttgatgttgattaaagtataaattaagtgcttttttgtgtgtgtgtgtgtgtgaaatagaagtaaaaattaagtgttaggagtaaatttatatcactcgtattctaacgttacctaattaattctgagtaatagtaagtacacatcgttagatcatggtgaattggtgattgcaataatggacatgaaatcgatcaataaaagagttattgctttaaaagtaggagcacttgtgtattacgtactcatcatacttaatccttcaagtttaaattttggcggaattttttttaaaattattaataaatttaagttgttatttggttaactgtcactctacattacttgtgtgtttatttttatatacgtgatacgtttatattagtacatttaatattattactttaaaataatttcaaaatccatcattttaaaattaaattaaataat

SEQ ID NO: 195548 - DNA, 1388 bp, Cannabis indica
atgtatgatattatgtaaatgcttgatgtaatataaagaaatttgagtttgggtaaattttaaaaaataaaataaactaactgatgtgacgatgggagtgctctaaagatatatataaagtttactattaccgagatgaaaatatctcttacccgattaaactatcaaccactccacatgcattatatatgagaaagctggctacacttggatgtaaagaagatactgttgataaaaattaagaagtagctaaaaaatagataaaaagaaaaagacaggaagtctcccttctctattctatattgtactgagatttactaaataggtattttcattgagatgggtatcctgactctttgactaaagaccctctagaatgtagatcctcttcccttggtgggtttggtttaaaaatattaaaatatagaaaatgaggttaattatatattgtagataggaactaacttcagctcagaggtccctcatcgtatggcctgaccggctttgttcccacaatcatgcttctcttcattaaaaatatttatatgaattttttatttataatgttttgttaaaagagagaagaaaccaagaagtaagagcatacacagatagatatgctctctgtttttcaatttatttataattaatatgtatatgtaatgtcttgaattaaattgaattgaagcatgttgtccttacttgttaccctaactgtaatgggcatcaaatttggacatcaatatttttatggttttcatctccttttgtcgcccttggagggctcaatttctgaccactaggattggaggagccgattcatgttgaaatatgattaattttatttataaataaataaacatttgtatttttattttctttttttatttatgcatctgaaccagtgatctccagtcaaatttttctgaatccccataaagttgtttgctaaaaactaatctccaatacgtggattgacacattcctttttcttctatttattacaacaaattaatgatggagatgagggaaatgtttattgggagtgcactgtacacatatttttgtttaataagtcactgtacacatacatatttaagagtaagcaaagaaagttggaaaagaaaatctccgttgtatgacaagatttcaaaaatatttaactgtcagccagcctcccaaaaaaaattagagattttttcaaagggatacgtaaaatataatataatgacaaaaataactgaacaaatcttaattataataatattttgtcacgtcattaaaaaatactttaattctaaaataatatgcttgaataaaactaattttgattttttttttttttggataattatataaaacaccatttttttataaaaaattacatt

SEQ ID NO: 195549 - DNA, 2211 bp, Cannabis indica
tatcttgtttttatgtttatttggaattacattgtactattattttcttcttcttcttcttcttcttcttattattattattattatcttaatgggtctactcaatgtgaatttcgctgtcctgatctaattgattaagtggagccgggacgggaatggggcataaatgagaaatggaaacggagttcgaagctgcacctttatcacccactcaatttccatccttagttaaaatattgggttttagtcctagttagctttagatgaacccaaaaaaaaaaaaagaaaacaaaaaaaaagcaagtataactagaaataacattttaaaggacgtgtattaaaagtttgtgtaaattttttgtgttaacaaatatacatgtatatagtttgtacaattagctttataattcatatttcagaaggcaaactaaaactatgtatatacattggtagttgtaattttaccatatgtgaagaattgtcaatataattaatttgtactcttccagtcatccataaagttacaggccccattttgtagcattgtgaagtcaatctattctacatgttcttcctttttctttttcttttttttggatatgaccaagatatattatttaacgaggggtggcaatttttatttatattatttattttttaaatttgtaaggaagctaagttttttatcattattattatatatattaaaaaagaaaggtgctattttattttgtttagaaaacactttatcttattataaaaaaaaatgtagagagtagaggaacttcattagtttcctaatcctcaggtggcaaatttcctttcattgtagtcatcacaatggttcacttttaagacttgaatctaacctgctttggcactggattcattggtgtggttatagagataatctaattattatataagttgataacgatgcctggcggtatactctaatccattttccatatttgatgtgtaattactaattcgtatataaattttgaataatcaaccaatattacaatatataaatatgtatatactttagcatacgcatataccgacacaatttaagttaaacacgataatacgactcaaaatccacacgaaataaacagatttatatttcccttaaatgagtttaggtcattttaagttgatatggctaacccatttattaaacatgtcatttcggattgatagagctaacccatttattaaattggtcattttcgagttgacacgcttcactcgaaaataatatgataaagacttatttaagaatatgtactcttaaatttattatatttattatatgtgtaaaatcatatttttctagtaaaatagaacataaacatattaattgctcataaatatttcataacaagattgtacacatattgaatttatgagtgttaattacaaccacatattatagcatttagttaaccacatataatagcattttggaattttttttttcaaatttttttagcagtatttgttatagatataatattatccctgtaaacttttgaagaattctaaatggtttacaatatcgataatagagttcttgatatactaatatagcacgcatgttaaaaaaatttcaaacatatccttggtacggtaaactattccaaattttttaaaaatttacatgttgtaattataaagaacaccgccatgaaaaaagttttgaaaaaacatattccatgtattttcgatcacgaaaattgcaataaaaggttaaaggtaacattcttttaaatgtattataaacatgttaatgaattgataagttaattaaaattaagggttcttacaaaaatattagattttgagctaaaatttataattttactgtcacatagaatttttataaaaatattttttttataaaaacaacaaaataaaacaattcaaataataacagtagaacaactaaaaaataactgtagaacaaccctgaaaatttaacacagtataaaacttagacaatattcttttaaacaaaaaaaaaaaaaaattaaattaaattaaaatttcaaatattaagtagtaaaaacccttaaaaattaaacaatgattttatataaacagaataaacaagttggatcagatctaccctttataaataaattggcttgagtttattttaactacattaataaataagtcggatttgaattttactattgtctg

SEQ ID NO: 195550 - DNA, 1727 bp, Cannabis indica
gatgatgatctgcaaaagctgtggcagagtgtgaggggagcacgtgttttggtgatgagagggtttggcagcccatgtgcatgcctttgctacccaattacaccttataattacttattaattaccttcaattaatggccaacaatgccaacctaattccgctgcttttctcctctcttctcttcccaactaaactttctattttctttcccacctaatatatacattacacatatatttggatgtttatttctactacaaatcattccaaaatataatattgtatatactccgcattctattgaaaatattcgacatcatcattttatatataaaaaatatatattggtttgataaaaaaaatacctcaaatagttttttaactacgtagttattattttcggacactattttgttgtttgattcacattctaaagttcttagtaaaacgctataattaagatcgatgcgcgcgcacatatgtttgacaataagtttagattctttttatattagatttacatatatattatttatatattttatgtatagatttcacacataattttttgattatttactatataattgatgttgctatatagttgtttaataatgaatgtacacactacatttacttgtacctgcatgttcagatgggaattgttcaaaaaaacaaagttgaaaaaagaagatgatccacgttgacatatatggattggtgtgtgagaagttaagagagttattaattagtatataataaaatattcaaagtacgtacaaacagaaaaaaaaatgaagcatattatgataaatattatcaggcagattttgttatttattaattctaattaacttcgagtggacagatgtctcaatagcattagcaaataatatattgattagaacgacttctgactagaatatcaggtacttattaacgatcatttatgtttattattatattaacaaaaatatgaatgattttcatatttttaaagctagcccattatgtaggatattcatgtattattatatcgttaaaccatcttcttcccacaactaaattaatggtctctgtgacaaataatttatcaattaaaatacactaattaatcataagagcactcgtttgtttaatgaattaataaattaattaatgatgttttttggcatacataagataattacttacaaagtacccaaccatatgagtatgtataaaataataaataattaattaacaagttgactatacactagtgttaatatatatgtatagcattaattacatattaattggttagttaagaatgtgaaagcactatcaatggccaaatcttgaataattaccgaaaagaaagagaggagataattacccttaaaatataaataataaacgtgtgttgtttgaaagaaactttacatttttggcttacgattttctctcattcaaatattattaatataatgtttaaatttaaaaatattaataacaaatatttatgacgtatatatctactacatatatatgtatactgtatcagtatatgttaaacttgtatgttgtacattttctaaaaaaacttgtatgttagtaattgtataattaatttgtatttgtttgtttttggctatgtgggaaatgagaaaccgaaagttttattagtcacgccgccacatcaatgaaaaggctatatattacctatatatataatataaatata

SEQ ID NO: 195551 - DNA, 1079 bp, Cannabis indica
tgtgtgtataactatgtattaaatatctaatcaagaattaatacaactgaataaacggaaaagagagaaaagtcgtgattttgccaatgcatgttcttacaaaatttaaaatcatcaatttgcgcaaaacttggatactctcttaggccctatacatgtcttaattgcactttatatccttataaaacaaaaattcatatcccacgtgagattccatctatttcatacactaagacattctcttatttaatccattcaccttataaaaaagttccaacaatacatatcacctagttaaatagaccttaattaaaatcatctcatgtgaaataaataaaactaagttttaactccggataccgaactagttcctcttacaacttagagcacagtatataatataggtacaaatgtaaaaacaagatatatatagctaagaggtaagagctagcactcttaatagcttctttattcaaatacctcaccaaaattttatttttttattttaccaaacacatttacattacacatacattatttttatatttttttttctatatgatttaaataatataattataataaacaaaataataaaattatatattatataatatttatttatttttacactttaaataaacaaaatatattataaaaaattataacttagcactaaaactaataaatttcttagctacatttagctaagcgaggtaaattattaaactattttagctcattttattaaaaatatttttttaacttttaattttaattattgttagctataatttaatttgtatgtagttattgtgactgcttcaaaataaagtgattaaaatactcatctaacatgagctattattgctcaaaaattacctaattaatagtgcttagccaagtgtttttaaaacatgcttaagttttagtgcatcatattagctataactacttttaatggttacaataaaaatgtaactatggtggttacattttttttatgacctaatataacaggtcattaacaaataaaaattttatttttagactttcattaattatatacttaaataaat

SEQ ID NO: 195552 - DNA, 4027 bp, Cannabis indica
tagtattaaaaaaattatttggagtttaattttaacactataaattattaagaaaaaaatctaatatttaacctttccctcctattaacattttgtaattaacccttcatttttttttatatataaaaggaaaatagacttgtaaattttatatattatataaaaaaggaaataaacttgtatattttaaaattattaaaatttatatattatacacctttgattaataattagctagtatatacacataataataattaataatatctctaaaaaatgaataatatataattaaggaattaattaaccatagtatcatcgatcacactaaacataatatacactattaattaattaattaattaaccttgccaaggttgattatttttctgatgattattattatgaagatgatgatgatcaagtccaactatgttgaaaatatctctatgggagaattttctcaaccccaaaaaatctctagtcaacccatcattattattaccaccaccactactaccagacggtggcggtggaagttgttgtggcggcggagagaaagaactcatcatcatcatgtcatcataatcattcccaacaaaattaataaactgctcatcatcatgattatgatcgtaatcatgaagatgagcagtattactactgctgcttatggtggaccccatctgagcagccttttgtagtaaagcagtagccgatgatgatggtggtaacggttgaggctgtggcggcggtagttgcatgttgagtagtagtgaagcggtattattattattagaagaagagaacattaagggttgttgtggcggcagaggaagaggaggggtcaaccacgacggtatggccatgatgtcttggaattctcttttgatggtggggccgccttggttatggtggcggaagtggtggttgactagtggcagtggtggtggattggtagtagtactttcttgagctaaagcatcacaaaaagctctatgggttatgaaactgtcccttctgtgtttgttttccatgcaaaacaacaaaaataaaaataaaaaaaattaaccccattattataaatatataatgcaattccacctatacatatatatagatatataatattgttggtattaatattatagaatttatagtgtgatcacatgtcatgcaatatagctttttgtttttttattccaattcgaaagtggtaataaatctaaacttaagaatatataatgtacatctatatatgtatagggtgatcacatatatatatattacaaatataatcttagctagtgtgatcacatgttgtcatgcaataactttttgttcttttctttcaaaagagagacacacatatatatagctatatatatatatttgtatgtatatatcatgtgaatatttataagtacaagtactcttcaaactagtgagaaatattttctatatatgtagtgagtgtggttatggtaaatttttttctactttataataacatatatattctcttctttcacatatcattatatcattattatatttatatatttatatatatatatatatataatattttgttacctagagaatagggttccacaatcacatctatactctttagtaccacaaatcttggaatgagctttccaatctgactgaacagcataacgtttagaacatttctcacatttccatttcttctcaccatgttttctaaagaaatgcttcttaataccagtgagatctccaagtgccctagatgggtcatgatgaacacatgaaatttctggacaaacataaactttcttctttatcacatctttgtttgattcttgttttagcttccatggtagattatgtcctctttcatggagttgaagattttgatctctttgaaaccctttcttacatatctcgcatacaaatctattggttgctagtagggttttcggagataaagctacaacttctgcttctggatctggttaaagaaattatatcattattagtacaataaaatatatagaaaaattctatatcagaatcgtagattacagacttattaataaatggtcaggattgtactttactgataaccgaaaaaatgccctaaattcgtatacctggatttcctggatgtatttcggttttttcttgtttagaggaggaggaggcggcgaaagtggtaactcttgatgatttgttgatgttgaagagttttgagggtacatggtaatggtggtggtggtgcctaataaagattgatcatttcttgtagtagtacttgaagaagaagcacttactatttcactagatgatgcaaaagtcaaattggatatgttatcatctaccatcatcaaaccctttatcattttaattgttatattgtgtttaaaatcacatcatacaaatactatgtatgagatatatatatatatatatatatataatatatatcatgattccattatgagtggtgcaagaagtagaaaccctaattaaaatcttttatttattgtttttgttgagtctccaagtagagagctagaaatgttcttgaagactactatatatataaaccttcaaaatcaaaaaagaaaaaagaaaaaaaaaacatggagaaaaagttagaagaaggaagagtataaaaattgaccaaaaaaataaaagacaaatttttgtttataacatatatataaagaacttataaattattcaatatatatattcaaaccatggattattatagaaaacaaaccttgtattgttgccattattatcccaacaacaaaatcatcaccatgaatttctatgagagaatctaatagtaaaccctatatagatagagcttttgtatatatgagagaggagagagagagagaggagagagagagagatgtggatgagaattggagatttcttaaaacatcttctttcattttacaccacagaggctataagcaatttggccaaagatgatgatgttcactttctgtcttttcctttgttattttctttacaacttaataattattttccaaatatatatataatatataaatatatataatcattctaatcaaataattgatatgtaaaacacttgcatatgtagaactgatcttgtgtttttaaatttaattattgatgtggaaagtatatatttatatatatggaaaaatattgtagtacacacctttaggacaagatatatatctccaatgataaaatttaaatttagtgttaaattaatattaaaagattataattttagcactatttttttattttaactacattactaaaatttacactaaaaaatagtctttattattatattattttattaaattatctcacattataatataatatatatacgtttaatcataaatatattattttaatattaaaaactaaaaaaaataaaattagtgtagtctacttagtgggacactgtaaactcttatatatataggatagcgattagagttctatttaaacaattttgtgttcaaatcgctactatttttgggattttaccgttctattagagaagttcttaaagaggtattttagtgtgttttttagtttagtttttttcttcaaaataatgtacattattataattatttaaaattacatataaatttttgaaaagttttgaattaatttacactgtagaaataaagttcaaatagttacttatctttcggtactttaaacagttttgaattttttttaaaaaatttacatgtaaccctaactaaataaatataaggaagtatatatatgatcataaaaataattaaaccaaaaaaactcttataaataccgaactaattaatgtaaagtctaccaaattaaacttttccctataaatataataatttaaatatcatgatatatgaaagcaactttgtgatatatggcattaaaaataaaaagtagtatgaaaaaagcaaattgaagtaacaataatagtattataaaaagcaagagagatttcatt

SEQ ID NO: 195553 - DNA, 860 bp, Cannabis indica
aaaaatttgctcattttcttaaatttatcctcaatcgcaatttcctcatatccaaacaaaaatagcgttacagtatttttactcataagctcatagtattagattgtaaatgattttaattttaaatttgaaattcgggcatgattttaaatagctatctagatcatggaaaatttctaaattacatctataacaacgcataatttgatactggaccataataatttcgacgggtttttgagtttgaagtttgaattttaacagcaaatccaattgaaaatttgaaattgtgtaaatgcatataaaaaaaaaataaaccctgtttcaaaatctacaaaattcaataattcaaacacattattataataacaacaaataccaaataaacctagcaaaacccaaagatcagaacgaaccggtcgcgcgaactcgatcttaatgggattcccacgaagaagtgtcccttgcagagcgtccttggcagccttagcgtctccatgcgcttaaaaacagaaacgcatagctccgtgacgagtatgatgtgacgctgtcgagcgctccgtactgagcaaaaaggtccatgagatcggagtcggtgacatcgctagccaagttccctacccaaagattattagaggggttctcggaatcatcctgcttactcgatttcatcggaggcgccattagcaaccaaaacctaggtaataaaaagatgtggctaacaattagggttagggttttggagaattaggagtatgagagaggcaaaatcataataaagaaagagaaagggttgaggatattgtggggcactcagagagagagagagagagaggagagaggaggagagacgtcgtata

SEQ ID NO: 195554 - DNA, 2245 bp, Cannabis indica
gaagacctcttccttcactacaagtgaccgggtttcccccaactttatctgactgaaggagaaccgaattcaagtcgcctattatcatccaaggatctctcacatcattcatttgactagagaagtccccccaaaaagcatccctcacatcacgtctaggaggagcgtaaacaaaggccccgacccaggcagccccattcctgtccgccccaaccttggcaataatcctattgccatccataaagagaatattgatattccaccctcccctccaccacagcgccagccctccagccgctccgatggcagagacagacacacctcccgcaaaaccaaaacgcctgctcaatatccccatttcttggcttgatttctttgtctccattagaaagactacatcaggattcacgttgcgaatcaagctgcgcaacgaatccactgcccgaggcttgccaagcccccgatagttccacgaaagaactaacattgggggtggggggcttgataaggcccgcctcctcggccttgggaaaaatccgaaattccctgagtctcttccagatattcagcctcgatcgattcctccgggccagtagcgcccaaatcagttcccagttcatcagtctgtccttccaaactcttatgcacttcccctttatgaacacatggtttcttgccattcccctcgtactccaatccagaaaaggggcaaagttctcgtggtgcggactccacttcaaggagcctgcgtttctttgggcctgaggacttttcacccccagagaacaaacgggtcctggcccgtatcttcccagactgtttaattaaggatctagtcatgggcctggcttgcttctgggcccccttttcattgattcccagggcccctttgaagaccatagccaggtgagagaccttattatccataacttcactcggcccagcccccaccagcccagtcgacttcagcattgtgggtccagcacatgattctatatcccttttcgaattcaggagggaattttgcacgttttccaacacgtcaccaaccatcgtaccttcctcatgcaaagggctcacaccactcctcccctcgattcgttcctccgtactctgtcctttgcacggaacgtcattttgcatggacaaatctgcccctggctcctctaccggaggatccaccggagcctccacaccttccccggcagccaccaaaccccgagcctcttcccgtgaggcctccctgtgtatttcagtgcctcggagggccggttcaaaaccatccccagtctccaacgcgaggcgtcttaactcctcctggttattgaccgccacctcttctctctccagccgttctctttcatagagagcatactccgagaagcagtctttgattctcgaccctagccgaacccaaggtccatacatttggaccgtccttccgaagtcatctgctatcatcctgcgctccctccgacaacgttcctcttcgtgacccacgactccgcatttatagcagacttgcggtagattctcgtacttaaaatagcaccaaagactcaccccttccggcatagggagaaaaagccccaccagcaacggcttgcgcagttgaatcgtgaccttgaacctgatatattcctgggtagggaacccgttcctccacatgcggtcaatactagcatccgtcccaatacgttcagcaatggctagcgcatttttcatagaccaaaatcttggaggcagttcataaaccctcacccacacttgggatatgtagaaatccacctgtctccaatggccatcctcaggcataggcttcaccatcatgaatccatcgcacaccctccacggggtgttagcaactgcaagctcagcttcgtgcctcttggaaaaccgaatgataaaagtattagccgccacctcttcgattttccaccccttctccagtctccattttcttgccaaaaccgccctgagtaaacccaggaaaatgaccttcttagtgatcagccgaaccaccactgacctctgaatcacatcctttcccagctcctcattagcctccagagagatcgagagatccttgataccactgatgacagattcttccataacctctttgcctttacttgccataactaggaacagaaagacactcgggaaagcagcacagaaactacacacaaaagagtatacaaaagatacagggttgacagaaaaccctacgaccacagcagggtcg

SEQ ID NO: 195555 - DNA, 741 bp, Cannabis indica
ttctttagggttacattaatggcttcatgaacccagttaacattggccataggatacatggaccttagacttcgatttcggttatttccaaataaccgaaatccaaaagtctacgatttctcttttgttattttgagtttcaattttcttaatataacttaaaatatatgttaacaactaaataaatgtgatgagacacacatttggaagctatgtttttacttttattattatttattatcatttgaaatgtataattgttgttgttattttttaattaaattattattattattattgaaaaagtttagctaataaaatataaaattgtagtagctagtgtatctctttttctaatctaatattgttacattcgatatttttggtgttttatttttttattaatattttattcagttataatataacctatcatgtaaaaaaaacaatgaagtgaagtagtaagaagtgaaaagaaagagcatcataattagggttctaccaaaccccataacgtgaaagccggggactcatgtgctcctgtcaaacccttctccctacctacctatatacctatatctaactagctatatatatatttatatatatatatagctctacccacctttctccatctaattaattaattttgtttattgtatttcttacaatctttcattaacaatttatagtatatactatattcatgtggtgtcgtgctttctgtctcaaatttaggaa

SEQ ID NO: 195556 - DNA, 1029 bp, Cannabis indica
atatatatatatatatatctaccagtttatacgcattcctgcaagtagtgtttgggttttgaggagctctactgtccaatcaattgtatgaatttttgcaatcacggctgaagtaactagccttgcgtgcctgtataacttctcctcactcaaatgtggatattccttctacaataatgatataattatgtaacaataattaatattaattaaggataaaaagtaaaactaattacgtactagaataatatatacaatatttattaacaaatactaaagacgaaatattatgaaactaaattatattgggcacataatagtgcatattattttatgcactaccatatatggtcgtagtgaacatcctgcattttttttgtaaatttcttaagatataaaaaaaaaagcttctactttcataaaaaagtgaaaaataaatgaaagattaggttctacttctttagtaccaccatttatgcttaatatttttttggacactattttccatctctttaagttattcaagagcatctggaaaatataacctactttataaaaaaaaaatcctcctatgtttttattatttttcaataaatatttaatgaataacaatttatgagctttagatttttttttggttttatgctgtatctaaagtacggaaatggccttgggtaattcctgggtttggaaactattgggcttatttaacaaaactacaatttttttattagattaactgaaattttcaattttcttatttttacactgtgaggcagaatattttttaaaaaattgtgcaagttataaaagtagtgaggctctgttttgttagttgctctaactaactacttgtcagttgcatctactgtatattgtaactaactcttccctttcttgatcaatatataagtggctaagctcatctcttttgagtgagcctttttcatcattttcactgcctttttcatcattttcacttcttcatctctgtattcgttggtgaaatgtaaaagtttaatgtaaaat

SEQ ID NO: 195557 - DNA, 2255 bp, Cannabis indica
ttttttgagctttctcacagaggctctcaatgaaagcaccaaactgttaacacagatttttgttaactaaatttgagcctcacaatattgattttacacagaaaaataaaagctataaaataaagctcttgtatgtattttttcatcccttttttttcctcttgtttgtcactatttataattacatagtggatagttaattacaaagttgaccggaatacgtttacaataatcattcctaaaatcgtgggatttgattacatatcacgtaacgtaaatgcggtttatgatttggaaatggtatagctgtgattttctcacttttactgggtcaaaataatcgtgtactaaacacatctttaactattgtatttggagatgtctcgatagaaacttggttacagtgatcccaatagcgagttgggggccattcttctttccaaggtcgacaatgtatgtctggtatcgatcgtggttcttatttacaaagaaacattctgactcaccaaggttgtaagcctcgttaccattagctagatgaagctattggaagtcttcacatagcgagatggtcacctcgcttacttgttcttgagcagatctaacttttacacctagtttgtttattgtacgctaagcatctccatgattgatacaggttgctttctatggtgcctcgctattcgcatttagagacatatggtttctcgctaatatactaagtgccagtttgtacattgattcctcgcctaagaccttacagtcagctggttaccaatatactctaatacttacgtaattaatgagttattccataaaagcaatggcatcaatttacattccctttatcttgacacgtgtccttcattgaggtggcagccgaactttgggtataacattgatatttagggtatttcctaacttttgttaccaatagggagactttgagttttgagtttagtacctagaatagattaggtcaagttgttgatcaatttacagttatgacatacggccaagatcgttgagcatttctccactcgtgtttgctggcatgcatgagtttagattaaagataagagaattacatgcctaccacatcgcatgtcaaaatatgataagattattatcgtctacaaatttattattattgagtataagatacggtaattaacgtttttaaagaaagagttattactctatactacaactattattatgtttcttacttgtcggttaactcattaggtaacgacaataacattggatgcctccgtaggcttattagggtttctttatgaggtaacaatgggaatggttactttataaagcaacagtaatagcttgtcttattagaaaaatacctgaacaatattatatgcttctatattgcaattatttatgttagttattttctagtatattgatttatttgagtaagtagtatttgattatggtttcatgcttatgttcaattattattcgtacataaatgttcgttattatgctttgttttttttttgctcagtctttgtgactcatgggtgatatgttgtgtaggtaggggttagtgaatgtttaggtagtcatgagtcaaggatcttcttcaacgaatatacatatcagtcgagtcggcaagtggagccgtgttgtcaggattcatatttttcaatgttcttaattttaaaatgtaatctcttgaagtaatgtaatgccatcttttgtaatattttaaaaggggtatctcagacatagaagagttaaatcacaagttttacttaaattgtttgtttattattataaactaattaataaatgcacagacgtggcgaccctagggttcagggtgttacaataagggaacaaatatttgatccttttggaaagcttagattctactattgtataacatgttcccaaccactcatgttattaagctaccaaaataaaagttgtaagaatcctcttctctgagaaactttaacgaataaatcaaagaacgcaatgaacacaaataggagttcatctatactcaagattcatgatgatctactaatgatcatcattgtgatatgaataactctttcatggaaaatgacacgttaataaaaaatagcacatttactacatttttgttcatttatgtgtttttaatctaaatcacacatactacaagtatagtgtatagtaaattatacttagttgttccatattaaagatcccaatacttttatacactaccgacttgttttatt

SEQ ID NO: 195558 - DNA, 1198 bp, Cannabis indica
ttttgtgttttttttttatttattttttattttctacactttttcttttttacattttcctttttttttccgtcactaacatagccttaagcattttcgtgtgaatttttcattatgaaagattgaggaaggtggttgtggataaaaatattgccttggaagagcagttagtgttaataattttttctgtttatttatttaggtttgcagcctgcgacatttaggctgaaaatttactgttaagaaatgcatcctgttagacttaccaaatgattggagttgtatacatgaatgacatatttactttgttacttcttgtagatctcttagaccacgcccaacagatgaaacactctcaaggcattctattttaggaccaaatgggcttaatgggcggtggcaacctcctataactgacaaaggggtatgatgatatttaactatatcttttagtttgatgcaaaatttaagttaactttttccctatgaatgtagattcggtatccaagcatgatagacctgagtcctgtcgaaatcctaaggtttggtactaaaattctgtccaacatcttcttttaatatggaactcaagttagtttgcttgagtaacatggatgcatattaatctaagcctacaaaaacacacaaactaattttgtttccatgatttgatgctgattttgctatgttgatttacctttctaattcctgggaggccagccaacaacctgtagaacaggagcccacagttaacaaaaacaataaccaatcagaacatgaaagactactcgtggagttatttcatacacagagtagtgatgttcagaagacgagtcaagatgaggattccctaatttcatttgaaacacaagaagctcctgcacatgtagaaattatcaggcagccttctccgccacctgtacttgctgaagtacaagatttgattccagctgtctcacctcaagtttctgaagttgactctggagtagattcacttatgacagatgaattaattcgcgctgaaacacccctacaattacacattgtgagattctgaagtatctttttaattattagtggtcttttcatgggtgttattgcatatggtggtacaagtataattctataataaatagaaagctgctagtacaagacaaaaagtgatatgtgcgtgacaaggatgattttattctttttc

SEQ ID NO: 195559 - DNA, 1778 bp, Cannabis indica
ctcataaaattgtagtctatgtgattctctgttacattaatattaatgtatgtcccttcacttacaggaacgcaaacctgaactaacatcagaaataatggcttttcgggattctctattatttacaacaatatctgatacccttgatgtttgggagctaaaaggttttgtgttgaaaggcttttcttgtattagatatagtaatgtttgagcaaaaatgacattcttttcaacagatttaggacatcaaactgcacagaggatagttcaggcatctgatcctctgcggtcaatggaagaaatcaatcaaaattttcctaacattgtttcttctttatctcgtatgaaggtacagaagtctgttacagtaatttaagttcgaacatttttttgtattacaattctcccaaacttatttaactgtggttgtcattttgcagctgaatgattcagtaaaagatgagataattgcaaatcagcgaatgatcccacctggcaagtcgttaatggcactcaatggtgctttaatcaatatggacgatgtggacctttatcagtaatgctttttgccctccccaagtttcttttcctccatttctagttgcagcctcagtgacgagattgaaactttgtagtttgtagtgctatcccagctgtgaattttaggatagttgtgaagtggggtaataattattttaccaatttttttaaaaagaaatagttaggctgggtccgaaccccagaacatttacacacagtcaccacaaccacttgagatgtcctcagatgaacttcttattacgaagacaaacaatatcgaggataacgtttatttttgatgagataaatagtgttttgggagattaggacttctctttgatatctgttttgtatatttcggatgcctgcatgctgtttgaaaaactgtaacaggcttctgccttcttttatattgggaactgagtttttttaaattgttttcacatgttctatgatttccttcctctgattctcccactttatttctttcctttttctatttataactccttttgtatttatattcattcttttggggctttatcattattgcctctagttaaggaaataaagaaagaaatataatcattggattcctgatgagcaagccattgggcatctatccttttcatagtcgctagagttgtcattactggattcgactatgtttgaaatataaactctatatgtgctcatataatgcgcatgtgcatgtaaaaaagttgtttcctttgtttggttgtataacttctgttatctgttaacatttttaatcttttcttttgtaggatggctgacttggtacatcaggatttatcaatggctgatcagttttcaaaactcaaggtgaatagtttttatcctacacgcttaactagctggaatgctgttagatgatcaactaagagggattattctctgaactatttcttctggttgaacaaaagtttaatgaccatttcttctgttttgccctgtcaactcctttttattattgttgaaaaaggcacttgaccaaagggtttggtgtcttctatgttggcatcattgtgtatttatgtgtctttgtttacttgagcctcagctcttcgtccattttttttctcagataaaattttatctgagcgaagaaatattgtaggcttggttctttgctttcttctgtaaattgttgactacttttatagttttatgctattgtggaatgcataaacaaagatggttttgatgtagtatta

SEQ ID NO: 195560 - DNA, 1257 bp, Cannabis indica
ccccaatccatatgagtggtaatgtggaggcttaaaagtaacatttgtattactttgcaggaggtatgaattcaagtgattgttttgctctaacaaattctacaatcaacttgtgaatctcactttccttacaatctagctcatgaactagttttctaactcattgagttccacattattggttgccaattccttgtttatgtcttgcaattccttcacctgtttagccatgtaactccattgtgctaatatctcttcatatgctttattttttttctgctacagcagaatctgattcagaggcaaattcgtctacatcaaattcttcagacatgttttccttaaccataaaagcaatcgcatatttttcttcctttgactcatcactggtttcttcctcttcactatcactcaaagtaacaacaagagccttctttttcttcaatgtgtttgcacattctggttggatatggccaaaaccttcacattcttaacattgaattcctttactctttttcacattttgtgaggaagctttttggtagttaatatatttttactagaagaattttctttgattccaaaattattcttcttaaaacttttgttgagaaaccaagcataattcttagccaacagagcaaagtttccatctataaaatattcaaacagatctgaatctttgctgatttccccttatggacaaagacaaccccattttccctcttgtctttttctaaatctatatgtttcttgcccttgttccacctttgcaaggtcatctcatagttttgcaaggaaccaattggctcatttagatcaagagctttaatgtcttggatttcctcaatggaggttactttttacatgaattttttgggcagtaccccaagagcctttctcaccagcttcatattagagtatacctttctgagagcataggtctcattcaagatatcacataatttggcatgaaactcagccatagattcaccctcttccatgaacagatttttaaaagctttgcttgagctcttaatctggctttctttacagccttggttccttcatttttaatcttcaacttcttccatgcctctttagtgatcttgaaatttgagataaccttcaattaattgatggagactgcgttgaatagagcatgaagagtctttgagttaaagttggctttttccatctcctcaggtgtccactcacttgtttgtttagccttcatcccttctgttggaaattatt

SEQ ID NO: 195561 - DNA, 2255 bp, Cannabis indica
ctccaatgtcagctggatccggttactcattgccagtctccagcgcctttgttggagcttctcttgttctctcagtcttcgcattattgaagcaatagagcatttctctgaaaatatatatatatacatatacatatgtttatgtattgtgttttatttgggagagtgatatcttttttgatcgagatttgatattctattatttttggattcggagagatttatttttgtatgtttaattgattattattacttggtgaataaaatattattatatatatttttttaatttattttcttgtcattttaagtttatatgatattaattttataatcaaagtaaaaaggaatagaagtacaggccagaaaattatatatatggttgtaatcaaagtaaagcatataataatgtaatatgtccaaaattaaagaaataatgtggagtaaaggtaaaatatagagttcatttttggtaatatattttttgtaagggtaaaataccatattttttgtaaaagttttattaaatttaaaaatttttattttgttaaattataaaatagactccctattttttaaaattgtataaatagaagatttttatatttttttatcaaaataaaacttaataaaataatgtgatctaaagaatttctgtatctgttccttaaaaattataaagatgatttatattaaaaaataaaattattgaaattgagctaattattatactactcatctaagacattcaaattttcaagggagagggagaaattgagttgaaatgtgaattagtaaatttaattagttttaattataataaaaccgctaaaaaataattattgtttttagtgttttaatattttttaatcaaaatattagtttgatgaacatattataaattaaaatacacttttattaagttttttaaacgatttaacattttgattatttttaactaaaaaaaattgaagtgtttatctatttatttatttatttttgagcaagaagtatttaaatgtttgattaaccaactttggctattatcacaataaaaaatacgtaagagtgctacataatttaaatattaagtatttttgtggcaattaacctaaaaaaataaattgatcttaaactaaaaggaaaaaaaaatattaataaaacgttatgatatcatttttaaatatttttgttattaatttaattaactaatatccaaaaggaaaaaacatatataaattacagcaagaatttagaaaattgatccatgtttttttttcttttttgaatataataaattaaaaggcaaaaaagccaaagcactttcacaaggattttttttgataacatctattaagctttgttagagatattacagagctttagagactgtttggttagtaaaaaaaaatctaaaaatagttttaaaaaatttgtgccaaacactattaaatttttaaaataataaaaattaattgttttctattctcacttttaaaagcacaattttaaaaatatagccaaacaggcttttagctttctattaaagtggttattggttagcttagttaacttattccagctgtaataaattacagttagttattagttagttattgttgtatcattttgttaggcttgtatatataaagcttatgctcattcagttaattaattatccatttcacaattggattctctctttcttttgattttgttattcctcacatggtatcaagaaccatttttttttccattcaatcttggagcttttaattcacttcttcttctccgacaatgtctgattcaacctctactactccgatgacttctcacaccaatgctactacttcattcagtccagtcatcttctctcacaagctttctgtcaagctcaacaatgacaatttccttctctggagacctcaaattatttttgccatcaaaggccatcagcttttgagcgtcatcttagattctttcactcgtccaccgagatttctcacagatcgtgatcgagaagctggacttgtcaatcctcaattcgctcagtggaaaattcaagatcaccttttctattcatggcttctttcttccatgaatgaagacattctcacgcatgtggttggttgtaatacctctgcccaggtctagaaaacacttgaattctactttgttactcaatcgtctaccaaaattgactagttcgtgactaagcttcagaatatcaagaaaggctctctctctctctctct

SEQ ID NO: 195562 - DNA, 2299 bp, Cannabis indica
aagtgtgagatcatgggttcacaccgactacacctcaatttcgaaatattgttcaagccattttcatatttgatgagagaagataactttttagcacaaatcgaaaagaaaaaaggaaacaacgggttaccttgtctcaaacgacgaataggcaaaatattcctaataatatcaccattcacatttatggcatacaaaacactaatgatacatcacataacaagtccaatctaaccaagatgaaagcctaacttttcattatcctttcaaaaaatcatcaatcaatacgattatagacctagccatatccgcttttataagttagaaaccccttcatagttcatacctttcttgtgacgctttgatgagtcctctctctctcgagaaaaatacaaaagatattgatttttattatgattatgtagctagaatataaaattaaggcattaatttaatatgacaataaccgtagaaaagtctttcacattaatttctagcgcatttgttaggattggaagtgacaatattacattttggccctaaagatacaaaatccttcattgaccgatctatgggcaatcagagtggtcaactaagcgacaataaataataaataaggagtatcacgaatatttcttttttttttttaaataataataataatacattggtcaatgtttaggttttgttctctagtatgacacaaaagtagtaccaccgatcacaattagatattcaatatttggcagtcggttatcattagattgaattgatttatgcacactcctaagcctgaggttaactttctctctatttttttaaatctcagtaggtctagtggtatgtagagttgatggagaacaagagcttaaggttagagctatagtgtcaatgaatttattggtgatattttaaccttaagaataacacgcataagaatattttttatacggtaacaaatcaaataaaatatttgatttgatttataaaatataattaattatttaatacttaattaaaatattctaattatgatcatatttaaatacataatattttagtttcccgatttaatttttaaaatttattgtcaaaatattctaacaattaattgtggcggagtctttgatagaaagtctcacatatataaatatagagtctcgatctccgagctcactattcattctgtgaaatacagtaaatctatctaaagagagtagagagagcttggaagctcaattatacccatgataattagttttctttgcagatcaaagattctgtgggattgaacctcaaagattcaatgactggaagtatttcgatcctataattatatcgtgtatatattcatttattccgcatttcatatacacattcaaataaaatttctaacaacatgtgtatataattagatttgttgtattttttaaaaaggttttaaagatggtataatatatatgtatgcatttaaaatgtatatttaaaagtaattgatattggatttaggggtgtgcaacaagtcatccaatccaattataactgatcgatccacttccaattaatcgatccaatagaatcaaatatccaatcataattagattcattcagatgtaaattttaaaagtccaatcggatcagatcagttgttggatgtgacatccgatccaatgagattaaagaaaaaaatcttagatctaaaatattaattctcatcttcctaaatgctattaaaattatcaatgcgtattgaataagttttatttttaacggttttattatgagattatgagaattaaattagattaaactaatgtttataatgtatgttggattattaggttttaaattatgttattttttttatatatatatatttctttttaatgaaatcaacttaaatggtagctaaaatagattggatagctccaattcaattcaatagaaaatcaattaatgcatccaatggttagaatcgatctaatccaatatattaattggatcagatcggatgactcaattcaattaaattgaatcagatgataaaatttaatatctaataaataactggattggatcagttaagccaaaatctattatatgtaattcaataaacacttttagactgactactttaatttttatgagttttatttggtacttttatcgtagtctaaatattaataaaaatataaatgtaaaaatagatattaaatattcgaaatccaaacttttggcagccaccaatacaataatgtactactcaataatcaatctgtctatcgggcatatacttata

SEQ ID NO: 195563 - DNA, 1619 bp, Cannabis indica
ttctttttggcttcctccacgaactttgaattcccggaagccgaacaccgatccggatgccatctctattttaaaaagttgaaaaaaataatgataatagtgaactgcatggattcaaataaatcccacaagaactatgacttttctctataattgtatgttgtaatttttttttttgaacccaagtcaaccgtctccttggagaggaaaaaactagacataaatcagaaactccatgaaaaaaattaattttgaaaatgacccatatgaagaatttagaaggattaaacaggagagggttttagaagaaaggtcatcgaagaaattctaaccattgctaatttcttgtaagcattcctcagctccaaagttgtacattcctttttcaaacccaaaactgcataaaagtcactgcttttctcttccccattagccattactgtaaacttcctcttcttcttcttcttcaaagaaaatcaaaacccagaaccaaaaaacccccgattctcacttattgtcgacagattaaagaacccagaaacccaaaaagcaaactacaatcccatatagatagataaatatatatatgttataacaaatcacaaatcatagactacatctttcccaattgggacaaagaaattcggcatatttgagtttgaggtagcttgaggggaaaggggaagtgggtttaaggcggaaaaagaggatcaacacacaacaccctttcttcccccttaacgctaaagcctcaggaactctccagaaacaagcccaacttatatataaatactatagcttttttagaatatatttatcacatttttatttttattttaatactttaattttttaaattcatataaatatataataatgtgatttaaatgcaatgtgttaataaatgatagtagcgatggaagaatggacggctgcgattgcatgggagttgttgatattttagcgtatggtgtgtccagaaggttctgtttttcactgttatctcaacaagtctttgctgacggcaaaaaccatatctttccattagacgaaactctcagctctgtgggtcccttcctttttctcttctcttctcttcttctctccctcactaccaacttgctaagaaaatgtccaaactgccctcttacacctttttttcgtttattttttttttcttaatatgaattaaattatgcccctttatttttatttatttcatttattttttttacgtgttggaataaaattgggtatttagaaattcgttattttccaattctttctatctatcttggtaatttcaagtgtattttttttctttccttttgtttttgttgtttgaaagttcacaaaaccttttatttaacaacagttgaaagtcacaaaaacttttattaacaacagttaaaacagtaaatgatgtcaaatccataagtcattttacttggaatatccttaataaaatcaaaacaagatatctgataggctttatttatcaaattttcagtaatgagataatggtagcatttttacaataatgtatgaagagaataattagtatttttctacttatttaatattatcccttaaaatatataattaattaaatttttttt

SEQ ID NO: 195564 - DNA, 1410 bp, Cannabis indica
ttttttttaaaaaaagaaacattaaaaaatgtgttatttttctttttgacaaataaaataaaatggtattattaaatattaatgtcaatattaataatattcccgccaaataatataataaattaaaaagctactgctactattgatattgaaaccggaaaagacaataagaacaggaaaataacaaataaaaaaaaaattgcaaaattttccgggaaaacaaaattccgggcatccaaacgacacgggctttgtacagaaacaacagggtcagttcataattacattccttaaataaatataaaaataaaaattatttctgagtttctcaaactgccgttttctcttttttcttcatagcaattcgttgtcgattcgagcggtgtagagtgagagagataacagtgaagcagtccagtagtgtcagctttctcaaaattccctcactttctctacgacttttcattttctctcactatttcttttttcttttcttttaattttcccagcaaccaaacaccaaatcagccaaaaacaccctcggcgttttcctcagccggtgattttcctgtccttctgaaaatccgagaaaagttttcgcccttacagcaacacccacccccgatttcgtcccatccctttccgcgattccctgctcccatcttttccctttggttctttcaattttccactctcccaaacactgccacggcgcacgttagcttcacccgcgcatgtttccccttccccattttttaaaaaaaattaatttatttttaattactcttttcttttctatctctttcgtaatattgaaaaaataataaaggtcaagggtattattggaaagtttgccgggcactttctgtgacctgtcggagaggttgcccacaaaaaggttcatatacaattataaaattaaataaagaaaatgttaaaataaatatattattaaaatttaaaacagagacaaacggttccattttttctgttctttcttttagaaaaaaatgtttataaatgaaaatgaaatgatttggttttttgttttgctttttaatacacgactttacggtatagaaggatagtttatacatattatattacatacagcaaataaaaaataaaacaaaaaccacagaagcttcttcttcttcttcataatcatcatcatcatcaccaccactaccaccaccaccaagcttatcatactcttcttctctctctctctctctctctctctctctctctctctttttctctgtaatatctaaagctaagtgagttcttcttcttcctcgtctgtactttattccctgttaaagttaccgtttcatgtctatgcccttagagcatgattacataggcttatcagagtcagttccttcaatggaaagctctggcaagtct

SEQ ID NO: 195565 - DNA, 627 bp, Cannabis indica
ttaatttcgtcccttatttagaaagaaaaaggaataaaggaagcatacgcagttgcgttttggttagactcatatttttgctaccttctcaaatatgacataataaaatgtagcgtacatacaatatacatattaatatgctagagttaatttgattgttatttcattactttttgaccgttatttattatttattaatgcccccaacagaaagtattatatattatagatgtctattagcaatttagcatgtatatgccaataaattaattctgtcgacgtttttttctaaattattaattgttttgagtttgccgttcgtcatgtcaacatatgcatatatagttgcttcattattctagaacatacattcgagtgttgtatatataatataatataattgtagtatataaaggggtatatggcatgctaattaataattaataataatcacatgagcgataacgattctcaccattaattttagtgatatatgctacgtaatcatttaaacaatgcagatttttttcctgactgaaaatggagaatccagaaaagatatatatatatatatataattgataaatatttaatacacgtgtatatatagatgaacgtagacctttt

SEQ ID NO: 195566 - DNA, 2202 bp, Cannabis indica
agtagtgataatttattagtactacgatattttttgataatacaacaaaatattattgtaattaggatgtgttgaagtatttttgtatttaatttgtatatatactaaaaatttcaaatttaaaagtgagaactcagtataatagtagaaaagattcaattacatggattttaaatagactagcccttcaactaatctaaactaaagtaattaacattattcaatttctaattacatgcaaaatcacaagcgaagtatacattgaacgtagacactagattcttctacttcttcttaatttacatttatttatttttattgtggggatgacactagctatattcttcttatttagtggtacttgaggaaaagatactttcagtaaaatattattaatgggaaaagtgttgtgttttgatacattagtgttgacaaaaccctttgaaaagtatgaagaaaaaaaatctttctaaaaagtagaggtccatatttgagaaatcgatcttgcactgcgtagaatcaataatacacaaaaatattgtttaaaaagtaatgaaaatgaataataatggcagtagatcgatttggtcaacatatatataagttgaaaatacatgtggcatgaagtgagaagccaaaatgtatcactgtattatcttggatgagatttgattatattaaaagtcatgaagctacttataattagttcactttgatttaataagttccactgaattgaagccctaaagccttgctaggtacaatgaacctagacacttataaagatgctattagaatttaaacacctaatatgtatacataaataattctgaatgtatcatatttatgtgtatgtatatatatcattgcactattataacatgattgtacttttgctttaactgtcgtaaacagacgacaaaaagggtgtatagaaattaaaactatcgtattattactgtagatacatgcatattaaccaaacaggtctcttttaattaattatcatatgtatctagacaagacatacatatatattgtaaattatgtgtttaactagtcgaacttagacgtgtatcatcgatcatttagttttatctaccaatactatgtatatatatttatttatatgtaaagaaaatgttagttattgattattttagcaattcctatataagttttaagagtattatttcattttacacagtacataatatagtaatatataaatatatatatatatatggatacacctatgattttataagaaattttgtttgataaataattgggaaggtacaattggatttaagaatgtagattggaccaattattttatatttgatattttttaatattaaattttcaataatttttttaacataatcaaaatcaataaatcttctaaatattaaaacgaacatatcaagtttcgaatcattttaaattttacgtgctagaagtattttttttttaatacaaaaatacgaattattgactttacattgttatatttttatattgtgttcatgttttcttcaatctttttttacgttttttcataggctccataaaaatacaataaaaagttaattaaaatttgtaaaaatatttaaattttaatttggtcctataaatattaaaattggagcagattaaatgattaacctgatttttttttattatatatattttactataatttttcatatatataataagtgaagatttgattgtttaagtggatataatatgtacataaaatagttaagtggatttaatatgtaccaatattgtggactaatgtagtctgcaaaacaatataatctaatctactcttgtacaaatattagcactttgcaaattgaacctgttgatattatagccagattattgttgatattttacattacaataccatcatcaatttttttaaaatgttattacaatcaaactctttctaatagcacttacaagtaccttttcttatttttattttcaaagtgtgttaatgcaagtgaagtgaagaggtacatttggaccacaaacaaagattgacaccccttaaaaaaggattaaaattaggaaaattaagtagtggtacgcacaggaaattttgcagttgcataattcatcacagcttctcccacagtcaagaagatccttccttcaattttactcacaaactcagctagttttagc

SEQ ID NO: 195567 - DNA, 1227 bp, Cannabis indica
aaagcaaagcaaagcaaagagagggacggcagggtcctcataagccttttacacgtgataaagaaaacaccaaaagcgtttgcatgcgtgtataaagattcatcatcatcatcatcacttcttcctcttcttactatttctctatctctcttaccataccatctttctcactctctctctctttctctccctataatatacttttttttttctctttcgaatctgaatcaatcatacccattttctgaatctctgcctttagatttaaaaccctcttcttcaccttctgtggcactaaagtagttcatatatctttgttatatactgggatttaaggccgttttagccttttcaagtgagtatttttttctagtggttttggttcatcagctctaagttatattaaaaattcatttttttcttcttttgaaaaggataaaaaaataaaataaaggaaggtagcaaagaactaatgtctcccagatagtgatttcacttgcttttttcaatgtttattcctttccttgaatttgttcttgatttttggcattttctgggtgtttttatcaacttacatagtggcagaaaacgtttattcattaattcttatttattatctttttgtatcttgctacgttttatttgtttagactcgttcattttcaatttctggttagagacaggctaaagaaaacatttttatcttctgggtattacaattttttgggtttccaatcgttaatatatatatattatagcaattaccatatgtatgtgcatgtgtaaacataagaacatttttactatttttaatattcttttctttgtcattggtcttctaatagaactatctgaactaagcttcggtttctgggtaaatagtctgttttgtccatgcatttatgatttcacaagttgctatagctatttttgttttctttttattttaaagccctcctcttctgtcatttttcttattggttagtcttttgagattttgaaccataactatggaagtagatattcaatattggttatagccataccacatgtttattatttttaaagataattcttttgctttctgtactcaatgtgcctgcataaatgtctagtcaaaaagatatactgtaactcctcctcacctaattcacttcaatattacatttttttataaatatatatagtttctggttttttcttcttttctttattgcttagtttcaa

SEQ ID NO: 195568 - DNA, 2144 bp, Cannabis indica
aagagatgtgactctgacccactaatagaacacctataaaataacgaacaaaaattaatatataacaaatattttaataaattatgagactttatataaatagtcacatataattctttgatataaagactagaacttatttattttcatctccattattgaaggtgactacaatacatatgatgtgttttttattttaaattggtcttataaaatcaaaactagtcatatagtggttttacaaaactaaaaattaaccatactaagtcttacaaaactaaaagtagtgatactgaccttacaaaactaaaactagtcacatcgatcgtaaaaacaaaaactaatcacattagtcatacaaaacaaaattaatcaccttaactttacaaaatcaaaaaacaaatcacttacaaaactacatattggattacaaaatcaaaaaaccatattaaccataaaaatcaattaagctcatgaatataaacactctttaagttaaaaaaaaaaatattgaaagtatcttatacgtaaacgaaatttattatagataaatttacagaaaataagataattggtaataataaaacctaacgatgttggcattatggtaattaaagtaaaaataaagggcgaatgagtcatacagaagaaaaaaggtatgctttggttggttgtatcgccaatttgcctagactataaaagcggagtactcagagacggcattcacactcactctctctcccaaaagaccaaactaagactgaaccaataccatggattccgactacggcattcccagagaactctccgatctccaaaaactacgatctgcctaccagcccgacttacctccttgtcttcaggttttctcttctttccttttttagctgtcatattctctatttggttgatttagcttaggcctgctcacacagtgacagtctcattcatactcaagtaaagtagtgatctttattatgtttgattggatctattggcatgccgaagtagaccaaggcattagatctgtttttttgctattgatttagtctttggttctgtaccagatgctgcactgatactgaaattgtgtatttatttattgttattacttgattgtgtttgcagggtacgactgttagggttgaatttggtgatacaactacatcgttggacccaactgatgcccacaccataagtcgatctttccctcacacttacggtcacccattggctcactttcttagggccactgcaaaagtagctgatgctcatatcataactgaacaccctgctaaaaggtttatgcgttgctatttgttaacagtgccacttttgattttctagcgaaaatagaaataaaaagatcatcttttatttaaatgttttgtctttttaatagggtgggaatagtcttttgtgggagacaatctcccggaggacacaacgtcatttggggtcttctcagtgctcttaaaattcacaaccccacaagcactttacttggattcttgggtaagcattagttatctcattcaaagctcagatgcgttatttgctttaccaacattgattagtttttctgctattgcaatatgggattcgaccttgtgttaatacacaaacaaaactcattgtcactagccaagactgtttgttgtttgtaaggaacactgtcattgatatgatatttttatctatccacagggggttctggaaggattgttttgcccagaaaaactcttgagataactgatgacattcttgctacctacaagaatcaaggtggttatgatttgctgggacgaacaaaaagatcaaattagaaccactgagcaagttaatgctgccttaactgcgtgcagggatttgaaactagatggccttgtctataattggaggtaaattatgcggcataagtaatttactggtatatatatatatatatatatatatatatatttcttaacattcaattaattttagattcttgctattcttgtaggggtgacatcgaacactgacgctgctcaactagcagaaacatttgctgaagagaaatgtccgacaaaggtactcattacatgatactttcaggcataaatcattaaaaacttaattagcattttattgtatgaactttt

SEQ ID NO: 195569 - DNA, 2696 bp, Cannabis indica
agagagagagagaaagagagaaactacacccaatcccatcattgattacaccttaacaacaccacaactagaaaataaaattaaattaccacaaccatatataaccctagctacctcctagctcaaacaaatacaagaaattatatctatatatcatcatcatcatcatcatcagtgttatatatatatatatatactgttatggatatagtttcagaacccaacaacaacaacaacagtaacaatcacatggcttcatacaaagccacatcctcaggcactactactactactaccgttacaacagatgccaactcagcttccttaatcggcggaggctcggctggagcagccacgacgccgagccggtacgagaaccagaagaggagagactggaacaccttctgccagtacctgaggaaccaccggccaccactgtctctcccgatgtgtagcggggcccacgtgctcgagttcctccgttacctagaccagttcgggaagactaaggttcacaaccaaacctgcccctttttcggtctccctaatcctccggctccctgcccctgcccgctccgccaggcctggggcagcctcgatgccctgatcggtcgcctccgcgcagcctacgaagaacacggtggtcgacccgaagctaacccgttcggtgcacgcgccgtcaggctttacttgcgtgaggttagggattttcaggccaaagcccgcggtgttagctatgagaagaagaggaagaggcctaagcccaaaatcacatccaccaccgctgctgcctccgccaacgccgctgctgcttccgccaccggtactagttagatcatcatcaacaacaactctactatcggatatctctttcatatgggtatgcatgtattatatattatatattattattaataataagcgattgatattattcgattcatgataactattaattagtttagtattttttttttctttgagagagaaaaaaaatactatcttttcttctttatagtctttgaatatttgtgggtgtgttttagatttagtaatttaatttaattattgagtaattttgtgtgtttttttatcagaaaaatataatacgtttgaatttgggggcaacgtcgtccttatatttgctgtttaagggtgaaaattggcagtgaagaacagcaagggtggtatagtgggattagactattcaccgcaaaaaaaaatgataatggttgtactctgaaactactgcatacaattaattaaacattagatcgatatcaatatctctgtaaaaaaaataacatatgtatttcttgctttctcttgttattaatcatcttttcttttaatttgttatcatcatctttattattctatgcatttgtatatatgtgtgtcttactatatatataatttaaatgtggatatagatgtatatatatattcctcattattgcattacatattgaataatggtttgtgttttctcaacacaccacatataataattatataaaaacattacactacttaattaaattaattaacttgtaatagttttatcacatttataatatatataaatatatatttgatcaataattttagatagacttaatttctaatttatacaaatgtataagatcatgagacagatattctatgtgcatgtctctagcttattacttttatgttattttttctctctgtgtagtgatctggagcaatttaataataagaataagtaattaatgatgaataattaattaatagagagatttaatcaatattatatattcatctcccttagctgtgacctagctatatggttatatatatatatggaaatggaaagctcacgagagtactactattagcttagagtcaaggttaggtattagtattaaaggcaatctaattatgagatctctattaaggacaaagtttattagattatcttttttctaatttatttatatatatatatatattatatgtagttgccagctaaactcacaacactactatacttagtcatgaattcaacaatatttttgtttttaaaaatcatagatcttaatccgtgcatgtgtgtatgtatgtatatttaaatatgttaattgaatatataaattgttctctatatctatggattctagcactgctgctcgtgtaattaattagcttaatttagtacttcttaatgtatataaatatcaattagattggatatagttttgagttattattatttaatcatctgaaatcaaggacattaattgttaagtaatctatatatatttatagtttggtgtcatgtcttcttgtgattgtgaatgtagaaactcgtaaatataattggtgcaatatattttgagatcatagtattaattatttatgtattttatatgtgtgtgtgtgtttgtgtgtggagagagaatatattgatataagagatatgaaattctatcatatgtatagattctaaaactcatttctgggaaaagatctgctatatactacactcttgatgaaatgttagttgtgttgctatttaagtatatgattgcattattatgtagacctattaattggctactcatataagttattagggtgtaagaaaaggtcatttagttataagctatatagttttctaatcatctttcgaagtttatgtatatatatatata

SEQ ID NO: 195570 - DNA, 1443 bp, Cannabis indica
aaattgcagtgcttaactttttttttttttttttttttttaaaaaaaattggataatgcttttcaaataaaattgaaaaagaaattcctctctttcactctttgacatttgtttttgctaataattaatacctacccactattaatatagtttgatccaatcttaataagccatacataattaattccatgaacatgttgtagtgctcaactttatgctactcttctccaaacctccagatattctcacaatacgataaaataaataaatgagtttggataatatgtgtttaataattatcgtatatttagtgtttgagtttttttggacatgtttaataatcatgttgtatttatatttatcatgttataatcaaattgacatgtttaataactgtctaatgatatgatcttgtaatacaaattaattatcataggtttcataagtgtttgtgtttgtattgtacattgtgaaatattaattgtgtcatggtgtcgtatagtatttaattaataattttgaaacatttaataatcatatcgtgttgatcgatataattatcttaattgtattattacgaacataatacaataacacaaattttctacccaacctttaagtttttttcatgttataaaaaggtctcactccactacaaaggtaaataaatatatgtattagattcatgatgtattttacggccatgaatagaaattgtaaaagaatactcccaacaaaaccatttaaaggtctccatataattaaaagctaaaggtaaaaagttataaaatatatattgaaaaaaagtaaatataatatgtattagatttctgatgtcttttagagccaagaatagaaattgtaaaagactccaaacaaaaccatttaaaggatttcataaatatattgaaaatctaaggtaaaagaagaacaatatatcttaatttgtttttttctcttagattcttccgacattcttttgtaaggtgtaagattatgtttgttgtctgatgagaaatattggtcaatctctattcgatcataagcaacaacttggtaatttgaatgaaaattaattaataaaaagcatagaaccaaataccaatacaataaaagaaaataattaagacaatttaagcaagagtgtctatgaagtaggggtacatatcaaaacatattacatcgtaataaaggtctcttattatatttctttttttcaaaatttcttctttttcttttccacatgatattatagtattttaatgatgtgccaaaatgaaaaatatttaaattatcatggtccttttgaaataattatcacttgcacagtagataatagtctcattatacagattagatagatttggactttttatttgttttgatcacttgcacagtaatcactttttatttgtttgtttaaatttataatgaagaaaaaaa

SEQ ID NO: 195571 - DNA, 1250 bp, Cannabis indica
gccgtgtctatcaaaacccattttgtcactcctatttgttataatttttgatttgtaaagggatttgagcctataaaactcaagtgtataataaagatattcatattactcattaaacatctgtgaaatctatcataacatatggtgtgtgtggattacaggtggatttgcatcgtatttattagggttaaacaagaagacctatgaattatcaggagtacacaatgaaggaaactctattaatagtactaaagaacctggcttaggttggatggttgcttttcttttcttggtttgctttgttggtctttttgttctaattcctctaaagaaaggtacttttcttttcattaatcttgttttgtagttataattagttcatgttaaattaattattgatagtcctaaaagccataatgattattagtgtttgggaagtgtcacttgtcacacacacacacacttcatattatatgaataaattaaatttctaatcatatgacttaattgataataaatgagaatctttagaaattaataaataattacatagtattaattgatgtacagataatgatagtggatctgaagttgacttacccaagtggattagcaactgctgttttaattaatggtttccatactcgtggggataaaatggccaagtaattaactaaaccctctcttattttatttctatagaaaaaaaatatttttctatctcgtacacgagtaacatttcgagtcacgtggtactataaaactaattgacagaggcagataagatataagatggaagatttttggagtcatttacctccctttaacttttcatttttacccttaaatattttaattctatgataaatttctattttcatctccataaatattatttattttattaatactactttaaaaacaaaaaaaaaaaaaaaaaaaaactaaaaaaaaaaaactcaaaccccactaaataaactgtaagctaagctcccaactagttccaaaaattattatgaggtcatttttacctctccttaaatttttactaaattaatttttgccccaaaaaattcacatatatatatattttcatttttacctttacatatttttattttattcttataaaatttatattttttatattcatcccacatagattaattttattcttactaaatttataaatttcgtttttatacttattaaataatgtagctggttctgtcattgctggtcaaaattat

SEQ ID NO: 195572 - DNA, 1167 bp, Cannabis indica
ttatttcatgcttgatgttgcttcctaaggcacaaccaacagaatgttcaactatttcagtacaggaaaattcttgaccattcaaaatggaagcatttgaaatgcaaaaacttggttgagttgagccaatagaacatttgcagcagtagtaactatcctatctgtcattcaaaacttttatcaagtagtggtagagaattgaaaatgatatatcatataagagtgtgtagactagacaagaatgaggaataacaatgaggacaagagaagactccaagggcttgaaaaaagtgactcatcttggaatatcaaatggaagtggacaaacactttatctatataaaaaagaaatcaatggtgcactaattcaaagaaaacttaataaagggaaaaacaaaaacaattcatggtgcatcacgtttttttgatttggtggtgctgctgtatatgctagtgtgacgcaatcaatcttattatacctttggactgaattaccttagatgattcaaggcatcatcacaagaagttttgcctaaatagtgttccatttgtagtgtttctattagattctgcattgactaagtatgtgactagttaagtagaaaataataagttgggaactttcctcttttaggctaacttttgagagtgatttctacccaagtggttgtattaagtggtatagagtcacacactctcgagtgggaccggtgttgtgaaaggggcgacctgcggaagggctccaaagaggggtgtattgttaggattccacaatggaacactatatgggattggttggtaaaacataactatttaggcatcctcctttcttattctaacttttaggagtgagttctacttaagtacttgtatcaagtggtatcagagtcacgcactctcaagtgggagagatgttgcggaagggctctaaagggaggtgtattgttaggatcccacattgaccaagtatgggattggttagtagaatataagtacttgggcacccttgagagtggttctattagattcttcctatggtggtatagcttctttttcttttttcccttttctagatcaaagtgtaacatcagcaactttccttttcctctatataaagaaccattatcaccacagataaaaccacctccatcatttctctctctctct

SEQ ID NO: 195573 - DNA, 867 bp, Cannabis indica
ttattattattatttgcagaattgggttataagggcatcttgttgagttgaaacatatatataatcacagattacaatgtcttcccataataatatatacaatcctccgatatagcattttagttatccgagtgtacatgtccacttcccctctctcatctctataattgtaccaaaaaacgataaatgacgatttgttcttctctctctatattagcacaataaaataatcattacgttttacaagggacaaactacaaagtactcctttgaaaagggcatatataaatacaatagaaagagagtattgcttttggtatggtttactgatattttataaaatttattatactaaaccatgtatatatgatacttagtgacataattatcaggcattagcctttttttttaacatttcttctataaatattataaatcaatcgagatggggtcagacttaagacttatatattgggtcatacgaacaagaaaatgaaaaagagaagtagtattcgtttaagaatagtagtagtcttgaacaagaaacataatattgttcaaaacctctcttatctatttggataacaatatcatcaattggtggggtagggccttgtcacgtagctaagaaattctccttttctttctttagggaatactcaaattaatattattactaataataatatatttaagaagagcacaatatttaattgggtcatcaatataatttataatttgaatttttacaaaaatattagattttcgacaaaatttacaattttattaccacacaatttcttttacaaaaatactatttttttttataaaacagtctaaaatcaccataaaacaacaaaatagaac

SEQ ID NO: 195574 - DNA, 944 bp, Cannabis indica
gcatacttatactacacttatgtttttgattaaatataattatttaaatataattaataaaagagggatataattttaactcattaagttttgacggggtttaagtgacagagacactccaagactagtatatgtatatgttcacccaacttgttctatatatcattttcatcttctgataattaatatggctggactggacaggtccagtatagccaatgtgatcgtgaaatgacctaattatgttattaattaaatcaggagtatatagcaagtgcatgtgtgcactttcatcaatagcagctgggattgggattgaatccaataatattgggtgccaatctgctaccttattccatttctcgatcaatctgttcacatattccatttgcatctgtccccctcttcttaaatataattctctgttaatatatatatactcacaaaccattgatgtttgttagaattttgtaagatgtggttaaagtgcatctgagttttatttacaaaattaattgacaaggaaaaaagttacttttattttatataatattttatttttatacattaatattgtgaaactaattcctatccataattaagtcatctatgccacaattaattctctttttgacttcaagcaaaataaatgaataaatctcttttgacttgatcgaaattattataagtataggagtagtataatgatggttattgtttactaccattcatgacaattcatgatatttattaacgtacaaagcttaagttaggagtaagacacctcaagtccaattggagatgatgcaaatgtcaatcaatatatatatatatataaattatctttaattagtgataatttattgaatatacatatttatgtacttagatatattttatttagtttttattttagtttatttttatttttacttgtataattt

SEQ ID NO: 195575 - DNA, 1435 bp, Cannabis indica
gttgcactggaactgctcattggggtggtgggatcactgcattctcctcctctatccgatttaaatgaagcagatgaatcaagctctttaatgtccttgagggtcatggaatttgatttcttcttactttggctacttccgatgcttagtgttagctcaacttcgctatcgtcttccttgccactcttgaggacaatgttagagtttagacctctgggattttcaccgatagcgctgactcctgtagagatgtcttcctctgcaggcctttcaagatcaaaccccctcgagactctcatgggatctccagaacaactaccactacactctctagagtttagttcatctctcaaactatgaatatggaagctagctccaggagcttgtttggttgctgattgttgccagttaattaactgagagtggctgatacctggtctactcataggatcccaaagtttggcttgcctaatttctttctttagctcatccattagcattttctgaacgctatacagccggtgcagttctcttacctgcaatttttagcattcaatgtcctcaacttagctatgaatcacaatgtaaatggaaaactatccaattcaagattgttatcataaccaatataatactggcattcaaactcatcttttagtaacttgattagttgactgtcttcccatatttttacagattgcattctttgtttgagttcatgtatcaagagaaatgttggcttttggtcgataaatgaatgatcttgatcaattgttggtagttctcattagagtttgtcaaaaaatatgtggagcaacaaagaatacctctgtaataaagttgttttcatggtattttttataaaaacaatattttctccctttacattatgaaattcagcttcagactatgttgatcaatttgcaaatatgatcacaactcaatcaatcctaacaagaataagccaaaaacaaaatggatgagcattattagagtttatacctggtgcttaaagatatcttcatgcatctgcattgtcttcttgatggaatccaaattgttcttgtccatggagttttgaatcatttcctccaactcgctttttgaatacttcacgtttgccccactgttctggaaatagtcccaatcatccacaccatgcacagtaaagcgcttgctatttggtaagcttcctaaaagattgatggcaaattcaattttggttcccatacctgaaagtgatatggcagttagaattttggcaaactaatgaacacatagcatgcatgtttcattaaaaccaaattaactaccctcaagtatacagtgaaacagaaaaaaagtcattttttaaaaagagtagagagagagagagagtgatgaaaagtattataattccatttaagacttctttttcattttccttatcttctta

SEQ ID NO: 195576 - DNA, 1555 bp, Cannabis indica
gtaactttttcttgttatcaaagctaaattttaaaaattacaataacaacatctggaccctccatataaaatattatcaaaaaaccatcaagaacacatcaaattcctatcgtgtaaaaccatcataaaacatattttactaaatttgttaaaggactacacaaaccatcaagaacatatcgatataccatcattaaattttaaaaattgcaatgacaacatttggagccttaacctgaaatattatcaataacacatcgatttctatcgagaaaccataaaaaaaaaacacatttcaattaaatttttagaagcataaaaaaatatcaaaaatttcacacaataggagtttcaattagcagtaaatataatcgaaacagttttagggatcccaagcaacattgaactatgcattaaacatgggctttgcatgtagctctcttgtggaccgaaccgccacagttgccgcaattttgagattgtgttactattttatcaccaattttaaatcatactccaatgagtaaatctccaactcttcatataaaatattgtgcatttacggtaaggttgcgttagtttcaatcatcaacgtcatactttctttcgcttttatagatctaattaaatccctcaacactccaaacacgggcaatcctgcaattcaatacaaacaaaaaacagctgaatcagaataacaaaaataacaaaaattataataatgggaaacaacatcgacaaacaatcgagaaccaatcgataacccgtcgacaactgttgaaaataagagatagccagtcattgataaataattgataaccaattgaaaacgtcaataacatgggcaagtaagtttgaaaagacaattatacacactataaaaaaactatcgacaaacaatccaaaacacatagataacgtgttaagaatggttacaaatgcaaaatcatttgccattttgacaaacaaacgagaacctattaaaaaactatcaacaaaggcattttctgaccttgggacattcgcgtcgagaacgtatcgaaaaaatgtcgagaaaaatacgaacatatataattctcaaaaatacgaacacactgtgtggcttgtgttgatgttttgatgctttcaatttattaatgttttttttttttttttttttgttcttattttaaggctatataggatttttgcccccagattatgacctatgcattattgtgctccttgaacctttcagcccgttaaaaaataaatcatgaactattcacagtgttgtaaattggtcattctgtcctgttttgtcacacacgacaaataaaataatgacatgacttcttagctaattgccacgtcaatgccatgtcaaagccacatgtgtaattaatttgaaaaaaaataatatttttttaatttaattttacgtttttttctttatcattgattgatttttagtttaataattttttaaaaatgtcataattttatttttaaatgtaaaattatacatgtggtcgctgatgtgacaattgactaagcaaccatgtacatcattttg

SEQ ID NO: 195577 - DNA, 1340 bp, Cannabis indica
ttcgtaaaacacaacaaaaactatagaaataatatagactcgtggagtatgtagattttaactgtcaaaaccacataagaatatctggtgttcatttgttattttactgtctcttctattcttgaatcaataatcttcttagattaacttgacaaaaattgcgtcaatagttaccctcatctaacaccttacatatctcattacatggattttaggtctgagcaatgtacatttgttggctactttgctcatcataaatggtacctatgtgaaagctctcaagggaggatttacatataccagaatgcagtgtttgatgaaatacgcttccctgctgtcatcgtgcagacatcaccacttttttctcatgtactctcttctacttctatctccacactttttctcattctcattttctaacttgtatggttcatgctaatacctgtgtttttacttctccaccaccgattgagtctcccatcatacctaccacacaagttcagtcattaaacacatatatccacaactagaaattcattcccagacaaaacccttcctcaaacgtcctccataccacaaaaaaatgaccattatttaactgcaaccttttccaaaatagtttcccaatctatacagtccaatttaccacaaaaggaatcaatcccaaccaactatcctctactagttccaacaatcatatcattttctctagccacatctgatgtatctgcaagtcctacaatccttttcctacatagaactcatgccatgacaactcgttctctaaatggaatcaagacaccaaaagcatatttaacttccaagcatcctttatagaggccctttttcccaaggaaccaaggactctcaaggaagccttacaaaaaaaattcctagcagcaatgaatcatgaagtcaatgatgtggtgaaggctcatacctagacattggttccttaccacccccaaatgcatgtcatagacaacaaatggatttatcagatcaagctaaaagctgatggcaccttggaaagtataaatctcaattagtagcaaaggaatatttgcaaacaccaagtattgactgtgctcacatttagtcacgttgtgaagcatgcaactgtatgaatagctctctccctttctgtgactttaaaatgggaggttaaacagttagttttttataatgcatttctatatggagaactagaagaaatagtgttcatgaagcatcctccaggatttgtagatccctttaaatctatacgcctatcattttcataaggcgttgtatggtttagaacaagtaccacagacttggaatgaaaaattaaggaaccc

SEQ ID NO: 195578 - DNA, 1925 bp, Cannabis indica
atatacacagatcaagcaaagaaaacaaagcaagagaagaaccagaaataacagaaagttgttacacaaagtaacagaacacaactgaagttagttaaaacagctaactaactttcttcacttgacagcccccctcaaacgaagtgtcttctgagcaagaaacacttagtttgctccttaagatgggaaacctgttgcttgatataggctttgtaagacaatctgctatttgatgctcggcaggaacatgttgaacctgaatttgtttgttgattactttgtcccgaacaaagtagagatcaatttcaatatgttttgtgcgagcatgaagaacaggattggcagcgagcataaccgaactaatattatcacaccatatcataggtggagaagtggcaggcacatgaagctcagaaagtaaggattgcaaccaagaaatttcagacaccacagctgcaaggcttctaaattctgcttcggtggaggaccttgagattgttggttgcttcttggattgccaagagatcagattttcaccaaagtagacacaaaacccagttgttgatcttctatcatcaggatcagcagcccagtcagcatcacaataagcttcaagatgaaaattagagactctttgcaaatgaaggccatagtcaagagtacctgccagataccttagaattctcttaacagctacccaatgagactgaagaggattatgcatgaactgacataccttgttaacactaaaggcaatgtcaggtcttgtgatagtggcatattgtaaggctcctactatagagcggtattgagtgggatcgaacacaggatcactaccatagttagagagtttcaatccactattcattggagtgctatgtgtcttggctccttgcatctcggctctgcacaaaaggtcttgtatgtatttcttttgagaaaggatgagaccagtttcggttgtcaaggctttgattccaagaaagtaatttaatacaccaagatccttgagagcaaaggattgatgtaatttggtgatcaaggaagaaactaatgtgggattggaacctgtgatcaatatatcatcaacatacactaacacatacaagcaacaagaagaatcaaacttgacaaagagagaatgatctgttttggctgaagcaaacccgaaagcaattaaaacagaggataatttttcaaaccatgctcttggtgcttgctttaagccataaatggccttttgaagtttgcacactttatgaggagcagtaggatccacaaacccaggtggctgcatcatataaatttcttcatgcaagtcaccatttagaaaagcattgttaatgtctagctgccttattgtccaaccttttgttagagcaatagttaacacaattctaatggtgacaggcttgataacaggactgaaagtttcattgaaatcgtacccttcttgttgatgatagccctttgccacaagtcttgctttgtattgaacaacattaccttcctcatcctctttaattctataaacccacttgcaacctataggttctctgccttcaggaagattgacaagtatccaagttttgtttttgattaaagcaacccgttccacatccatggctctaagccatttttcattttgcatagctgcctttattgttttgggatataaagaggccattaacactctcggttttcgaatcccagacttactcctagtacacataggatgttgatttgtgatggtaggagtaatgctaggaccgggtactgttgagtgtgttgtatgaggctgagttgtgactgctgtagcaggtaaaggaggctcgggctgcaatggcacagtaactgcagatgctacagtagtagcaggtggtacaggtggggacacatgaggggaaataggacatgagagagag

SEQ ID NO: 195579 - DNA, 1345 bp, Cannabis indica
gttttacgttttttttttttttttaattttcttatgtatattttattttattaactagctaatatatataaatatagtccttcttcgtgcaatcattttaacattagtattataatataaaccaaaaataattatttattaatattttaatataataaataataatttaaaaaaattattctaatatataataataataaaaccacattattaattattattattagaagaattagaaaattctttattatttaagtttaaaattaataagtctgttttattatttatttattaaaaagtttaaaatttatatatacatataataaaaattttaaattaattttttaaaaaataaataaagtagattattatttattttcataggatgtttttcatatatacactttacttactttttttttttgaaaattatatacacttaattactttattaattagcaaatatgaaattatatgtaagtcattgctgcagaaagacaataataataatatagtttggggctccacttcaaatatatgatcagaaaaataacagcctatcaaaactagtcagagattcagtttagtgatacctatatatgtatatcgttacagataagtgtctccatcttattttaatcacttattttgtctctatatatttttatcaaattcaattatgtgaatcagatcttagaaattctccaccaatctaattatattgtaatgtgcatccaaaattatgataattattatttgaaactttctgtccgatctaataataaattgcttatatacttgtctcttttttatttttttttaattacagaccgacagatgatcattggctaaaaatgctaaaagaactaagttcatgatggattataaaacatttaagtgtaattatcaaatcaattattcaaaagacaaatgaggtttaattggtctatcattagagatagtttataaggtctcgtttggtatactatgatgtattgtattatgttagattaggttgtatagtattagtattatgtaatacaatactatgtttgacattgacttagatgtaaaattataaattctttacaataaactcgattccaaccccgaccacaacctaaactcggatccaaaccccagacttgaacccgaacccaaacctcagactcgaatcgagacctaaaccctggcctcgaaccgggacttagaccccgaacccgaattcggacttagacccagtttcgagatttagggtccgagtccggggtccggtctaggttcgagtcctggtttgggatttggggccgggttcgggttcaggtctagagttcgggtcaaggtt

SEQ ID NO: 195580 - DNA, 640 bp, Cannabis indica
gaatattattaatgcaagctgatgatgattatatttatacagactggtgaaagaaggaatctttacctacatattacataaattacaatcatatataagagggttaattaaaccaaataattgctgtgtactcaaccgtttaattaattaattatattgattaacaaatataaacttataaattcatttgggtcgtatgaagaaaatcttttatcaaagattttttcacaattaaataatcacaaaattattacagatcagatcgacatgcctttaaacggggcacctaactgtcaattgtctccaaatgaaggagtaaattattaagtattgttattagaaaaagcttcagttaaactgggtttatataatatatatatatataattaagtatagtactcgacaaacttaccatacgtttcttaaaacatatatatatatatatttaatagtggtgtatcgtatgatgatttggcagtcaaaattaataaagcattgttaattaattaattaatctatcttttgatttggcatttctctaaatttcattaattttaaagagtataattcttgtttcattctatttttaaccacatctccgagtttttgttttgccctaatgaaataataataataataa

SEQ ID NO: 195581 - DNA, 760 bp, Cannabis indica
tgaactagcctcaagtggttaaagttaatgaaattgaaatagtttacttgtttagtatatatataaaagtagaaaattaatcaaagaatatgcaaattgtaccttaaaagtttcaagatggtgaatttctcctttagatcttgttataatctcctaaaattcacttttattgtttttatctgtaatcatgaagaagaaatattatattagaaaatgatcaatatatcaatataatatatatatatatatatataatgatcacagaaagtaagtaaaaattgataattttcttacattcaagtaatttcatcatttttcttattaaatactcaaaagaggtaacaaaaacaaaacaacataaaacatgggaaaatattattttcagcatcacattatcactttttctattttattttttttctcaattattgatcaaacataaatgtattaataatgatcaaacaaaaagacattattaattagtacattattttcaattacatgtcaattcttatttctttgcagacatttcttacaaatactcatctaacataataatattacacaaaaaagaaaaaaattaggaagaaagcaaaaaacttgctaagcaaaattacaaaagaaattaaggaaaagcatagaaactcaaaagaaaataataaaaatactttatttatagatgaagagaagtatcaatttctgaattttcaaaactttttgatgaagatgagctagcattagctttggatgatgatgatga

SEQ ID NO: 195582 - DNA, 1334 bp, Cannabis indica
accatgcacgacgactaacctgtctcaaattctgtgcccacataaatacatacatgcgagcattcatgggacgtcagtacttacgtgaaggagaacgagacctgcttgggtctttgaaccatgtaaacacagtggtgtaaccaacacatggactacctcaaaaaggactgtgaaggtctggctaggcccatgacttacttgaagcagcgcctggaggaccgatcgatcctcccttgggtgctgccagagtcactgctcctcacgaggcaattttacaaggattcaaatatctccacccatgcccgggccattttgcataagggtcaacaagacccaaatggtgctcctcgtccatttcgtgaccaaggaagatagacccgtatatggtctgggtctccacgacctgcctggttcaaatagaccctgctcccatttttcctaccttgagcagccatggccaccgtggccatggtggctcttagagccgccaaccatgaatggaccatggtacccgaatttagaacccgaccattattatatatgtatatatatttcaatatatatgtatgtataaatattatggtataaatttgaaattcaaatttcagttataagtaatttaattatttaagacaataattgtcgtaaagataattaaataataaaaatgttttattattcaattaaaggcaattaaaaagaaaaaataattatgataattgtgtcttaaataaaaatattttatttaagaataaattgattaaaatcgttttaattaatttaaaaggtttaagagatgtcttaaataaaagtttatttaagaataattagttaaaacatattttaattaattttgaggcttaggacgatcctataaaattacaaaaatagccattgcaacaatagagagaagattttgtaatttatttttctaatttttccaagtgttgtaaaattagaaatacctaaattttatccggttcattatcattatttttattacttttaaattaatattcattaataattgattagtaatatgatcatgcattagtgaataacatgtcatacatagaaatcccacagagtttatatcatcatgcatctcatagtagaaatatgatatattaggattgtcctatgtgtttatgtgttttttgaaactgaaaacatgtaatctgagaattaaacttgataacttaaaattaacctatcaatttaaaatgattttaaattatgaattaaaagagttttaatttagatttaataattgtgatgagaaatttatttataatttgatagttttattgttaataaattaatcataattatta

SEQ ID NO: 195583 - DNA, 757 bp, Cannabis indica
aaatccactttcttttcttattctatactctgacgacggacacagtccccaaaaaatgctgctttcgtttttgtattaaactataaagcacaatagagaccttttcttctagttcttagcaaaaataaagagagagatatggagaaacaaagtggtggtgagcatattctagatagcataatgggccctgtaacctattacaaaaccaataaatgatacgagcaaagatagcctttcttttgtattgtcggaagcaaaagcaataatatatagttttaaacaggtcactaacaaatatgaccaaagtatcaatatacatgcatagtcacttatataatttcatcaaattaatacttttcttctttcccaaacatggagacaaggagactcttatagtatgtcctggtctccctcttcgagtagttttttgttgtgggcccattgggcccatttcatatctgcagcataccatggggaccgtagatagggccggtgacccaagtttcgtcccttcctttttcttttataacaattcatttgttaatcttccgtggtttgtactccacttattctgtactgtgtggtaggtccgtcaccttaaacactggcccattgatcatttgaatagcttctctttcgacatagtaaggtatcttatatttatagacaatattatcaaaatattttaagaaaatagataaattatagacaaaattagcattctcatctcattctttgtatttgtagatttagaaaa

SEQ ID NO: 195584 - DNA, 671 bp, Cannabis indica
tctctctctctctctctctggaaaaaagggtaaaatcttgggctggagggttttagtaaaggtgtagtaatatcacattttcccagtcattgattctccatgccagggaaccagtaaagaacctaaaataacatattttctccaaacaaagagacaatgtatatagttttcttcgactcgtgttaataacttgatagtgagtagtaatgacacaaagcacagttgccaaccatgaaacttatcaaccactccaaaaccctgagcttgttttccttccttctacggtgtacttgaatatagacaacattaacatgaacccataaaaaaactgtacacaaaagcttctgaaaatctatattaacacaccctcaagcccatttcttattcaagctttaagatgataaaaaagtaataaaaataacattttgagagaaactgaacattaccccaaggagggttggagtctatgcagtactcaaggtcttgaagctgttccatgggagggtggcttatgtctgccattgttgaagtgtctgagagagtgagaaacttcagaacaaacccagataggcaaagaagaaagaactgagaacaaagtaaagtaatagaaatagaaatataataaagtggaacaataaaaagcaagtgagaatttatttattttaattttt

SEQ ID NO: 195585 - DNA, 1353 bp, Cannabis indica
cttaaaaagctctgtggcagttactatctttttgaattcttggtctttccaacttgtttaactacttttttccagttttttccttcagttttccttcattgttttgacggttactgtgacttctggcttttcattcatcttctgcatcattttctgcttggttgttttcatcttcaactgcttggttatggcatttcgaaatccttttccaagcaataacatctctctcactgatattgaaagagaagtgaatgatctacctacatctgttcagttgagtaatcaaattcaagatgttcacaccctccttgctcgtgtaatatcttcaagggagattaatcgtaagacgtttcgaattaaaatgagtggccattggaaaggtagataccctgttacaatcacagaccaccactctggtctcttctcggtttcctttggttgtgaaggagacaaacgaatggctttaattatggaaccatggcacttccaaaatcatcatattgtccttcgcgaaccttgtgctctacaagaagttactgaagactctcttcatcagtctcctttttgggttcagttacatagacttccttttttaagtaagtcaaaggctatggcaaaatgggctggtaacattgttggcacttatctggatgttgatgaagattctcttcatgaaggatgggggccctatcttcgttttcaggctttgttggatctttctaaaccccttttacgaggaaaaatggcaagaattcgggactctagagaggaattttgggtggaatttagatacgaacgtcttccggaattttgctttgaatgtggtatcatcgggcatccttttgaacattgtcctacttttcttgatcaaatctataatggacaggaacctactctagaatatggtcctgaaatgatgggtgctcctttgccttcatcggggtatgatcggtatcgaactgatttcttcaaaggaaatgcttggcctcttatgactagattagcaaaaaaatcttttgcagcagttcttccacgaattcatgacagacccaaccctcattcatataaacttacagtgacagaatcttccacaccctctactacgaatctgtctcaccaatcatctcatgttaaccatgtttcctcatcacaaactactcctcatgatccttccattattcctttcccttcctatctccccatctctctccctaccaatattcctaattcaactccttcctttgctacttaccctccacacaccaatctgcattactcttcccctcctataattaactccactttcctaaaacagaaaggcattatgactgattccacatctatttctattcc

SEQ ID NO: 195586 - DNA, 1600 bp, Cannabis indica
atatattttttttttattttcctcaaattgtctagaactatgcaccaaacgattaggaaaagatcaaaatttgtgagaaattataattttaacatcctacaacgacatttcatcaaaaagaaaaaacatcctacatcgacaatgttgtcgcaataggtactgaaaatttaaggcaatagatcactccaaaaaatttggtggaactcaaaagttgtgggaaattatgatttcaaaatactatagcaacgattacaacgacaaagttgatcatcgcagtagaatgttaaatcaatagtttacttatttactaaaacaaaatcttaataaatttttccttctaaattttttgtaacctattgcaatgacaatatcatgaagctatttgcagcacgcaaaattgattacgctaatatatacgctaacattttagcgatgatatttcattgcagtagcctatagtgacgattaggcaaaaattaaaatttgtgaaaaattatagttttaacatcatataacaacaatgtcatcgcagtaggttgctgaaaatttaaggtaataaaactcacaccaaaaaatttggtggaactcaaaataaattaatgtttcatttatttaatgaaataaaatattaataatattttctttttaaaatttttgtaacaatcattgtatttgttgtagcatgctaaattgagcaattaagccaatatatatgctatcattttagccacgatatttcgtcccaatagcctatagcgacaaatttttggctttcaaagagtcttcgtcgccacttgcaagcaactattggcctttctccaaagacacggaaactcgaccattcatttgtagtacccttccaattccatgttggacaatttttcttaattttatttgtaacacttctcaactcttttatttctatacgaaaataaatcaactataaatattaattttagaaatattaaattattaaattttgattaattttttatttgaacttacgttaacttaacttgtcttgattagatagttttttgttgtgttagccattataatcaataattaatgaacgtagcatctctacatatgaagtttagttaaaataaaaatgtagatttttctaattaactgaagtttttgaggtaattgttatgaatcaattatgtatgtatatataatcatattatctaattattattgtgttctaaattatatacaaatttttgtatcctgatttattttattttttaacaccaataataaataataataaaaaatgagttgttatgcttaattttgttacttaataaaaaaatatcaaaaaatatttaactcaaagtcaatttttttttagtaatttgtggtataagtacctaagtttaactttcggttgcaaataaatatttaagtttaatttttagtggtaataatacctaaattatcttctgaaactctgtaaatacatggttgttaaatgttaagtaaattaccatgtgacaatctctgattggtccaggtcataaatttttaatttatttttttaaaaaaaaataatttatatataccaaaaagacaatgacacgtggataataacttg

SEQ ID NO: 195587 - DNA, 2070 bp, Cannabis indica
tacactccaaagaaaagaaattggtgaatctcttaatatctaataactctctctctctctctaagctctatttatatttatatatagaagtaaacaatcagagccacagccacatgcatgggcaaaggctgtaaaaaaaccataatttattttaggtctgagaagacaaacttaattgatccatcatcatcatcaatgcaggaaacaacttgtgcttcccatgcatcgaattgggagtgtaagtctgctcctctatttgttgatgtggatggcggtggtcgttgttatcgatatccccaaactcgccatcgctggcggtctccaagccgtggtcattgtccatatgggaagaaaagggttttgcaagagtcgaacccgatcgtgattttttttactgagtttggtcgtgatattcttgaattgggatattttaaagccaatttttagtgaaatgcatcaaacaaaagagaatactaacctcatcagtaacagattgattagggatttccacaaggatgggagaaggagttgtaccaatgctggttggaggaggcgaaggggctgcatgcggccattgctggtggtaaggatgaattttggcatcgaccattgccattcaaaggagggacaatgaagactaatggttctttgtcattcagattggggtttgggtttccttttttggattgggattgagagtgagactgtgcgattgaaaataaggcaaagatctgttgtgaaatgtagaaatatagagtaggagatgctatgccattagaatttctgcaaatgggttgagatccaaaaaaaataaattcatactcatttgggattgggattgagagtgaggttctgcaactttaggtcatttaaaaaaaaaaattagtgtcaatatagagaaagggatggttaacgcttcacgttaatatttcgtctattttcttaaaaaaaattataacattaaaaaaaatggttaaaaccaagaaataccgttagatagccacttttaatatataaagataaagatatattaaatactaattgtatatatttagtaatttaatatatttatttgtgtttattataatatattattatgctaatattaaaatatatatcttatattaattattatatatttttataatttattactaatttatttattatatttagtgttaaatttttttttttaaaaaaataacatttactaacataatttttaaatttgaagtgcatctgaatcctacatataaaggtgacataacatttttgttgctgcatgaaaagtgcgatggatccactcgttatttgcaatgagagaagaactatgattattattttgataatatgtcactttagttgataaaactaacaatcgtcttattggaaattttttcaaaatcattttgaacttttaagcaatatgtcaaagggaaatctatgataccatctgtcaaatgaagattgaagattactactgcttttcttttgatcaataattatttatttatttgacggctagtattaatcaaagcattcttcgtagcatttttaaatattttattaacagaattctgatggtttgcttgaactttaaatgtggagtttataattgatttagctaatttcaagttgaagctagctacttgctgcaagtgaggtaacaattttggttagaggtggtatttgtattgtgttgaggcttaagtgttataaatatcaaatccaaacctcactcaattattaattatattgaaaactaaaaattaaattatttataaacaggctgggatgattcaacccgtttcacttgtttttataaagagttatgcctaaattttgtgagattatgacatgtttgtaataaatatagcctgtttataatcttttatgataatttatgagtaattcaatatatttatgtccttttttttaactaaaaagagtcaaacatagtgccataccacccaattttatttatttttattctaataataatcattaatcaatcaatctatatctatatactaatataaaggaatgtacaaagcattctaggtggcatct

SEQ ID NO: 195588 - DNA, 2018 bp, Cannabis indica
ttgaactgatcagctaaaaatatgggctcagtcaagaaaagaagaggaaagaaaaatgagaattaatttaactcactacctatatattatatatgagttctgaatgaattcaagtgacgtatataatcatgacattccataatctgttctgtggaataacatcctctgaattagagagggagtgctctaaataatatactttattttaaaaatcgttaaggtgcgaaagagcatgagtgagttcttttagttcagtaataggattcatgttgtgtgcaaagtaaggaggtgaactgtggcctccaaaagacatacctcaaggaaaaataaaaaaaaaaaaaaacaaaaaaaaaaaaagaagaggccgcaaaagagaagttgcatgggaagaatgaaggagatgcatggaaatgaaagaaaaatgtggtaatttataagcataagagcttcattcccatgcctacacgtagtaaaaaattgaagagatgagtaatcacaatgaacagtaaaaaaatgagtatgatgcatgtgagtaaaaagattgatgagtaatcatctttgagccataaaatattggtgtgatgcataaaagtgaaagaagagcatgatgatccatggacaggaggaacaccaaccctccacacctagtaaaaaaatagagaggtgagtaatcaactttgaaaagtaaaaaacaaattgtctgtgtgaagaaaaaatattgagtattttttttttaacacaaacaaggggctaatgttgatgagtaaaaaagaaaaaaaaaaaaaagaaagaaagaaaagattgtgcaataaaataaaataataacagtaaaagaagcaaaatagtaaatagttgtgtataaaacaaaaaaaaaaaatatatgaataatagtcgcacaaaacgtgagatgaatgtatacttgagtttaggtgtgaatgcataaagataaaagcatctgccacttgattttttttacgaagatatagttcacctcgaagaggcacaataagctacttctataaatacattcacccaagctattagctagggacgaataaagagaaggaaagaggaaaagaaggcgcctagtctcatcaagcttatcttatcaattatgaaagaaattatcctttctttctcttcctctacacaggctgcttgtaagcgtcgaagcataacaacatgcttgtatacaaacttccttgaatctttcacctcaaaatctttcaaaaaagataaaacttcaaacaagcatgtttatatgcacactctttgtttaccttttcttttcctttcttcttcatcttatttctctgaatagtttgcgttgatatcgcttctatttactaaaatacctatttacacacagctgaggccattgttaagaataattttttgaaaaatttgcggcataaatactttatgtttttaattttatacacttaaatatcatatctgtttttttacgaattaaataccacatgttcgtttccatcaatttacgttactaccattatgttaaatgctgattgcgtttatttttattgatcagggacgaaataagtttttgaaattaattcttttgatcgagacgagcccaagagcccaaactttagaaaaatgacatttatatatataaatatatatatgtacatatatatatttcatacaaaacatcatataaatatttttgaagttaaagatgtccaaatttatatttattttgtcaaggaacctgttgctataaagaaacttgtgtattcaatcactctacaagaagatcaaaagttggtcactacgtgacattctctttctttaagatttaaagctcatcgtcatctaatcactaaaaaaaattatttagtcagaataaattttaaaacgaagaaaaattagtgaataaaatatattattaaatttatatacattaaaaagtgtgtgattaaaattttaattatagaaattataaattatatgataggatttccctgtcatttgggatccaattgcagaaaaaa

SEQ ID NO: 195589 - DNA, 898 bp, Cannabis indica
agagagaaagagagagagagataatgaaactatgtataggtgggtgtttcaaagagagtgaaagagaaaagagcattagcaaaggtcctgcatttatacccacgcttacatcaaaaagagagctcttgatgattaaccaccgccactgctactgtaaatattaaaaagacctctctctctctctctcacttccaaagcccaaagcttttccttcccttccttctctcactaccttaaattatttacttcaattaattattaattaatgggataatttttattttatcttcttttattatatgtatttttccttttgtaacttataattattctagtttgagctaccaactgacagtgccagctctcaacctcaagcctttttctttatcttattacattgtccttcattacacattgggagaagagcttaagatctttaatggggtttgtttggtcaagatatagaaccccaaaatctagctcattttcaaactttatcatttgtttagctattaatctaatcctctacaaaaactaaaactaaaactaaaactagaccatttggttttggtttgttattcatacaaaacagtgcattattgtagtggaagatctatggtatagagtcctatccctccttttctgatagcttgaccatcttatctgtcactctattgtgcgggaacatctatgctctagttctatgctccttattttgaccagcccaaggacaacaaaatagtactacactacactcaacctatcaacttatttttattaaattatcacaaatactttatttttatttttccatttaatgttatttgatatttctccaaactttgaggctagtatgaaaatgggaaaccctacgattttttttttttctttctttatt

SEQ ID NO: 195590 - DNA, 2392 bp, Cannabis indica
ggtagatttattgtcatcttatactcttttttattcaattatatattacaatatatttgcaggtttcttttcctaagatggagcaattgattgtggagaaaatgaaaacagaaaagttatggccagaaccacttatggtaccatcaagttgttgctttcaaaacttgatacgcttaaacgtgggaatgtgcaataatataaggtatctattctcttcctctcttgctcaagagtttgtaaacctcaagaaaataaaagtcgaaaagtgtgaggcaatggaagacataataagagtagtgggtcaacctggagaagaagaaagtagttatgatcagatgaaaaggattgatttgttccctaaattagaatctgttgagcttaatgacctttcatccctccaaagattttgtagtacaacagattcgtcattatgtaaggtattttcactcctatcaaagctagacataaaaaaaattgttcagcaaaaaaggcacaaaaaatattatcaacacaagaacttttcttcaataaaaaggtaattacttaattatttgtggtgaaacctcactctcaaaacaaattgttacagcagtaacaatgtctaagaaacacatttctcactttgagggaaatcacttcaagagtgatactcccttttacatccctccacacacactcattatgatcttggactctctctctttctaaattgaatctaaagtatgaactttggagattagaactcagaactctctttgtgaatagagaaacacctatttatggttgtagtatagaattttctttcatttttcccactaacaaagaaaagataaagaacttctttcattaattccttgtttgattgttgtcaacctaaattattatatttaattatttatagaattaaatacaaacgagtatttttctatatatttacgaattttacacacagcattttcaagtgagctatgtgtaggagcaagactctattctggatgaagaaaactctgtaattttacacacagcaatatagtttgttttctgtttgtaactaactcaaccactttactggttttgaagttagttagagcttgttgctctttgtatagattgctctgtaacaaacactgttgattgaataacactagacagtctttctctctctctctctggatcgaatcccagcttttaccggctcgtatatatctttttctctaatgttcttgctgttaacttctggtgtgattatcttcttcactgatattaattctttgagttttttatgttctttataaaagaaaaacaacatggaaacagcaacaatgtaaaccaataaatttatatatacatacatttctttgttgatatgtaattgatgggtagatttattatttgttatcttatatatactctttttatccaattattataaattaattaatttatttccatgcaggtttcttttcccaacttggaggatttgactataaaggaaatggacatagaaatgttatgggcacaacaactcatggtgtcatcatcatcatcaagttctttcatgcaaaacttaacaaagttaaaagtgagagggtgcaataatataaagtatttattctcttcctctcttgctcgaaactttggaagcttaaagagtatacgagttgaagattgtgaggcaatggaagatataataagagtaatggatcaacctggagaagaagaaagtactgaccatgatcatcatcagatgaaaaggattgatttgcttcctaaattagaatctcttgggctttataaccttttatccctccaaagattttgtagtgctgaaaaggtaataactctaatttatatatatgtatataattagttgagtgtatattatttattttattatagttttaattgaaattttatacagaaaaatgacaatgggaaagatattagagttggttaatgaacgaaaaacatagtgaactgaaataatacacataaacgtcatgttaatataatgtgtgtacatatgacaggagttggagcccaagcatcatatagaatattatttatatataatcgactaatgtgtataaactcaaaatctaaacatatatatattgaaatagttgtaatagagggaagagtagtgaataatgaatgattcatctcaaaagtaagccttagattgatttcatgatttcattagttataagttctgaaagtgaaacaagtgagtaataacaattagaattattttatgtttcagattgcatttcccaacttaaaagagttgggtgtttggcaatgtaacaatttgaagtctctgttatcatctgccatggctcgaaatcttgtacaacttgagaaattaagtatatatggatgtgagaagatg

SEQ ID NO: 195591 - DNA, 2681 bp, Cannabis indica
ctgactataataaaatattctcattgagaaatgctaaggcactagtagtatttaataatttagaggatattaattactagttttatatcatttaacgtaatattatgtagcttataaatcatcagtaaactctcaattcatggagatctgtaaaaagtaaaaacttagttgacttcacagtcaaagaaaatgtaataatggtatcctatggtccaaccaaagcaatgaaatgaatacaaaaaaacctgataaaagattcctagttcctacacgtaatattgggaaagcagacacgtgtagaatcttaattaaaaagcaacaagtgggagggactaatatttattacgctgttgccccactctcactgtttgtgtaaaatgatgtaccattattgttttttcccttatatattcttcttcttctttcgaaagaaattactttgatatattctcattgaaagctacctctgaggctgctggtgctgctgaaacaaaggctacctctcccacactcatttgggtattcttaatttacattgagatatcgatcgagtagggctcatttattattattatgatgttaatgttatttcatagtagcacgttactatgagtcatgacatatataggacctacattgttgcttacatcatcaacgcccattaagtcttattttgattttatttaagctacagtatttagtatttgtcattttaaactttactaagcataaggtgaaccaaaattctggagaacaatttgtacacataaaaatttagtaacacaatttaatatatattaaagttcgatgatgcattcgttaataaaatttagcggaattaaatgcaacaattttaatagttttcaaatttttaacaatttcgaagttaaaaatttaaaagatataatttgttacgtgttaaaattttaagaaaaaaaaatatacgtacttatataaacattatattcaaatattacatacaataatgtgatgatttttttttaaaaccacacttatcaaaattgaaacttgtcgtttgtaatgtttagatgtaccatttctaatgaacaagaagtgatagatttgtccctatggccctactacttttatatgagaaaactgaataagaaacgtaatatcaaatattttaaataagttgccaccaaaaaaaaaataagcaaatatatttgccaaataagtaattttagaaagtagtacatatttaattatttatcttctacccattcaaagatattctgctctctttatcttctcttctctactttccccctcctaagcatcccaatctaagtttttttaaataaaagcacccattttgaattcacttttttatctaagataacataatttacatcactattattacataaaatatgcacaagttacatagatatttatgacaaagtgaagatttctattcaaaattataaatacagtaaaataaatgtgggttcttagaattcaagagagtacaaaatataatcatataaaaataaaccatatgtcaaataaattactatcttattgagttttaaaatggttcattactgaaaaatataattctgaccatgacaataaatacctttgtttgttgttggaagttcaagccattggaatctaatctattattgaaggtcccttacttcccagatccaaagacatcatcaaaaccgcccaatccatccccataaaataacttctgactttcaattatattttcaaaatgaaaaagaaaaaggaaacttgcaagtggcagacataaactggggtcttgttttaagaaccatgcagctactctgcagcagatcttaacacaatgcttcaccacaaacacttcactatttggtcagcttgtgaattctgatcttcgaaatctcgtgaaccccttcagctataatttctgagccttttgcttgcatctcaagtcagcaacgagatggcggatgtgtggggcgtaccatttcactctttccaaatgttcaacagaaacatcccaacaaagacctgcagatcaacaagttagacaccattttgagtttagaaaggctatgacaaatcttattattcgagagctttaatctagtttgtcttgaattgatatgtaccttcagatttagctattgcactgattgattccgctacatgttctgcccatgaagcttcctctgtgtctttcacatttccatgaatgtgtagtattccaccctcattcctgtactaccaaagagactcggtgaaaatgtgcgcagcgagagttgaaataaatagagactgtaattaaagacatttcacatagcaaataatataggaagatatatcaccttagcgcccgaacagcagtgacccaactaccctcgctagttggaagaagaccaagattaacttggtcagccactccctgtaaggaaaagaaatacatctagggattagcattcacagcaaatgtcctttatcaacagatcggcacaacagcttaatagtaaacacaagaaaaaaaaaaggagcaatgaagaaaattagagaattaatcgtattaaagaaaaccaacgggcaaccataccttaggtgctgtaaccctgttatctccctccagtacaatacagcgatccgcaacagaatttagttggaggttacgtctaagtgcctcaatagcatggggg

SEQ ID NO: 195592 - DNA, 1517 bp, Cannabis indica
attttcttttttgcttattttttcttaccacgattaaaagtaaattttgggcctaaaaatctactaggaaaaaatctctttttatctcgtttggtttagcttctataagctctttttaagcttttagaattaaaaattccttctaggtgtgtatggaataaaaataaaaattatttttaatttaaacttccttttgaaagaagttaggatttgtagattcttctaaaaaaacttttgaaaagcaatttttaaaattaaaataatttacataatttataatttacttatatatatatcatttttcaatgatattcaaacattttggaaaatattttttattaaaaaatatatttttataatagtaatccaaacggtaaaaataagataaaatttatacttatcttatacttctaactataaacaaatgtagaagtttaattaagcgagactaaaatatattaaatgctcttaagataataactattattaagttattagtaaaatttagttagaatccaatatagtatgaaaatagatctcaaattaatttgtgacgtattgaagaatatattaatgagtgaaccatttttttttggtaaggatgagtgaaccaacatgggttctctctctctctgatctcttttgcttaattacatttagatgaattaaatttatgatatataacctcaaatattttttcccttaacaatcattgtggtggggctattataatccagtatgttgcataaaatatgtaacacattatcgttataattactatatatcttataatctgtgaagtgggtagggtcggttacaaatttctctattgggtctttttcatttccttaaaattttatttgtcatgataagaatgatattctagggttttatttccactctaataccaaaaagattaaaaaaaaaaaacctaataataaaagcaaatggccaaagtttctataatagtactaatacccttatgaaagtaacttcccacctactactccttcttcctttttcatcttttctttttccacttatttttttgagatgactttgatgtgtgaattggatttttactatgctttaattgcccatgccatacgaaaagtagatactattcattcacacgtatatatttatctagcaaaaaaataaaagaaatgaatctgaaagggtgggtcttagtgtttactcttttttcattggatatgtattttctaaactaattacttataattagatatataacaccatataagctcaaaacagtccatttcatattattacaaactttaaacttgtatgagaaagaaagagatgagagaagccatatggtccatggcttcctttttattcaatgaggatttgacatgtctctccaacaataccttcttcattttagcatttatccttttatgacttgtactatcatcttagcaatatgtggtccacttacagttttctctctctttctcatctatttttcagcgacaggtgtacctatataacaa

SEQ ID NO: 195593 - DNA, 1053 bp, Cannabis indica
tgttacctagttttagtttttagaattagtaaaactagtttaattctaataatagtaaagtttacttactttaagtaaaaaaacaaaaaaaaaaaaaaaaagaaaaagaaaaagaactgagctctgtacttagagaggagccatttctattattttttttttatttacaattcttattttatttttttcaaaaaattactttgtttgctacaaaatatatacatttagtcttttcttttcaaccctaaaaaagtaataaattttctttatcctatcctttaaaggttccaaacatctcgatatccacgaagaaatgtgaaaacaactttggcgtttccatacaaattagtgaaggaaaatgatatattatgatatttataatattttatcaaggtgacatgttataattaattattattttattaattcatatttcaattataggatatatattttcaatatcaatttatgatctgattagagaaattccattgaggataggaattggtacccatcctgatcttgaatggccttcttttatgtacttgtttagtatataacctctataaattaatagctccattaaagaatacttctgattccccttttgaagaaaatttataaattaacacaattaattaataatcccaattaaattatatttttgtagtctcacctgttagagttttaggtaaagtgattgaggttggatctcaaaactaattgataaagagatgaatagttcattcatcttttactaaaatagttaaactaaagtattttttatattttttgagatttttcttttttgaaaaaaaagtttttaatatattataaaatattatatatatatagaacactttttaatgggtattacccattaaagattattaacaatttaactataaatattaattttaaaaatattaaactattagattttcatccaacgacgaataataaaaaaaaaaactttagaatttctatacttaatttaaactacgtaattaaaaaaaaactaatacaaaaaataattattttttactactatat

SEQ ID NO: 195594 - DNA, 1364 bp, Cannabis indica
gggctggtttgttcctagacgccttgggaagaataccggtgttgtgccagaaattatgtaagttaaagctttctctagaaaaatagtaggagggagagtgcgggattcgtggaaattattattgcggttgtaccaaatatagcacgagacaaaaaaatgtttccatttgattatcatcaaagtgagagaaaaacgagtgaacaaagtcattgttcgttatggaggatatactagtaaaatccaagaggaaaggtaacaattgccaaatcctttttcacatgtttacaaaggaaaaaagcatggttaagagtttcacaaggatggagcacctagagcaagaatgatcatcaataaaatgcttatgatggagactggcagcaagggacaaaggatcatggatcactctccaagcaaacattttaatcttataaggaaatttcaacttctataaacgagtccaccaactggaaaacgagagagattgtgatggatatcttacattccttaaagaggtggccaaatggtagccacttttaacagtataaaagccagttgtagtgtggtgccaaacaagtccatcttcgagagcatggagacttagaggaaattgaaggatacgatcaatatcaatacttaaaaaatgtctttgtagagaaataaggtctcaagtacgattcggtgtgatgagatctaaagcacgcagatcatggcccatagtattaacatgaaaaggcttaaaattagtatgcctggaagccaaggttcatcaacacatgggatagaggtatttgtaccaactttccaagaaaggccatcaagaagaagctcttttccccaatgaatgctacgccaaatataggatggattattacccaatctagcatgtaagaaatcagtccgattgaagtattgaggaaagaggattcagaagaggagagacactgagttgtcaaataaccgcataagcgctgcataattaatcatacccctaattttgcttcgaagatagttgagtaactcaaaagctatcaagacattatcagtgatgagacagttagatatgaaagcactttgatgttcagaaaaaaccagatgcagaaaaggcttcaaccgaaggacaatggcctcagaaatgagtttgtaaaccacattacaaagactaataggtctgaattgagcaactgtaacgggttcttcacctttgatatgagggtaattaaagttttgttgatgtgagaaggatccacttgattattcaagacatcaagagcagcaattgtgacaagatgaccaataatagacaaatggttagtgaaaaacatagccgacataccaataggtctaggtgttgggttttgtaccct

SEQ ID NO: 195595 - DNA, 1115 bp, Cannabis indica
tagaaagtactaagaaatagtgtccaataataatgctcatcaacaaaatacgtaatgaattgaactaaaagaatctatacttgtccgggtccccttttgatgttgaaagtaacatccaatataattcacaatttatgtataaatatgtaagtttaaataataatttaaatgcaaaaatatttaaatacaaatagtaattttaaaatgttgatatatttactaaaaaaatatactaatatattaaaacttatttaaacaattaaattatgctaggtttttctattttttaattgaaattcaagttttttataattatcaagtgaatttaataaacaatttaaataatgtgaaaatgttataaaactgtttgaacagaaataaatttactatatgagaaactaaatctgataggtcaaaataatagagaagaaagtaaaatgacatgcactatttttatgtggtattaatattcttgtgagtactcctaatctatgaggccgcacttagtgaataaaatatattagtaacatctctaacaattacaaaagtatctaaattatacaacataagactctctcttaatttgtacacaaagaactcttaaaaaaataaaccacaattacattttcaaagaaacgaaagaggtaaccatctcgctgcttattttaggtgttatttatagggataaatgacacccaaaatgtaatgaccgctttaataatttggattagtaaaaacaattagcactaatttttgatatttttataattatttatgaatttaattatttatgtgccccattattagaaatgggcattagagttataatttctcaattctggagattttattaaactctatgggtattttatgaattatatatgaaatatactatttttgtaaattttgctcggcggcaacgaaaaatgcgatggatggctagtttgatcacatgggtaagtttagaaccttatttcttagtgggaaatattttatagatagtaaaatatcgaaattgaacggggttatggaatttgaccattttacgcctagtcttgaaagtaccaaatttaagattatggaggatattttagtcatttgttaataaggttatt

SEQ ID NO: 195596 - DNA, 821 bp, Cannabis indica
cctctataatatgtgtaagataatttaatcatcataccaaaactaatattatgtttataccattaaaaaaaaaaatatatatatattatgtttatatttatcacatttaattgcaaatatatgttataactaaccagaatacatatattttgttttcctgatttgttatgtcgctctgcgcccatatacatgaaatgtatcaaacacactcataaattgtgtttcttttaggcaatatcccaaacatacattcccaaagtactaaggccaaccctgagattgggtgaaaatatttttttaaatccctagactggctgggctctagacgcggccttagcccaaacttaacctacaaagcacttacggtcctatatagttacatcatacacaatcatgaaaaaaaatatataagaatcttctagaacacctctttagaaggtgtgctacaaaaatttcttaaattttatttcattctatttttgttgcttgtgtttttatttttatcaaccaaacatactcttagagtttctttgtttcttttttcttttttttgcaagtggatctcttgatcgaagtgctaagcttcggcaaagagaagctccccaacatgcacatgtgagcgctacgctgatgaagcgagtggaaggtgcgttggtggtggtggtgctcgggagaagacatgatctctcctgcggccacagtggatctcttggtttcttggccaatggtaatggtgaagttgcttgtctctttgtgatgtttcgtcttttttcactggtgaatgcatgtctttgtctatatttattttggcttgtttgtaa

SEQ ID NO: 195597 - DNA, 1430 bp, Cannabis indica
gtttagccgccaatattccttctttttaacttaaagttcatatggatcaatttttttttaagtttagtctatcttagcttagggttggacttgctacaacacttagcgagagtggttctgtctcataggtgaccacaccttaaaactgcacaacttttaccgtaaaaaatattgtataaactaatttttgtaatttagatgtatttttcgactatgaaatgtgaactcttttttttcaaataaagaggaaaaattaagctaaatggagaatatgggaggaagacattagaaagaatggtggtttttagagagagaaggttatgaaagtgaaagggaagagaagagaaatgagtttttgagcacaaagctaaataagtcctagttattagctaataaccgaagcctaaagtgctaataatcttttttttttctttgatttctcattcaattttttgctgaacgctaatctaaacgtgattaaataagctatatttttttctaaaaaaaaaagctataatttttttttttgattaattaaaaatatcacaacacaaattgtcacatttctttaatgaaaataagagtaaaaaacagtataagcactcaacgttttaagtttgtaaacaacataaattcaatgtttatttttagcggcatgagtacctaatgcatttaaaattataattttcttttagttttatcagtaaaaactttattttaaatttattaaaagaacatttagaagtcacgaatactatatgtttctgttgtaaggtgatcgaatatccttatatgcaggatgatcaatcgtagttggacaagtatttgggataggattgagaattagaggaacatgatctgttcaaacttaagtatctgtagaaatttgagattgcggcgaaactagaggtgcatcgattactggaggatcattatcagtggtggtagctaaagtggtggctcgagttctcgccattgaaagagtcttagagctgcaatttgatttcttgaagcttcaattgtatgcgtctgatatcatattagtttcagagagagaaaaatttattgatttgagaaattgacaatatataatggctctttatatatagagcttgaaaaagagttgtttgagtacaacaacttataacaaaaatataactagactcaatgatctatattttgtgttatattaattacttataccgctaaaaataaatattgattttacatcacttataaatttgaaattttagatacttatccacgatttactctaaaagataggataattacgtaaaacactaacttttgtaaaatttcactttcttacgtacaaagtttttttttttttaatatttttacggtattttattaaaacacaaaaaataaaaaattaacataaaataacaaaaacgaatatcaaataatat

SEQ ID NO: 195598 - DNA, 1126 bp, Cannabis indica
gaatttttttttttttgaatttttatatactattttttttaatttatttttattggtcttgtagttgttctgtgaattgcaatgtgaatttgtgtaacgatttaaattgtttggtatatttctgtataaatataaaaataaaattattttaaaaatataaaaataaaaaaaacctcaaaacaaaaataatttactaaataaagtatagaactaatataatacagtcaaattctaactattagttaatttcattttgacaattaagtgggaaaaatattagatttaactttaatgaagtcttttgtgattttgacttcaaattgggaaagtcgaaattgcaagtcagcgacccaaattttgtattgtaaaagaaattttgagatgtcccaaacagttcccttcttatacaactgtacgagaaattccatggcatatatgtaaattaacagaattccgaaaccttttttcctttaaaaaataactaaaaccgccgcatttttttttttaaaaaaaaaaacaatcaaaaccagaaagctataagaacaattctttacgcgccaaaaaaaaaaaaaactaacgtgtgcacgagaaggaaaaacaaaaaaaaaaggaaacttttgttataaatcttgttagagctacttagcataaattttctgatgttttgtgattctgaaagagagagagaagagtagggttgtcctccaccgttgctttattgtgctccgcctcagcagattcccgctttctctcacactttctcttctgctagatagctttatcaagtcaagaatcttctctttctccctctaaaatcatctctctctctctcagatattctctttctttccataaaaaataaataatcaaataaatataaaattaacgatccacaatgccttgttttccttctcctttattttcaagccgttgcttcaaatttgtttcctccctttctctctctctccatttctctggctgtgttctctgttttctctctctgtgcgtcactgtcgaattttaggttccttattccggcgaagcctatatagctcgatatcatgacttcttctgaagtcactcatctttctcagccttgcatttacggtatatatatacacacaca

SEQ ID NO: 195599 - DNA, 2086 bp, Cannabis indica
gtgtatcctcctaaaagaattgtttaagattgaaaaaagtagtatttttgttttagtgacaacagactaataaaaacacaataatctacaatgaaatttaactttagtgactagctaatattatttttagcggcatatttttaattgataacatagaaaatggacataaatggacaaataatacttttcatattgagccttaattataaacaaactaacctttgacaaccaatgcaaactgtaagaagagtgaacaatatgaatggaattgttcggaaaaagtcttccataaaaactccctggcatagccgcgatgaagcatggcccaaacttatcgcccttttcattcttaagcttatcatagaaactcgaaagagattgaaagacggcattgaaatcgttcccgaaaagatcgttgagaaaaacttggaaagtgggtgagttgatcttcaaggattggcaaatggcttcaatgatgtctaaaatataagacaccacagttagtgtgttagggccggacgagcaacccaagtctgccatcatcaaacattctggtaacattttattagtaccataaacttgttttatagtactttccagtgtctctctcgcagttgatatcgccactctctattattaaaaattatgtatgaaaccattaatttacaaataaataattaatttgaaaaatgaagaaatcgtgtaaatacataaataataaaatgtagatattaaacatacttgatgagaggagttgtttgcatagctagtttggccaacaccaccattcatgtgtaggacttgctctgcatccattattaatattagtgttatagcttttgctctgtttttattgtgatgagagcttgtatatatttatagtgatttgtgctgtccaagggcatattttacttttacatttatatatacacatatttttattttaccctaatattaaaaaaaattaaataaccatttttaatattttttttatattatatttttgtgttaattttaataccttcccattatattagttgtcgccagagctagggaacctgaaaaaatatagcaacaccaaaccaaaaatacagttatattagaatgacaattttcaaaataaaaattaatatacaaacttataatttaacacacaacttaaaatacaagctcaacattgctaaaaaagtaaaaaacaacaaaaattctaagtataactagccaaaggtattatcctttggctagtaacaacaaactagcaccttaatttaaaattgctgaaaatcaatatcaaactggttatatttaaaattaaagttatcggaaacttctctgcaattgtaggccctccacaaaataacctacaaaataacaaaaaataaaactctattaccacacaatataataaaaagataatataaaagaacgatgatagtaaaccaaaccatattaaatataaggacttaaaaaagactttaaaacttatctgttaaaattgaaaagttcattgaagtagaaatcatgagtacaaaaatggattacaggacaagccataataaatggcacaatgccataaaaggcacaaaagccttaaaaggcatcaaaactataaaaagggtccaaaaacaagtgtggtcttattatcatatatactttaaacttataataattaatactatttgaataactagtaaaatgaaaataaatcctattacactatattttaatacaatgtgtgtttggatatatatgaagtgataattacctataaacttttaattttattggtaaaataattagtaattacacccaaaaataatatttttttggtagttaatacttaaaacttttttagtaatatttaccaattcaaatgggagagtgtaattgtttaagtgtaatatcaattatttcaaattacataattaaagtataattacataatcacatccaattatttaattaaagtataattaaattgtataattacatccaattatataaaaatctaaatacactatagttaatttctaatttcctaacgcgctttaaatcacatcttacttttttttttgtttgtctttta

SEQ ID NO: 195600 - DNA, 1786 bp, Cannabis indica
cataatttgattatgatggtaaacatatctaaaccaagacctccaaaaaaatttagaattgcaaaagctttcggaccaacccgttttaatggatttaattcttactgttagagttacctaccaaaagttagtcatgagaccctcaagactcttacaatcggacgcatgtaatttgaaacaagacatggcataagaaggaacaacctggaccacctctttaacaagagtttatttaccaacctttgccattctaacattcattttagaagaaacattttgaagcaagtaatggatgacaaacttgttaactctaccaagacattgaggaacacccaggtacttactaataaaaccatcattgttgaaacccaactgattacaaaaaaaaactctctatccctagaactagtattaggggagaacaagatagaagacttggcaaagttaatagcctagcctgtaggcacacttatagatatttaaagtctctttaataaccaaacaagatttattattaacagtagtaaacaaaaggctatcatcagcaaaaagtaagtgaaaaataactagtattgttctatagatagaaataccagcaaaatctctagcatgctctctaacatgaatttcacctgaaagaccttctaccaccagcaaaaacaaatagggggacaaagaatcacattgcctaattctcctagtagaaacaaaactatcagaaaaatagccattaataaaaaacttaaaggaaacagaagaaatttacttaataattatagaaacaaaactggaagggaagccaaaatggtaaataatagcttcaatgaactccactcgaccctgtctaaggccttctccatgtcaagtttcaaagtagcccacccatattccccttcttatgatagatagcattgacaacctcattggcaatgaaaatattatcaaaaatcaggcgatctgaaagaaaagcactttaattatgagcaataaaagaattcagaacaagcttaatcctattggataagaccttagcaaccactttataaagagttgagcaaagactaataggcctaaaatcacgaattttttaagcattctttttcttaggaataagaacaatgacaatatcatttattggagaaacctcagagttattattaagaatagccaaaatagccttacagaactcgggaccaaaaattaaccaattcttttaataaaaaggagcatttaaaccatctaaccccgtgccttatcaccaaaaagatgaaataaggcctccatcaccttagcttccccaaaaggagcttcaagcaaagaaacctgagaagaattgtgtctacaagaaatcccatccagaatgccacaattagcatcctagttagctagaatgtctttcaatttccccaataatgtcctcctccatactcaaatgttaactactctccgacataatttcattgatggcattctttttcttcctcaaggaggctttattatgaaaacacttcgtattttatcacccaaagccacccaatccgcccttcattgtgtttccaataacactcctccctctacatcatttcttccaatttgattttcaatattttcacctcatccatttgaactaaaggagcatgttgcacgcaacaatacttaaagctttctctgtgcttcttttattttacatacatgcaaaataaatgataatttaattgtatttttgtgtaaagtactctcaattctttgaaactttattggatatctagcttaaataacaacaata

SEQ ID NO: 195601 - DNA, 1258 bp, Cannabis indica
aaattttaaaatatgtgtattatgtgatgatgatatattaatataaaaataaacgtatggcagtttgcatgtataaggtacgtggattcaactaatcatttaagatatagaattatataattcgacgctttgaaagtctatacacacacactacatataaatatatcagcaagttgtacaattatttaattagtcaagcttttccagtaataaataattattagttatatatatatatatatatgcgtgtgcgtgcatagtgtgcatatttataaaccacaaaactggtcgaaaaatatcagcttaaatatataaatctagaatatgatgaaatcatagtggttactggttagttcagaatgtggatgaaatacaatgcattaattaatttcaaatattattctaaatcttcatgatagaacatatatataattaacttaacttgtatatatgtataatcaatgcttgaagcttctcacaaattcagtacaattaattcacatgtgatatatatgttacattgcctcatttttaagtttggtatatatataaatatataaaagaatcggatgtgtgcgcaccttctagctagctagctagcttaatacaagattagtcttttcggcgcaattattgtaaaacatatatatgcttaagttaagtaattatataaatatatacatagagagagagagtttgttcttctctaataataataaagactacaagaatgaaaaccacataaaaatttgaacgaaaacaacaatatattccaactaccgaccaaataataaattgagatcacgtaaatctttgcttccatattatattatatattctagactcacgtattacaactacaaaggagagtatgtatcgaattaataaatatttatatataagaaaagactgcatatttttttctaaaaaaattccttaaatcccgattggttgttaagctaaacaaggacccatatatataattaaatatatattattgtcaattgataatagtatatccttattcaatttcgtacgtgatggggtttgagtcaatttgttcgagccctctctcgaaagttttaatttacacaaaatagtacaagaaaaggtgcattttttttttaaaaaaataataataataataataataaataaataaataaatgaaaagattgcatttggcctatattgcggatgaaagaaaaacaaactaaaagtcttattgattgaatgaatggtctgtacaaagggacat

SEQ ID NO: 195602 - DNA, 816 bp, Cannabis indica
tctcttttgaatcagccaagtggcagtgcaattgggttaatggtgaagaaatcaaatgtcattgcttcattggctcagtttgtttctgggcaggtaatgcatttggattctcatagctttggtcattgttttagcacatttgggcaagttttgtatgaacttccaagaggaacaaagctctcggtcatgggacttttgcaatcaccaaaattagcatgccaattacctgcctcttatggaccgttcaccctctctttaggtggttctaaacatcaggaaactcctgagggaatggttgagaatttagtttccaccattggaaatagctcacagggaaatgtaccaactgggtccgttgctttgatgttggagtcagaaattgacgagttcactaagattggtggctggattgagcttaagaactcggatcccagatatctaaaatggggggcgagtttgtcggatgattctgaagattcatttggatggggaatgaagtttggtgggatgattgaaggtccctcaaattttgatcattttcaggttgaaacttacatgaaattgaactttggaaagaaattcagtataaagcctgggattgcttatataatggatgggaatgctagagtaactgcactcatgcttcggtctaattggtcactttgaccaccatcttcagctcgagtataggtccattgtttgaaatatcaaatccagtctgcactgcaggtatatattcgacttacatgttcctacaactggtgtttatatatctgatttaaatggtgcaaaggaagttgtttacctttttttttt

SEQ ID NO: 195603 - DNA, 727 bp, Cannabis indica
attaagacgtagttatggaggagagtgcttgaacaaaaaggctaaagagctgatcaggcttggaaaaaaaaggggagtgatcgctttcaatattgaagacatgggtgggtggccacatcaatatcataaggtcttgcatcaatgggctgcacatttcatccttgagtgtctttatgtacactctcgctacgctctccgctccttcaccacctttcccaaagttaagatctaggagactccaaacagggctaggtctcaacagcatcgacgccattgtcgagtcctgatcatcatcatcatcatccatatcatcatcatattaattaattaacttaattaatgatcgatggattagtaattaataatattaattattacctcaatagggctcaaattgtacaaaacttggttttgaagttcaggcttaaccatgatgccggttggaacgggaagacctttcgttcccattataaactcgtacgaggaatttactcccggaagggcacgcaccaacttacaaaattaaatattaataaaaatgtacttttaattacaattaacaaatacaatcatgatcattatatatatacattgttgttattatgtcgaagccagttctcaaaaaattgctaccattttaacaatatatacattttacgtggtattaagttcatttcataaaaatactttttgactgtattttgttaataaattttcaaaaaaaaaa

SEQ ID NO: 195604 - DNA, 1400 bp, Cannabis indica
taatattgtttggatgtaattattttgtcgtttttgtgttatttttatgaacacaataaaaatatatttaaaaaaaaaatctttaaacgtaaaagtgtaaaaatctacctaaaataataataggtaaataccattgtggaccctatgttttgcaaaagttacagattaaaccctctattttgttaaatgacaaaatggaccctatattttccaaaatagtaaaatagtgcttaattttcgatttttttaaaaataaccaacttgaagacaattcctaacatgaacagatacaaaaaatataaacagttttgtcataacacatttagatatcggataataattaataataattaaatttattttgacaaaaaatcagttaaggatcctatttgtactattttagaaaatacaaggtctattttgttatttaacaaaaaagagagtctataattagtaacttttacaaaataaaaaattcaaaatagtaattaacctccaacaataacttatgtaaatttctactataatatatcaataatataaaaaattaagggctaaattgtcaaatattttgaaaaactatatggaaatatatttttttattctaacaaagaagaccctaaaaaaagttctttaatttggtgtaattatttttttaccttaatgtgacaaaaatttggttggcaaaaatggcatcttattgtatagctaggtgttaaggaatggaatttgagaattctagctagtatccaacaaaatggtacaaatagtttcttaataacttttattggttggaatccataatcatccaaaatttatgagaatattcccctagttaataggaaaataaaataaaattaaagaaatgaaaaaaaaatgaaatgttggtcaaggagttggagactaaaagtgatttgtggttgaaatttatttgttaattagaaaataaataaataaggtgagagaagaaaatgggtcaatatgaccataattggtctaggagtacttagctgacttttaaatgtgattagagaaaacataagtgaaagaaaaaccctttttcttaaaattaattaattgttaattaggtttggtcaaactcaataacagacaaaaaaaaaaaaaaacaaggaaaatgtttctctttttttttttttcccttttaacacaatttttttttctaaaaaaatcaaatagaataaaatgtaatgataatgatgatgaggtataattaccctctatgcaataataatgatataatattcatttggatatatagtgtctagaaaaattattaaggtgccaaaatgcacaaacaatggtttttggaatctttttgcactaatttatagctcttttattggtgtgtgtatatatatatatatatatatatatatata

SEQ ID NO: 195605 - DNA, 2795 bp, Cannabis indica
aagaataataaaatttaaattatgaaattatatgtgtataatttgaaattataaaaagttttgctataaaattctaaataatttaactataaaaaaataaattgctaaaagatccttatatagtaataaattgcaaaaaattaattaataattataaataatttaattttaaaatataattaatcttaattaaagttttataaggaaataaatgattaggttactttcaggttacaagttatttataatttatttttatttaatttccaaattaatcacaaccatttaatagtaatccaatggcttaaaaaaatgtaaccatgatggttacaataaaaatgtaaccattgaaacctcttccaaaatatatatataaattaattatttattataaacagtccggtccgatttaaccgttaattatttattacgaaccgcaaccgaaccattacgccgtaaacggtccggattgaccaaaccaccaaaaacagttttccggttacagtttacaatgattagaattgtagtggtccgaatttaaactgcaattttccagtttatatgaacagccctaagtttgatatcataaacatcatattttcattcattctaaatttaatgctaaaaataattggtgattttcacacaagaggagatagttaccatactgaaactcaaaaaaaattataccaaattaaaccaatttgattcagtgggataagccaaaaagatgcatacaatcttttcttgagcagaaaatgactgtgattgagacccctcttcaaattttaatggacttaattgttcatcctacacgtcttgtttgtctgtagtcttcaccacgatattgaattgaaattaaatcataaaacatgtgagacttttatccaacgataagattaactagaaataatggtatttcataatttcatttacttatgaaaaagatgaattggacagctcttttaagcgtggcacatgtgattggtttattttatcctaatatgttccaattggaattggaaaaccttagtagtaaaaagaattaaatcaaatatataatgtcacttcaatggattatttcactatcaagaattgggttgtctaattttcttcctcgagcttcatttcatgccatatatatttagaaaatgcaaactagtttcctccttccttccgtttgctattttggaattatttcctttctttctttgaccttttccttttaaatatacaaaatataaataatctgcatgagctatgaagagcaggtcaagtagttcaggttgcaactaattgtaaacaatagttggaaaagtaaacattatagttttatataggatgatgaaaatgtcactcttaagagataagtttattttaatgaacattctagtctagagttaactaatctttatattttttgtgatgatggattgttctttcagtagatgagataaaaagaagaaaacaaaaatggtttgaggtagccatgatcttggtatatatcatcttcattatattttaatatatacatatattaattttgttagagatgattaggaccgtccagttcagctaaatgacctttttttggtttgaaagaaagctttcatctattatgagaggcataaatgtgaacagcaagaaatactagttgataaaagcaagcaatcaaatctgagtctaagatgccatgacaaatgagaaagttgacaacctttttctcttgataacaatcttttaactgttgaagtgtgtttcaaatcccatttgccctttgataacacacactcacacaagtcacaaatcccttcaataaagttttgaaggtatactattgattgtgcttgtcactttaagtgaaccccatttaccaaaaacactcaagtcaccaccaattttcatctaagaaaattgagtttgaggggtcaatgtctcattgcttgaaactcattttaatgcctaagacttacaaacaacatcaaagttggtaatttaggaaagttatatagtagaattagaaatattttcaaatgttggagttcctatggctataagtagcttttttatttgatttgatttatttattacattgttggttgattgacaatgtaccatttgccttttattctaaagccactattgttggctattagagaagaccttaacttcatgagagtcatactcatatgggcatatactatgagagtctctatttgtatctttaccaatttagggacatgggtttgaaactaagttcaaaaaagaatctgcccaattatatagtcaaatgcatcataattatgtctcaaaacgataccctaatttaatatatgaatcaaattttttttttcatcaattccttagtataacatatctgaacactagctttcctgctagtccaaaaccaaaatccaaaagtaactatctaattttatttttttaaagtaagtattttatattattactagtgaaattgaggggggaaaagtgtaatagattgaagtatatattggttatcataatccaatcacacaacaatatgagaactactaaaactataataaggggaccaatagagaaatactaagagccaaagtgaaatttcaatcactacaatatgtgttatattactatcggtctattttaatattaaattttatataatttaaatattaaaattactaaccaacttaaaataaagacatgaatgtcttaacatatgatctatgatcatcaagctcctaaggctaactttttttttttttttttttttggtgaagaggaggtgcaaa

SEQ ID NO: 195606 - DNA, 770 bp, Cannabis indica
atctctaattagagtgaaaagagttaatatttaatcaaaatacaatgatttcctttaggacaatttctaaaagacgaaaaaagatttaccttttttatcactaacattttccatcttagtgtctttctttaccatcttaccccaactgaaaaaaaatatatatatatctcagagctttattgtagttaattaaagatttaaaaatcttgagaagaaaaagagaaagaaagtaaagtcaagtcttccaaatggcaaatgcagtagggtttcaggcatggaggaatccctttgtctctctatttttctgctaaggcatctgccaaaatctgattttgatttgattggggtggcacctctgttaatatcactaaacttcaccatcttcttcttcataatacattagatatattatatatatattctcttatcacatgctgctgttttactgtgcttagatgaaaaggctacagaaaaagttgtttataaaattaaaatagatctacttagagagtggacttttcctaattgctattattatataatccatatatataatttgatatgtattttatgattatgctttcttttaactattgtctcaataaagatttattttatttatatttttcattctcacacccctctttgttggagtacaatattttaattgttctatttttttcttctttcttttgaataagtactgttctatatttttttgggctattaaagcaaaaaatgaaaaatcacatcctaagcaatattagtgc

SEQ ID NO: 195607 - DNA, 2829 bp, Cannabis indica
aaaaactaaaattggaaaaataagacccaaaactgactataaaaggacagccttgtttctctctctatcaagagttttctatctctctcttccgccatttctctttctctctctcacttaaaaaaaccagtggctcaatgctcttctgcctctgcttcatttctctagcagaaagcagaaatctttagctagagagaagaagaagaggaggaagaagaagagtgtttgggagaaaggaaagtacagaaagaaaatctttcttttctcttctgtactttccatctcttattagagagagagaaacagaaaagagggatctgaaacattttgttctggtttcgacttttctgttccgacccaataaaaaaatccattctttttcagcattcaatttcaaagagaaacaaagaaagaaaatcccttttgtattttctcgagaaaatggcagaaacagctcagaaaattctgatcccagaaacgtttcagggaggacctggtgttggatatgacattgcatctcaaattggacttatgtgggagctaattaaagcaccattgatagtcccattgctgaggattggagtttacatttgcttagctatgtctttaatgcttttcatggagagagtttatatgggaatcgtcatcgttttggtcaaacttttctggccaaaaccagagaaaagatacaactatgaacccattcaagacgacgtcgaattgggctcctctaatttccctgtcgttttgatccaaatccccatgtttaacgaaagagaggtatatatatataaatatctgaaactcatctctttctttatttcattttggcctaaaaaagtttggatttttatttcatttttcaggtttacaaagtctccattggagctgcatgtgggctttcatggccgtccgatcgtctcgtgatccaagtcctcgacgattcaactgacccagtaattaaggtaataccaaacacggtgttaaagtttggatttttaccatttttgacatatttgacaatacaacccataaataaaaacgacaactttagaacaaaacgacttgactttttttttgggtaattttttgaagcaaatggtggaaactgagtgtcaaagatgggctagtaaaggcataaatattaggtaccaaatcagagaaacaagaggtggttataaagctggtgctttaaaagaaggtcttaaaagaagctatgttaaacactgtgaatttgtagccatttttgatgctgattttcgaccggaaccggattatctccgacgtgctattccttacttgactagaaatcccgacattgctctcgtccaaggtcgatggagatttggtaattttttatttacccttttctttttatgacagttattttccttttttactgctttaaatattttattgagtgtcggtggtctctttaatcaaatccagctgagcttatctaagttgttctttttttccttttttcttttttgggcatgaagaaaaacaaattgggggcccacttaagagtaaaacccatcaatcacgggttgggctgcgctcaatttgggcccacattcattttttttttttaattttgaaaattgctaaaatatcgtaccagtaagaagcattttaagattgattagtaatattttttattaaattaaattatgtggcaataagtagcaatgttctttaatttatcagttacatattgaaataattaatgtaatttagtagggtaaagcgtttttaattttatgtttttgtaattaattattatgggattattaattgttagccttttttttctaatgttattaatagttttgacacaagtgttcttgtagtagctatttttaattatacgacatctgaaatgacgtaactgtcctaaccttaatagttttggggttgaagtgatggtgacgtgtcatatcaaagggggcacagtaatagtgcaagaattccgggggtaggtttgtcatttcgcgacagaaagaacgtaagcagtgagtttgtgaccgagtccgggttgtacggacaaaacggtcaaactcaattcttttttaacactgaaaataataataggggtagttttgtcatttcaactccgtcgaggttcgttttggcttttcccttttcctgttcctgcgccatccacgtgcatggtttcaattttacctgtttttacttttttaataataataataataataataaagaagtaaaagcagttggggttgcacagtaagcttttatggtggaccctcacacctcagctaccgacacttggagtgtcgtgctagagatgacgtggcgcgttctgattagtgtcacgtgaggacaaaaaacaaaagggcatccaaacttttccaaagttgggagttttctaattttaacctattattagtattattggctatatcaactaatcaaaacttgccacgtcactaactcaccagtattctcatgggtgtggggtccatttcccatgctttatatatatattttatttttaataagtgagctatgttcaattatattataaataattatcaattaatttaatttaatttaattatttttttgcagtgaattctgatgaatgcttgttgacaaggatgcaagaaatgtcattagattaccatttcacagttgaacaagaagttggttcagccacacatgctttctttggcttcaatggtaaaatttaaatcacttaattattatcagggtcgagtttaggttaaagcgagttaaatttgcacctagagtctaccaaacatacaaatattttttaataatttttaaaaatactacata

SEQ ID NO: 195608 - DNA, 2359 bp, Cannabis indica
gaatctacttcgcaaaaaacaacaaatggggttacacaaacaaatgttagcaccataagctcaaaaggtcgagaaacatatgactcaaagaagacccaagttgaaattaacccagaaaagcagaagcttgctgcttcattatttgggggttcgtcaagaagtgagagaaagacatcctctgccaaccataagggggtaaaagccagtagtagtcatgcgacagagaagcctcaggtaccaaaagtgcccagtgaaagctctgtggacaggacaagtattcaagctcctgatcttcttgacttaagcgaatcaactgtgacaagtgctcctccgtctattgatccattcaggcaattagaagggcttctcgatccaggcctagttagttcaactgcaaatcatggtggggatggtgcttctaaagcacctgatttaatggcattatattcagatacacctggaagtggccagagtagtgggtttgatgtcaatgttgcttctgaattattgaattctactgagactgatcaaggcggggctacaggtgcatatctcgctcaatttagcaaaggtccaaataggaaggaggctttagaaaaggatgcccttgtaaggcagatgggggttaccccaactagtcagaatccaaatttgtttggagatttgcttgggtaaatgatgcagggcggagcataagaaaagatctttatctttggaccgtgcaagcttttgattatttgatgatgtatgcaatttctttttaaccttgaaggccgaaaaaagaggaaaaaatataatgaaagatttcacaagctagaaaagcagagagaaatccttgtggagtgatgaaacctccacgggagacattgtaaaaaatatcaggcatattgggttctttagaaattaggagatagttggtgatgatgcattatgggggttggtctctgttcttacatcttaaccagtctattgggttttcagggtcattcacctaggtgggtttgtgcattttgcctttgtttttgtgcgggggcaggagagagaggcttgttgagtgttccggcggttacacttaccgggtttttttttttttttttttaagaacttgtataattaagattttgcattttctcctagtcttgtcgaattaatcttgtattaataataagactttctctttccgattttttactgtatcaatttgtgaaccattttgggttaatagaacatttttagtgtcgtttatcttgtagataaacagaaatggtttcactttccttctttttctttcctcagaagagtaaatactattttggatattttgtaaaagttacagatcggactttctgttttgttaaatgacaaaatagatgtttattttttaaaatggtaaaaataggactttgagcttaattttcgataatttcttttttaatataactaacttgaagataatttctaacacgaatagatatataaaatgtaaatagttttgttataaatacatttagatcgaattattattaaattttattttaataaaaaatcaattcagagtcctatttgtactattttagaaagtacagagcttattttataagttaacaaaacaaaaagtctaattagtaacttttgaaaaatatatggtctaaaataatatttattctctttagaattagtgttatttggtaatttatttggaatgagagatgcgcatatatgaatttttggttttttgttaaataaaatggttatatatttttcattttttttttgaagtaatatttatttattttaattccagagcctgagccttcatgttggtagtaaagaatctactattaaagaaagatatattttgttttatattgaagtttttaactgaaaacgaactaaccaaatgacaagaggaaacgacggataaaaaaatgccaatgggttccctaggtatcgtcgtttgtctgtcctttattgaatctgtttttggtatggaatcacaatcacccaccaagcttagacatgaatctataatctttcgtccaacgattttctcgttgaccaaacataccatttgaatctcttgttccaaatcccaattctacttatctcaaaaggttcacactcgtatggaggctgcaaattccggtgacgaggagaccccgctcgttgtcaacgacgatctgtccattaagagcaatcactctcagaactacaccagagatgtttatattctcagcttcgcctttttgttgatcttcctcgcctatggtgctgctcagaacttgcagagtactctcaacactgtgagttttgttctttcctttttccttctctcctcctcctctttctctctctctct

SEQ ID NO: 195609 - DNA, 973 bp, Cannabis indica
  modified_base (75)..(75): a, c, t, g, unknown or other
gttagacaaagatttaattacaagagtggtgtgtaacagttttcttctatccttttctatctgttttttttttcngttaattaactgtaatcaatttccttctagagcaagggtccaagtgataaacgtgggtggagcttccgcaagagatctgcccgtcatcgtgtgctaagcaacactgtggtaactgaaacccccgcttttgggaataaggaaggtccagaatctgctcctctcaactttgaagctccagctgacaccactgttcctgagaaaatcactgtggtacattgcaatgatgagaaaccccaattgccaactccagttaatccaaaagaatctgccactctcactgaagttaccactgaaagtgaggctgagacggatgccaaagtggatgaggctgttgtcattgcaatccagactgccgccagaggcttcttggtagtttatgcttctgattttgtcaagtctgaaaatgattgggttatagcaatttgaactaattttctgtcaaattattgatcaggctcggcgacaactgtcaaaacacaaacatgcagtcaagttgcaagctgctgttcgaggtcatttggtcgtaagcatgctgttggaactctacgttgtgttcaagctattgtgaaaatgcaagctcttgttcgtgctcgccatgctcggcaatctttgggggaaccatgtcaaaattcagatgggaaggtagtgtaccccactcaaagtacctagtcttgttcacactttgtaccttatctaatttcttttaagttagaaaagttcatggaccccatgtttctcctgggtctcatgtactactacataaagaatttagtaataccaaaacaacttactcttgaatggaattctcattcaaatagtgttttaaggatgctttactgtttgagactggtgggggtagtttgttcactattggtatattatgcttacgaaccaaatg

SEQ ID NO: 195610 - DNA, 1789 bp, Cannabis indica
gtcctggttagtcattaataatttcaatgaaaatgggcattattaaatctgaaccatttacaaccttttaatacgacaaaatgaaatagtaaagaccattttagacaaaaattaaaagtctaaaaaggactactttaaggccatatttgacattgtcaaactcaaaccggccacattcttatagtactcttattctaaataaaaaataaaataaataataataataaaaagaatgatacacaaataaaaaatgaagttggtgggattggaactttaaaacactaaaccaagcaatttacccctaagttgccacataattttaataacgtgggtattattattttttattttatataactctatttaaatatttttttttaaacataatctcactacaaaaaattttacttttagtcacaactaaatttgtgactaaagataaaaaaaaattatggctaattataaattatcattattgtactgtcacttaaagatccgcggctaaaagtattaatcaaaaaaattactatttattgtaactaaatgtgttgtaactaaaactaaattagtaacaacttgttataactaaataatatgttttagttacaagtaactttttgttatgactaaaaaattgtcactaaaaatagcaattttttgtagtaactcgtctcgccttattttaagatcggccccacaaaaagttagaactatacctattgccattagtgctaattattcatcaacgtcttcatgtcatttttaacatttaaaatttcatgaaatattttaacttacatagataagatttattattatttaattaaaagagcaattctttttacaaataaaaaaaaatacaaaatatgtttacttatacaaagtaagttagaattagaaaattgtgtctagtagggatagaatggaagtcttcacttgcatatttaattccaatttttgcactatcatcagacttctacctagcaatttatttatttccccactgctagtattgttactaatgatattctattgcattgtaattataagcttgggttttgatctttaactttagtcttatagagaaaccaatgcgctcattaaattggctatagatcggttttcgattttttttttaacaatggataactttattgaaaaaaaaaatcatactgtcatacaaactttgatcagtacaatttttggtggcctattttggttgatttatagtctttaaatgaattatttcttcttcttcttaaaaaaagagctaataatactttctttttctctcattaactagtgccttttttattattatttattgaaataagtaatgtacaatataaatgatttggtttaacaaattagttggtgtagaaagaaaaaaaagaaaaaaaaaacattgaagggaaacattgatattatatggtcgcccgtccacatacgtaaatcttttcaatagcatattaatctattaatatattaattaagttggcttgtccattgtaaatttgtaataattatagtaagtcatcacaagatatatttttcgctgttttttaattttcggttttctcacacaaatgcaacttactctaaaacatattacctatgtgggtagtgattgaagaaatttactattgaacaattatcaatatatacatttatatgaaagttttttgtccctacgagggaatatgaatgttgtatcttgatttagtgaatttaaagttgtatgtatatagccgaataagttacacgcggtgcatgtatctttatatattaa

SEQ ID NO: 195611 - DNA, 779 bp, Cannabis indica
aaaaattaaacaaaaaaataaaaattacttttgaagtagaaaataacatttcaatattttcttattttttaatttttttttaactcagttttcactattttataaaaattttggccgagcattggctgttgatttttaaaaataattttctatttttaaaaagtgaaaatagtttttaagttatgaacccaaataccttcttagtctcccacaaattcgacctttcgttcttcaaaatctgatgtgatgaactcgagatgaatgaagtaggccttcactcactctaaccaataatcagcaagttaagactgtttatggtatgttcaatcttatcttgaatccaaattttctcatgttaacatgtttactcttttcattaacaataatgacataagatttttcaagctgaatacctcaaagattcattagaaagaaaataaaattccagtgagcacatggaaactcgcctcccaaaatcgaagaaagccattacaagtatggtcaaggccaacccaagaaacacaaaagtctaaaccaaaaattaaactaaagagtttgtgaaaactaatagctaaactcatgcacaagcctttgacaatctgctgattgaatttgaagatccaagcgaatctcgacaccgaacagaacagattccaactctccctgcattgcacaaccagcagtaaccccaaccgatcccacacgccatcttttgcagcaaaatcaacattagctcgaattctacccggtcaaggaagaccccatctcagctccttaat

SEQ ID NO: 195612 - DNA, 1795 bp, Cannabis indica
acgaatgataatactactactgttattaccgacgacgatgacgatgacgatgacgataaatcaacttctttcatttacacccaaaaccattacacacagaaacggaagaccacgacaataaacaaacaaacaagagacaagattgcacttttgggtttttggaaggggaaagggagatgttttatacataaaatatgctacatacatatatatatgtgtgtgaggaaaaaaaaaaaaaaaattatatcttaatattagattgtgggtttccggggtttatgaagaagaaaacgtgggatactattttttcttttttcttctttctttatcgctgactaatagtattctcactagcaacactttttattattttttttttatttcaatagattttgctccttttttatctcatttgtatcagaaacggctgaaaatcaaagataccgtcaatgattttggatagaaagagttaaggcacaaaagaagaaatcttggaacccaaataaaataaaaaattaaaaaatagcctatatatttatatcaatatatatattgtaagagagagctagagaggttaagaagggaaagaaaaatttagccaggttctataatctataatctcttcccctaccccaactagagcagaggattagactgtgtgtactggtggaatagaagactatatagtatacaaagttgcaaactttcactgtttatatatgtacatgatcagtgtactatatatatattttattatatgactcaacaatatttttctttttctccaatttttttaataaaaaaaatggtatttttattttgtatatgtatttgctgtctgtgtaattattgtaagttgtaactgatgatgggttttaaagcttttagtgagagagaagttaagaattaaattgggattcacccaattcgaggggttctctctcttaaagttattttcttttgtgtttttctctcactatattttgtagaaagaaattagaatggaaaatggtagagccatccagcagtgtgcaaccaccaatttcgcttttatgacatttaaaatgttacgtagtagacctcgcccgtcaccgggcttgtgcttacgtcatttcccgggtaatgttatgaaatgaccgatttgtccttttcgccttttttgttgacttttttcgctcattcattcattctattaatttttgttttctcccaaaaaaaaaaaaaaaaaacctttttctttttttttttagttttcttcgttacgtttcctattcttaggagatgttttcagacactttaagctatgccttaaaaaaaaaagtcaaatgaaataacataatttggtaattttaaacaaaattttagtttttttgtcaagataaaataaaaattattttaaatgggcccaaatgtaaattagttgtcagcttcataagaagattttcttcctttttatctttaaactacagatttttcctataaaatatatatttcctaatcaaatattacactatcgtttgagaaattaatttagtttgttttcaatcttccgcaattaatatagaattaaatcgttttgaatatatctgaatttggaccgcatttaactaagcctttaacaaaattagcatatctcaacaatgatattcccatctatggagaaaattatcatattaaaattaaggttttttcttgaacatcatattaaagtgctgtaaaaaatgaatcgaaaccttttgacacgagtagaaatcggcatgagtaccactcggtatgaaaaaaattgtgcttaggc

SEQ ID NO: 195613 - DNA, 1492 bp, Cannabis indica
gttataggtattgagtttgttcaatacactctattgtgtcgtattatattgtataaaattatattaaattgtgttttatattatatttttatgtaatactatgtttgatattaatttgtatgcgtatataattatataaatataaattaaaatttaacataatattatataaaaatgtaatataaaatataatttaatgtaatattatacaatccaatacgagctaccacgatgtaccaaacaagccaatagaaaaatatttaaacacacatattgaatttaataaatagtattaaaaaaaaaaaattcatagtgtcaaaattggtatttaacacataaatatatcaaatagtattgctctaaaccaaaaaggatggatcattttttttatagaacatctaagagtatttttaatgaagtgtcaaaaatatgaaatataatttttgtaaaaaaatatttcgataatagtatgttaaaaattatgttaaacttaatacatgtaaaaacaacaaatagaattaccaaaataaatatatattttttatttacaatattatcattagcattagtaagtaattttaatatacattttcaattacaacatactattattttttaaactatataattaatatattataaaattagcaaaaatcataattaacttttatgtcaatttatcttttaatttgctattatacattaaaataaatataatttacttatcttttatgtcaaattgacatcacattttttttatattttttaattcaaaattaatagaaaaaaaaataactttaatatttatttccacctcccaatactaatattacaaacataacatttattaagaaaaggtaagagatagatggaaaggaataatatttaagagagaaaagaaccaatgaagcattaatgatataatgatgaaattgggccaatcaagaatgtggtctcctccctctcttaaatgggcccccactccccaagacattgtgggccccaccaatccaccttaggaattgtatgaatgtacatacaaaaataatacaaaacaaatccaaacaactttgcttctcgaattggactctctcacactcaacacacactcacttagagagtgactgattttttttattttttaataataataataataaaaaaaaatcagtaacttgcatagtaaatatttatatttctcacccttttaaataaatatattaatttaatttttgacggtaataatattaattatatttctagaattttcgtaggtacttagttgttaagtgtcaatcaatgaccacgtgtcagtacctgattggtccatcatttttgtatttaaaaattaatttaaatataccaaaaaaaaataataatacatgcataatgatttgacacttaacaaccaggtagttataaaagttctagaaatataacttaaatattattaccgtaaaaaattaaacttaagtatttacaccacaaatta

SEQ ID NO: 195614 - DNA, 1634 bp, Cannabis indica
atctaaccttaaaatatttaggactcaaatttcagaccttgtagagcaaaccatatatttgatcactagaactattcctcttggtttaaaaagcaaaaattctttccgaaacatagtcaatagacacaagaacacatagttttgaatatggctaagctattcatagaacctctcttaagagtcttattcacacaaacaaatcaactacttagcttggcttagatatttaatttcaacatttgcacaagccacaaaagtatacaagttcaggcaaaccataaaaacacaatcacccaatccaaacccaccaacataaaaccacaacaatagcatagaaaccaacatctttaaaaaaaaaaatacaactcaatcaaaagagaggaaataaacaaaaccaacctgtttgagaagatgggtctgttgatttactggtctaaatcctcctctaacgcttataaaatacaaatcaagaggtttaatctcacttctgtgaatgtaaactgagttttgaggattacccagttgaaatgcacagtagagaccgaagcagagagctagctgagccaccaaagtacgaacccaacatggtttctccattgtttcagagaagagagcttagatagagaggtgtgatgtatctatatatatgcaatctcttcagtccagcctctttataagctgtttcttcttcattccagagccaaaaccatagatctaatctaaatgtgataatacacgtaaccccatttggttttattctccaatggtgacttttaactgtcctataatttgtcatattcatgtttcagcctcacaagaaatgggaaaaaaatggagtcttttctctgacactgtaacataacattcacaagttcacataaattaattaggattaagtagaaaatgttgcatatgccaaagtacggtgtattttggttctattgattctcaataataataataatactttatgataataatttaaagaaagaaagtctacatattttttttctcactttataacacttaaatgttaaagatcattctgtacgagattgattctcaaatttttaaatggtataagttaggttaggtctcaaaagtctatataatatgaaaaacaaacagaacataaagaactattattattactaatcattattgcaataaactaaacacaaacattattttaagcaatcattgtatatccacaaactctactattgcagttttgacaaataatatttttgggagcttataaatggtgcgcaatgcatttaggccatctttaatggtaaaaattaaatttagtgttgaattaacaccaaaatactattattttagcactaaatttttttttcaattccaaccacaacactaaaaattacaccaaattttatttcttttttattctattattttattaatataataagaatattttaatactaaatatttattaaatccaataaattatattagtaaatattatttaattattaaaagtgatctatagtgccccactattattagtgggacactgtagatccccatgaaaatatatgacaattgcaatcccattggagtaaaaaaaggaaaatttcacactatatataagaatatgtcgttgggtt

SEQ ID NO: 195615 - DNA, 927 bp, Cannabis indica
ttttacatattatcattttgttgtcccacgtggatagataggaggatatcatatcaaacctacctgtttataaaagtcataaataatttattcattatgaattaattttaagatctactcaaaacaaaaattagttttaagatgcaattcattttatttttcaaaatattggacttgaattagaaaatcttttaatattatgatactacccctgatcagcatcatcttgaaccatcattggttatgttatttttctgttgtagattagatactattcagattaataaagcattttcaaagctttttcttttctactctgttttcactcatacttaatataagaagagaatgattataagtgatccttagaattaatgatcgtgattaagatatataattgtgaagacttgttgttagtttaaaccaaatataactaagacaccaatacaagaatccattcagttagtgtaatcttgtatcgagtaagataagacttgaatgtgtaattattgaattttatattatcagaatttaatttactaatgtttgattatcaacataataatttaacatcttaaaatataatttacaaaatgataaaataaatgtattagggttttggatatttacattggttacagcagaataaatgtgactcttttcgttctatcactctaactctcgattcctttctgtagtagagtatttctaagtgatgaacctgaattaatctcttctaattttagtaaattttgttaacacaatcttttacaaagacctgagtatcacattgactaaagtggagtgattattcaatcactattgtggcttgaaaaaaataagaaaaagacaaagagaaagagtatggctggaatatatagagagaaaggaagagttttttttttttttttttttagtttttgtact

SEQ ID NO: 195616 - DNA, 1583 bp, Cannabis indica
ttaaagtcaattgaacttcaaccacatgaataatattgaatactttctttcattataaaagaaaaatatgaacttatattaaagagatacatgaatacattatatagatattttcttttatcaatggccagtttcaataatcccaaccctactagtgggtggcataaactgggaccttatttttctctctctttccttttttagttcaataataaaacatattttccaaaatcaactcctatcatgaagattatatatggtaatacccaaaaacataaaacaaaacatatctactagagatctcaattcttggattctgattggttgatatccattgtcccccttatatatagtcaccacttttactttgtaatgccccttcaattttcccctacactttctaaaactctaaacacaaaaaacaatttctctctcactttttttattcctttttccacccaaatatcgaggtccaaacttttagaataccacattgatagtttatgaaaatttattgttatttataaaagtatggattactctatatgcattactaattgactttatgatgaaatatgttacatatattgattttattacatattgctatttataagagtgtggattactctatgcattggtaattcactttgtgatgaaatatattacatattcaatctaatctaaatttaaaatgggtccaaaaatgagatatctatgacaaaaaggaaaaaagccataggggatcaatccaccccatatatgttttaccatacatcctattctacttcttaatctcattttcatattttaacatgagatcttcaatcaaattaaactcaatcgggcaaaaaaaaaatccttataatttgagattaataagccacttgtgattatgattaaatatttttaattatattttgataaaatcaaatcttgtgaataacttttttttttattataatttattgcaaaagaaaataattttttgagacaaggctctaagagcaacacaacaatctcacaaataaaatgactaaataagagctaatcaagtcttgtttagtacaattttctttttttttgaaaggaatcatgtcattcttattatttgagatatatgctagttttgttgggaggtttgcagtagtagttcaagctaaacaattgactttaatggtggggtttgactgtgatctctcgctcttagactttctataagtttttgagtctattgtttaattttgatctctacattctttatttataatgaattaagatctttgttacattaatattaccatttttcaatttttatgagacattcttagtttatatttgacgtaagacgaatatatgattattaatgaattaagagtatacgtaagtactgaaagtagatagtaaattaatttgctattagagttagtcttatattgttaatgtggggaaataaattatcatatatatatatataagatgaatgaactacttctcccattgccaattgattttgagatggaacttcattcatcttatctcaaattttaacatggtataagagccacttgtgatctgttgtg

SEQ ID NO: 195617 - DNA, 1214 bp, Cannabis indica
atatatatatgtatgtataggttggaccagaatatgcaagatattgtggaattgaggcgttggagcctctaggaatatatctaccaggagatataaactacccaggaggagcattgtttgatccattaaacctctccaaggatcctgaagcatttgaggagttgaaggtgaaagagattaaaaatgggaggcttgccatggttgcctggctgggattttacactcaagcagctttcactggtaaaggccctcttcagaaccttattgaccacgtttcagatccctaccaatacaacatctttcacatgcttcattaatttattatattagattctcttctatgctcttttttactttgcttgtacatattgtatttctatacacatgccatgtctgtatatatatatatatatacatatattatcaactatttatttatattcttcttccttccttgaccttgagtaaatattaaggaaaatgcacatgtttgatcatagagtcatcacatttttctctttgcatatttcagtttatatagctggccagttttttgtttaattctgttgttattattaattgaaagttgacttggaagttttaattaaataggaatattacattaatttcatctctacattttcgccacatgaaatgctaaaaggtattattggtatttagtatcctcttaagtgtcatactgttattggtgtaattatgtatcggatttcgtataatttaaaaaaatagttttcagaaatattgttaactaattgtaggacgtcacttatgaaaagtgttaggcaccattgacgtccaataacaaaacacaatgctctttggccacccctaaagaattaaattatactttgaatcaattttgttcaatttatgaatggtcagggaggcattgatagcattggcagggcaggctacactttttcattttcttttttctggtcttatcaaaagcttaatcatgaaaatgagatgtaaaaacaatatgaaaaggtgaaaatttaatcaatcttcacatccgatgttaaatttgaacgattggatttgattatactttgttgtttgtgtaataatcaagaattttcagccacgtgggtaaatgttttttttcttatcttttttaatgaaaaaaaaaaaaaatattactgtacttattcatctctctaaatatagtatcaacctcttattataatttc

SEQ ID NO: 195618 - DNA, 788 bp, Cannabis indica
ttttgttttggcttcaattttatgcattcgctttcttagactgtaaaatgttaaaacacttcatagtaggatatagtttatttgcgaaaaattttcaatcctaaataaatgcgtgaaatcaagtcaaacacaataacacgacttgaaattcacacagaattattggattttggtcttaattaaacagggttgggtcatttttcgggtttatgtgttaagactgagattataattataattagatatagtgtattgtagtggtatttttgttttaatctactatgactttgaccaaagacctaagaatattcacatattatagcttcagtcaaagactaagattcatttcaattcttttttgggttgtttagttgggaagtaagagaagtgttaaaaagcaaaagtaatgcctaattagcactcttctatgtgtcaacattgatattggtttaattaatataataatttttaagaaatatcgttagccaattgcaaagcaacatatctagaggtgttagacactactggtgcccaataataatgctcgggaagtaaatataaattagctatgtgaatagatttaaatccatcttgggaatttagtcaatttcaaatttttatgttataaaatggcccttattacaagtttgactattggatctttgactcgaaaaatctttatgttagttggaagtttgttgacagttggaaaaagacatcaacactttagcttgatttcaagaacaataattagctaatttggactttttagtgcatgtttggcatca

SEQ ID NO: 195619 - DNA, 1589 bp, Cannabis indica
cattaatattaggtactttaaggtactgagcagtaaacaagctaggttagcaattttttattaatttaaaatgtgttagatttacgaaaaaatattacatgagtacttattttattattttaatttttatttttatattctctatgatatattagagtgagagtatcttttatacgtaaatttatcatgtttaattaggtggggttgtttaataacttaatactataatttgtgtttatctttgttaaatattcagatttgttttgaatttaattttcatcattttctttcttctcttttctatacattaataatgagattatatatggtaatgagcggggaatgtattccaattctcaatccactggtttaaagatgaaaaaagttattattttagaccattaattttataaaagttataatttgaattttttattttataaaattaaagtaaatattccatctaatttatataagatattgaaatccaaaagtgaaaaaaattaatatataattaatatctaactaatgattttaatatgattataggaatgaatatttaaaaattaaattatatgaattatatattaaggtcagatgtgagatgaatagtatcgctctaatcccattccaaatttttcaataacccaccaaattaggtatgtattacccgctcacgaattaaatttctatatctaattgtatagtggtgtatataatatatttatataattaatgttattatcttgacaattgctttttaattattataattaataattaaattagactttattttataatgtttacatgatcagtatctataactgaatatgtcaccatcataatttacatatgaggtatatttctcaacttatttcttatgtttttcctaccactactcttacatgttctgtttgtactttttgttgtggatgagcatttatactttctctgccctttctcagttgctatgcttcatatggtctatagtatgagtttattacctggcctattatttttgaggattggaagatctcgattgggaagcttggaacaatatcaaaagtctattctattacatttggattaacaagaataatcttttgtgtgtttgaagatacatcttacactcttaattatatatatgtaaacaagttgataaaaaatgttattagagctgggcctgaattcaaataggttatgggtaaaaaaaaattgttaagcttttattataaaaataaataatatatttaaaaattattaaaaaaaatatatatactttttaaagatattatttttatatttaggctcttaaaatgagtaggtcttaagcacagagatagtctcgtgctttaagacggaccctgattgttaacaaagttacatttagttgtcttggcaaagaaaattgaccaccaaaagaaaatataattgtgatgtaaagctcctcttggtctaaatttctgctgaaactttgtttgtatttaagttcaataattattttcacttttttcacctttatactgttaagacaattctctcaagttcagagttgtttgttcgttgctggagtttttttttttttt

SEQ ID NO: 195620 - DNA, 1830 bp, Cannabis indica
ttttttttttcttttgttatgtgaatataccattttgacagttttactactatacagccctcactcactcactctctaatcaagtatcaccctgtttaatagagtgaagcagagaagagaggctctgttttttttttagactatgtactttactatggaattgaataaaacaagagacacaatagttcaaaaaaaaaaaagaaagaccgaaaatagaattgtatctctgatccactaaactatgtactttactatgaaattgaataaaacacaatagttcaacccaaaaaaaaaagaccaaaaatagaatggttgtctgatccactttaaattgaagaacaaagactgagaatcactgaaatacaaataatcacaatgtgaaacctgcaaaaaaaaaaaattagaaacttgtaactttcagttttctaaacataataatgagatttattgtacaataattaccatgcattatgcaaattgaaggcagtagatggtgacccagagaaagaattaagtggttggcttaaaactgaaggtggcagttcaaaattccctacaaaattagtccaatagcaaaacatcaaaagagagttataacaattatttaattgaaagtgaaagtgaaactgaagaataaatatgttaaaattactaaccacatcgaagaagattatctggggatgccctttctttagctgggttgggatcagcatcataaactctcaaataaagctctgctcccaaataccaatttttcaacttctgtgacctcaaattccatattcctggattgtcaaggtacacataaactgctgtccaactcgaaggaaatagttgtacagtggatctaacaaccgggtcataaaggttataggtcgatcttacttccggtgaccactcagcaatcccaaaactgaccaaccaaaccaaacaacacattttacttttacagacaaatatgtatttagctttatggtaataagtcaataagtcaaaaccatacttacccaacaacataaaagctgaaaccatccaaatgccaagagtccatttcatcagaccaattctcaaacactagttctacccaatctctgtgattcccagttgccacaaatgtgccctctaccggaacagggttggtggagttagtggggaatttgtcgagctcgaacaccccagatgtgttggagaagtgatcggccaatttcaagggtgtttttggggtcaagtatgccacattgttgaccgtgtaacgagggacaccaccaatttcagctttcgaggctgtaaaggtgaatgtttgtgaaattgtcacgtgtgttacgttgaaacttccttgtcgatttggcctggctgctccagtggtcatattccacctaatatatataaagtaataagtagcaaaatgagatattgaagaaataatatgtatgtagatttagtaacttaacatttataaatacatacctgattgatttagcttggtttatggaagattctatatcgaagggataagggccattgggaagaggtcccatggctggtgtggtggaattatcatagtgtagaatggcaacaccatatctgctatattctgagccgttgtagaaaaatctaggctctgcaacgatgtagaaatcggaagcatcctgatcggctgtgacgagaacagagtaagactgtccaacgtggacatccaacgaatccaacattatctgattggtgtatgatccctctgtttcaaccaactgcatggtgtgattttggatcctgaagttgaaactccatgcaactcccacgtttgatattctgaatcggtaagtttttcct

SEQ ID NO: 195621 - DNA, 1235 bp, Cannabis indica
gttttggttgttttctctttggctttttttttagaaagtgcaaactattttaaataattttaaaaaataaaaatactcaagttattttaacttaatattgtaacaagtaaatgacattaatttaaaatatatattttcaatctaacctcatcatcattatttattaacctctttttaacccacatacattaatatatttatagaataataattaatcttatcaagtatcatgtttatagattgtgaaatcttttgggtttatccaaaaagaaaaacacaaaagaagaatttttttttgacacactaatcccaataaaatgatacccactccttctacctccaaaaaaagccaaagagaaaacaaccaaaactatatattgaaactcgtgctcatttaactacatattcttttttaaaaaatatatataaaaataaaaatgtattacaacttttctttttcttatatttatcaaacattctagtcattcaattaagctcagcacaaaatgtagatatagataatagatattcatgaaatctatatattttttttaaataattaagtttaatttttagttatagataaatatttaagtttaatttttaaaaataatatatttaaattaataataataattattcacatgttattattcacaatacttgtgattaaaattaaattagtgataatttgaatttaaatatgttttagtcacatgtaattttttgttgtgactaaaagtcacatttagtcacaaaaaatttatgttgtaactaaaagaattcactaaaaatagttttttttatagtgcgttattagagtaattaattatcgaggctcatataacttaaaaaaataacttttaaaaaatatcgttaatcaatcgtaagacgcctcttatacaaatgttagatattattagtacctaataataatattaattttgtattaaggagtattatcttaaataatcttttaatttagttatcatattatattataaatcattaataataattaaagcaattctaaacgtagaagttattacatgcatgaaatattatttgatgtttggtactatattccaaattaaagaaaaccacaagaattatatatgattagtgattttatttccatctagaataaatgccaagatcaattttttttttaaaaaaaaattaaaatcatatatatattattaatttgttattatcagtatatatatatatataat

SEQ ID NO: 195622 - DNA, 2079 bp, Cannabis indica
aaaaaaaaaaaccttaaaaaataatgcttctacaatgtacttaaaaaaagggtgaaccaatgcaataaattctttgaacttttttttggtgtgataatttttttttttttttaaatttatcaaaatttaactaaatgtgtttttttgatattgggaggagaattcgaatttgggacctcctctttatagaaaaagtgtgtaactactaaattatgcctatgattaatagaggtgttcattggaccacatgtaatatttttaagcttatctagatccaatccaattatatattggatgtaagatattaccatctgattcgatccaattaatttcagtcatccaatcgatccaacattcattggttgttggattagatcggttctatctgttggatgtatttcatatttatttattggtttaatttaagtttattcaatattttagacctagtattttttggattggatcggatccatctaatattttaggtcgagtatgtattagattgaattggatccatccacaatccatgaaaaaaaaaagtaaaattttaaatttaattttttttatgtacatatatattttatgtataataatattaaatctaattacgtatctaaactaaatgaaaatattaattagttcgattgaatgttggatgtattagattttggacacctcatctaatatccgatccgatctaattggatatacaaaaataacattcaatccgattcgattacaattgcatatttaatgtttaacggtcgattataattaaaatttaaatcagtcggtcggttgttattaaattagatgatttatgaacacccttacttataaacacaaattttaataaataaaggtatataactataaaaagataaaataaaatattttcttgaattttgaaaaagacagggtgcactttaaaactgtgcaccaaataattttccaaaaataattagactttacaaataaataaataaataaaaaccactggttagctgggcgctgaggccttaaaactacaaatcccactcgctctcatccacgcgctcctccgttccaaaattggtctctgcctttctcgccaactcccattcttcttcgttccactcttctgcctagagcagaaccagttttcgaggactgatctcccagcttgggtggtttagggtaaaatccctaatcggaatagcgttattctggtgcatattcacgaaggagagggtggtagcgagcgagcgagatgggcatgaattctatatccacaaagtccaatatcgacctcaatgagcagatctcgcagcttatggagtgcaagccactctccgagcaacaggttttaatgtcttgtctttcttcttgttgaacgattttcccccaagttaaaatattaacttaaaaattccgtttggttacccagaaaattaaagggactggttttctgggttctgtgtaaagttttgtttttttagggggaaatgagttgatttaaggctaattcagttccaagatgcgtagaaatgagattttttttttcttcttttaaaatgaatacatgggtgttatcgtcattgggtttgtatgagttttttgacagcattttatgtcctgaattgaatttttcggagcaagtgattgaaacgattttgcccagttacagtgcatttttttaccttaatatttattggataaggagatctgcctgcataaagaatgtcatgtttaaattggcagtgtttgaatatgggcaagatttgaatgccaaattcaatccgttaagttttttacttcatttatttttggaatgtttctcttaattctgagtctcttcctactatctctatgttaggaatctttttaagcagtgtgattcttggacttaagaacgcatttgtaaatcaacaagttaacgtaatcttgtttgctttgcttggctgcaggttagagccctatgtgacaaggccaaggaagtcttaatggatgaaagcaacgttcaggtacaacaagctttacacaattgaaacttaattagtttagttttaatgagcatcttcttttcttttttttttt

SEQ ID NO: 195623 - DNA, 2726 bp, Cannabis indica
ataattgtgtttggagaaacaaagcacctcgtgtaaatgggactttttactttttcatttgggtttaattttagagggctacacaaggcataatgcaagatttttgtgttggtaactctcaactttgatagtgatatacaagatatgaatctattggtgataatgatgacacttgctctctattagtagtaagtaatatgaaaccaatgaatttagcctcttcttcattgagattttgatggatcctttgagaaggtttgttggtagggacaaattctacctaattaaactagcattattacttcatgttgttcttgtagaaggtaaagaccttcagagagaaaaggcaaaggccaaggcaagaaaccatgaaacagaaaaatgcataaatgaaaatgaaaagcattactcaacagaatagctcgagcctttatttatactaacagagaagtgatacaagtccaaaacaaaaccagtaaaatacaaacaaaaaaactaactaactgaaacctcctaactgtcaagtaacagaatcaagaatatgtttaacatcccccttcaaacaaaaggtgtttcaaacatcttgagtttggacctgagatacaaaaacctctctgtagacagggactttgttagaacatctgcaatttgatccacagcaggtacatatctgacagataattttttggatagaatgtgttctctaacaaagtagagactatctcgatgtgcttggatcgagcatggaatagagggtttgctgcaatggcagcagcactttgattgtcaacccatagtataggacaagtaggtgttgagaactgaagttctaaaagcagagaattaaccacttgatttctgcaacaacagtagcaagtgatctgaactcacttttagtgctatatctagcaaccacattctgtttctttgcagaccaggagaccaagtttccaccaaagaacatggcataacctccagtgctttttctgtcatctatacacgatgcccaatcagcatcagaataaccttgaagagtaagagactcagctggtgtaatgtgcaaaccataggatattgtgcctttgaggtatctcaataattttttgcaagcttcccattgaaaagtggttggagcatggataaattggctgagcttatttataatgaaggcaacatcaggcatggtcaaagtcaagtattgaaaagcaccaagggtgtttctgtacaaggtgatatcttgaaatggttcaccttctttgagtgagagtttgacagtggcactaaagggattaggacttggtttagctccctccatattaagtttgacctataaatctgtgatgtactttgtttgagataagtacatccaagaagaattttgacaaacttccacacctagaaagtaatgaacagagtcgaggtctttaacagagaaagtgtgatttaaatcttcaataagtttgttgatgagaattatatttggccctgtaataagaaaatcatcgacatacaccagcagaatgatgagagtttggcctgaaccatatgtaaaaatagaattgtcagatttggaagccatgaaccccttctgtaccaaggtgtctttcaacttttgattccaagctcttggagcatgctttagtccataaagaactttgtgtaactgacacacatgagtaggcctggaagcatcaccaaatccctcaggttgcaccataaacacagtttcctctaatgttctattcaagaatgcattgctgacatccatttgtttgaccatccaattgaaagagacagcaagggtgagtatgactctcacagtttctggtttgacaacacgtgagaaagtttcctcatagtcaatactaggtgtttgtagatagccttttgacacaagtctagacttcaatctgtctaatgtcccatcaacattgagtttaaatttgtgaatccacttatttccaatcacagccattcttggtaagtatggcaccaatgtccaagtaccagccttttagtgtagtgaactcatgttgtattgaattaagccactggggatgtttgagtgcagcaccagtggatttaggctcaaaggaataagggtagttgacaatgggtactttatgacctagtatgactttggtttcacaaggccattcagagacctagttctcatagtatgggtcctggtgacaccagtggtacttgtattgattggggaattgggaatatggattggttgttgctgttgaggttgagtggaggtggtaacaagtggaacaggctgaggtatataatcaagaggtggcgacaagtggaatggtggatatgtttgtgactggtacaccagtgcttggtgcaagtatatatgtttgtggctggttatggagagaagaaaagtgtaggtatgacaggggacaggaatggggaaccagatgggaacatggggtataggctgagcgttgggaatttctagttttgctggaggttgatttctgtgtgtgacaggaatgagctcaggttgcagggccatgtttagtacaacaacaggtgtattagtgtacatgttgttaatagtgtgaaacgtagaagtatgatagaaaagagaatcatgtacttgttgagttattgctgcagtaggatatccaagaaagtgagattcatcaagggccacatgcctagtgatgaacattttgcggatgctcacaaatgtaccctttatgatg

SEQ ID NO: 195624 - DNA, 1551 bp, Cannabis indica
atttatcaacagctaaaaagttttcgatttaataacaaataaacataacctttttattccttcgggaaacaaactctagcaaaacaatttatactagtgatttctgttcactcacaaaaatccaagctcagtgctacatttctaaatttcgaatcaaaacatatacagaagcaagtaagaaaaaaagaaaaagaagtaacgcaaggtacctgatagatatgaaaccgggcaggtgggttggccggaggaaccagctggagctgttgctgggagagagagagagagagagtttagggttttgagggtttttgtctgaattttgtgaataaaataagtttgggtaaagaatatgaagagggaaaacccagaaattattgtatagaaaagaaaagactcgatgaaaagagagtctattcccgatttatacccattttggtgaaatatgcatttctctatcaaattatatatagatttacaaatctatattcgaaaatcatttgcttatatacgaattaatataatacactcaattattgtaacctctttacatataagtaaaagattaatggttgaaatcaaatacactaaaatagttttgtgatattgtgacaaaaattggacttctcttaccaagccctaatgtaaatcgattaggcatgtcaaaccagcaaaaaattgaatatgtatgatatgaacaacccaaatcatcttgataactggatcttttggatcttgaattttcacctaaacagtatccaagcccttgtactaaggaaaaattatgattttatgttgatcttcatctatatatgtgcaaaaacatgtagtaggtcatacctataaatcatataagatttcattgtgcatattttttcatacaaaattatggacaaccataacaacatagaaaataatcttcatatataaacttacctttcaattttatcttcttggtaaacaaagtggtttataaaattggattgggaggctaagcacaaaacacttctatttatagaggtttcattgtgtaatgggctcaaaacctaaagactacttactgtatgggccgtcacaaatcagattcacttgaattataatttaaaccaactataaaactttaaatcttttaatatttaccttataatttaatttatttataactttattattatttcaccactaataattattatttaaaggcgtgcataggagcctttctctttccatgaggttgaagaaggtcacttgaaagccagttacaggatctcaaattgaggaaatttcaacgattcaggaacatcaggatgatgagcagatacatgtgatgggtggagaggaggaactcaaggaattgggcagttcgaactcgcacatcgttgagatgaatttggatttgaatgactctcaaaggctgcagagggtgaagtttcagtcagggatgagaaggtgaattgggcagaggaagtcgacttccaatcttctgctcagcaacactgggcgaagcttaaagaagggcagaaaatgaattttgcagcaaagcttcattatgca

SEQ ID NO: 195625 - DNA, 1513 bp, Cannabis indica
attaaaaatgttaattaattaaacgtaatatatagaacaaaacaataatgtggcccagacatgatagttgatagtaacaattctgttaaatcgaaacccaaacggtcgatcggtgctttctcttgacaaatatctaaaagaattcacttaatattattgtccatcacttaatattatttttcatcaatattattatttcaaatggaattttttattcttctaattttattttattataattatgttttggggcggaaatttcattggaatcatttttgccattgagtacttaatttgattgtgacacatttaaaatttaattcaactctattctttttttttcctcccaaaaatggcttaataaatactcttttttaatcttcagaaaaagaaaaaaaattgttaatatctagctgatgctgtagataccctatatataattaaataaaccatgtatactcttataattatagacaaattaatttataattaggaacctaacttaattattaccctaagctaggcctatatgatcccattaattaattaatagaagtaggagttggacacttattaattaattataatatattacccttgattaaatataaaaaaaaatggatataaaatagaataaatagccctataagaagaatagaatataaataaaatcaaaatgattcaaataatgatatcgtaacataaaagtcaaagaattaataatattgatggttcagtactaaaaataagtaaataaggctatacgtggaaatggtttaatttttccagtcgatatatcgatctatgaattttttcataaagtcacttatatattatttattatttaaggccatacgtacgtaaaatattaattattgaaagaagacttttatgcatggttggccattttttattcaagttatatatttatatatggtcgattcataggatcataggcctatgtaataattgtagtagcttacttaggatggtaatagctatattattaaattctttattacaatacatagttcgtatttagttcatcatagctaaattcgtaacacttcaaaaaaaaaaaaaattacactctatactttttttatattgtcctcttttatttttactttttttaaaaaaaatctattatttttacctttttttaaacattgtaccaattttgcccctgtcacttcaagatactctccatgtgattctcttatgtaagggtattttaggtacaatacatataaaaagaggtatgtttcaaataaatataaaattagaggtaaatttgattaattaatgaataaaaatccattatatcaaccattaatttaacaaaccaaattatgcatggttaagtacatttttatcaagcaaactgttacacatacacgaaaaatgtatagtttctttgttccttaattgtacagttttaagttttaagaattttaattgagagggaatttagagtggagaagcaaattatgagaaaataatatatattttc

SEQ ID NO: 195626 - DNA, 1131 bp, Cannabis indica
atatatatatattaattgatattattaggggcccgagaagaggaaccatttctttaatttttgttaattaatattactttgtttattatatacgatcgtctgaagaaaaagaaaaacagtactttaaatatatcgaatatataatgaggtaagtggcctttgaataggtgattgtattactcggtgtccctttgttgtggttccttattaattcacactatatgccaaatctataattttattattattattattagtgattttaatccccttgttctttgggaagcattggattcatttattcatgttctatatataaacaaataaactatgtttataatcattgagattattaataccacaccgttttagacctgtattacatttatatatgtagctgtttttccagtgaaaatagtatataggtaggcatatatatttttgtttcgtgtcaaattaattaaaataattattatcctcatcatacaatttatttaacccgtaaattacatttcttaaatttatatatgcctttcaaaaaaaataacctctcataaaatatatttatatataggttattaatttaacctctcataaaatcaattatacataataataaatgtatataattgtttctccgagtgtattattgctatagttgaaaatatatattaattaaaaaatctataaaataaaataccggcttgaaattatttattttaatgactttttttttttttacttaaaagaaatcaaaggcgttttgaaataattttttcagttttaattcgtatcttttggtgaagtttcagttttaatattgtatatatgaatttattaagaaaaaagatgagaagcaaaacaaaagtagttgtcaataaaactaccggcccttttatatatctacaaaaagataataagtaatggaaactaataaaaaaaaacttttaattataaaatatcaaaatttacaaaaatatctatgtatattgaaaagttatgtaagtacacgtaaattattgctttctataaatttattttcattttgagtactattttcacttctacttcaaaaggcaagttaaaatttatatttttatcgatcccacccaagtctcttttttttttttt

SEQ ID NO: 195627 - DNA, 1522 bp, Cannabis indica
aatttaattttcaaaaaaaaatatacactacaaaaaaataataatagatataaaagggccatttttttaaaattttattaaagtagtcttgagccaatttttttttagggtcggcccttaggtcactcaaagtcagcgttaaatacgaccataatttaaacaagtagatattgttagatagtgagctatcagaccgtcaaattttactttttgatgtacatatatttaaaaaggtttgtcaattatagaatatacatgtatatatttatataaattgtgatccctttgttattcttaaacttatcttaagtggtagggcaattattttttatataatggttttcattgtgaagaggttatcaagacaatgatgcatgcatttggaaggttgcaaagcaatatatgaaaaaaaaaatattttttgaggaatatgaatgatctatggatttctttatttggcaatgtatttggggtcattaattctttgtggtatgacaaaaataagatctcacacaacactatattctccaagccacaaagacttaactttctattctttatttgtataaactcataccctaattgtgttggaataatcttatggtaagtagtttaaacctaaagtaaactacttattatgttgtgcaagacaacgatttcacaagtgttaggagtattattcttgaattattaattttcgagttattataagagctaaattctaaaccgagtctaatttaaaagttaactcaattgatgattataattctaacaaactattgactttttaaatacgaaattattgttttacctaaatatttattttatataaaatgtgactatgtaacagaatttttaatttaacagtatttttttgtttcctacgttaattttaacataatatactattatttaactgaatatttttattaattttataatattataatatatatttaaaaataaaaatgatgtagatatttatataaattttttttaatttaaatgtaaaatatgtagatatttttaactatgttttaattttataatacttaatagagaaaaaaattcaacaaataaaactaattattaataatatttgacaacaataaattattagagaaaaagaaattatgcaatgttgaaattttttttaattacttgtgtctatcattaattaaagtatgctaattgaaactcaaagaatgaatcaaagacaacactatctcaaattatataagctagtttaaatggacataaacaaattattgagtttgctgggtcatagaattgaatcctaattatgtaactcaaaattatgtatatataatatgttttaattaaatttattattattttttttagatgaaatatcaacttgattgaataaattaccattctgaatacaaaaaaatgtaagagttcaccagaaatagaaatatcaaaaaaactacaatcagattgataccgagaatgtctagcaacataatgtgctactcgatttgctgatcgtctaatgaaa

SEQ ID NO: 195628 - DNA, 951 bp, Cannabis indica
cactatactagtacggtatatatatattttatacaaactaatatatataccccaaaacattatatataatgctataaatacgagttggattttttcacacaacacgagtaggagagaaatgaacacgatctaacacgaataaatatagactaattggatacgacgacaagatattgcaaattggcatggcaccacatgaaaaaaaaaattgacttaagcacaataaatatgaaagcacagcacgtaaacataaataaactaacttaaaagcacatgttaaaattttttataatttaaaaataataatagtatttatgaataattatctaaattctaataattctaattatcttttaatatgattaattgattatgtttaaagtattgttaaacaattatataaaaataattaaaagtataaaaagatacataatttggtaattaacttattaattataaaaaaaaataatggtaaagtagagctcaaattcaaacttgtataaaaaaaatggactaatccatatataaataatagaccggttcaaattagagcacgacatgaaaaatgagcttacaagtcatgtcgagcttaccttttaaaatattagcacgatatgatctatatctttatattggctgacagagcacgtacaacccatatttttttatgagtcagcacaaacaaccatattattatgggctttttaaaatataggccgagtcggttcgacacacacttatttacactattgatattaatagtaccactggtgtaaaaataatctcatctactaaaggatatgtaattgttgaaacaaattgaataataaattactatcactatgtaatgttttagtgtataatttaacattacttatttatatatgaaaaatactaaaaagtattagtggtcgcttaccactgcaaggtgtaagcttcacatattaattc

SEQ ID NO: 195629 - DNA, 970 bp, Cannabis indica
tttttttggcggctgaaatttctataaagtacacatataatggagaaaaactttaatgggagaatgctcaatccacttgatgagaggaacttcatataacatatacaacaacttctaatcattctaacaatttataaacaaataatacaaagaatatgttttattacaacacacatggactcatttgaattaatcgagttatactatacagacaatcaaacccaaacactaaaaatgtcatttaaaatgttccatggtagaaaaaaaaatagattattttgtgtcgttttccaattcatatgctatatggaaattgtgagctctatcttcaaggtttactgcggccaaaaattatgatacaaattttttatataaatattttttctttatgggatatgatagcactttaattcaaacttaatatattctttctcaagttatgattgatttatgaatgcagttgttgtgtcaatgtcttaacgaccaattaagggtatggtataagggaccatagtgtttgatttggaaaattctttaaatatttgtcatatagttgaccatttcaaccccccattctcacttatttttgaccaaccaacaacttatgtaaatgtatatactgggtttttggattttcatttgtaccaaattacatggtgtgcagtttgagggttcaatcaaactttttaaattttattttttttatttttttatttatattggaggaggggatttgaattcggaatctctctttgtaagaaaaaatgtgaaattactaggctataatatgcctatgactatacactaactcaaaattgagctttgaaaaagttttttttgaccctatgacgtcagttttgaagaaatttgtgaccgtcgctattccagggatcactaaagggggtgtgagataaccgtaaccataggattcctatgactatggttattatgaaaaaaatgtaaccatggg

SEQ ID NO: 195630 - DNA, 605 bp, Cannabis indica
tttttcaagaattttggtcgaatgcacatcctatctccggattcgtgcctgagtttagcatttttggccagaattcaagcgcacttctctgagggagattttagttgaaaacgtttcccatttttggttacatgtgtacactaggttgatcgtctttggcaaataaacgtaagaagttacagttatcagtaatcggacataccatagcccccaaatgagctgagaattttggactcaaattctcgatcatttgcttggagtctaacttgtgtccttttccaatttctaaggaggagagttgagtgtggttttgccttactttgagaagcacacttttcttccgggggagttccttgaaagtgtacgaccacttttaggctttcgcgagacgaaaccatggggtctcgaatgaaaaccaagttgtactactggtcccaaacaatcctttcgtgatatgaaccttataggtgagagcatgggccttttacagcactagaggcttttggtttcccgaggggaaagctagacctgtgtccatgcgcgggcaattccctttatcctgaggttttgctttcaaacacttaagggcaagacattgttgggtg

SEQ ID NO: 195631 - DNA, 1122 bp, Cannabis indica
aaaaaatgataaaaaaaattatttgtatgagattatttatatcacactctggatgggataaataatctcatactattgagattagttggattaattatccagatttccaacattctcaaatattggactggacaaattagtctgtttacttcagttcagttctacgtaccaaccctaaaagaaaatttgacatgattgacatcaaatatatccatatgtagtagatttttattttttttgctttatggatgttacaatttcaagattaaagaaccacataattatctttgaatggaagtaggcataatttctttcattttctttggtgaaatatgatcctacccatgtggccatgtgtatattcatgttcaaaccatatataatctaaaagttttgaacacatggtcaagaaattattgaaagttcaaaacaatttacacaaagcgaaagcattaattaattttggcatatatgtgtacatatgatttttggaagaaagtacaacactaaattcaattaaagtaaactttgcaacaaaaggaaccaaaatgtcatcttccaatacattgacaatggaggaaataataaaagagaaaagtttcttgggaaaaaaaatgtgcttgacctaacacacaacttgatgagagcactttaaagtttaaactttcacaaccggacaaaagtaaaaaaaaaataaaaaaaataagaaaataaaattaaagaagagagagagagagagtataacatatattgctttgaggcttagttgaaaaggattgatcactcaataaaaaagttcaatacataaagattaattaattagtgttacattgaaaaatatactttgtacactatgaaagatcaaatcattagatttcttttgtatgattttctactattttcaataattttcaacacttagagctatttgtaataagttgtttgatatattaaattatattatagcatgcttaattaaagttctttatttcgtaacgtggcatgcattcatttgtgcaatttattattgttttcagcatgttatacaataataattttttacgtaaattataggctaattaagatttttacctcccgaactttaacatatatcaaattatg

SEQ ID NO: 195632 - DNA, 925 bp, Cannabis indica
atatatatatatatatatccaaactttagcttaaacgatttggacgaacatatatatcatcaattataatggagagagagaaagagacggactcatcaaagccacttatatagtatttataccatccatatatacacaatacccataacttgctttaaaaataaattgaaatttcatcataaaaatctaacaaatgcttctagaatgttgggaccaatttgatgactcatcacatctatttctagaccttagcaactaatttaaatatatatatatatttaaaaataagatgtctttttctaattattttatatttagtgaaactccatcaactcaagccaaaagtcggtgtgattggtacataaatatatccctatagatatatatgcttttaatatggtttatggtttaattaattgattctagccaattgttaaactcttttcttctttcttcttagtggtttcttttcttgttccctggtcatttgaaacccaacttaaattaaggactaagatgattaagaagagaaagaaaatggaattatatataataattatattaattataataagataccaaagaagtgttataataataataataaacaacatcatacatgaatgaacaatttgtggatatgttttaattgatgaatatatatttcaaaaaggggtgtccaaatttagaatactttgtatgtgtatgggcacatgacccacactatactatacatactattcatgattcacatatagtttggctttcccatatataataatattctttctaaaaaagaataaaaattacctctctcgagccacgccggtggtcccacacacaaggtttaaacagctaattcattttttttaattatatatatatatatatttttcttttttacttttttaggtcttttggttac

SEQ ID NO: 195633 - DNA, 1323 bp, Cannabis indica
ttcattctaataaaatatataaacaactcaattcaaaacaaattgattttaattacttgtttattgataataaaaaatattttttttataacatgaaatcgaacaaaatgctagcttaattgttaataaagctactaaattagaatgcatgtatagttggcctttatatcatgtgtaagtatatgcatgttattgttttttagtatatacaattattatttattaataagatgcaaaagagtgtctggccatatattgcaccggccaccagctaccctgtcaccactaattcactaaatccatattaccatcactatcaccttcctaattcactttttattgggtcctatctctctctttccatatatgcatcattaataatccatccatacacaaagattttgaaaaaaaaaatataactctttttaataataataataataataataataataataataataatatatagggtcactataaacaaatattatttttagttataataaacttataactaaagtaaaaaattggatgaccaattataaatcattattcatgtccaaaaaattttgtgactaaatatattagtcacaacaattataatttgttataattaaatgtgttcttagttacaataagtaaattagtgacaatttgtatctaaatattatattttaatcacaagtaatttttcgttgtgactaaaaattatatttagtccctaaaatttatattgtgactaaaaaattgacattaaaagtaaatattttttgtaataatttattggggggcaatactatcttaattttaagttgtcacatttaactccacaaaccacaaaccaattattctattagtgtttataagtgaaatgccaacgtgtattcctaatatgtgtacacttatgtactatagtatattttcattggttacatattattttaattatttaaatactataaaataaaataaaataaaacttaaaaatacattttctttttctaataaataattaaaagacaaaagacaaaaaaaaaatacatttttttttctttcttttttccaagttctgcttgagggttcttccctcttctatgagaactagcccaaccctaaccatccaatcgaagttgtccatctctagccgtccaaattcttctccgttcactaaacgctaatgctgacagtagctcagtagaaccgcctttgcttagacgcctctgcccagaccctatttcttactctccatctcttgtgcccctctctcgcgcattggtctctatcgaatctcaaaaaccctaaaaattcttttcttctcca

SEQ ID NO: 195634 - DNA, 1344 bp, Cannabis indica
aatgaaattgattagacataaacaaatgacaatttgaaatttgaactaattttactgtgcatcaagagataatatctgaattgaaattagttgattaagtaagaaaaagaaaagtaattaacctcaaaaagaagcttatcagcaagcatatcaacagcaagttgctcatcaccaaaggagttaacacaagcagttccaccacaagaagctgttcttactttaaatgcaattgttctaagtgcttctcccattgacataagcaatgttctcagtcccttatctgttgttgctttgttcaaaaactcttcctaccacaacacacatattttactagttttaacattttactacaaatcctcatattttatgacacaattttaatcttcttaccaagctatcaccaatttcgcattttgttactgatgtagagttcttcgattttacaacttttagcgacgattttggcgtcacacgcaatgattccccaaacaacgagcttgatttcaagacctgtcatggttattcaatattttgtaaaattctttaggtatgtaaattttttcgtggcgaaaatctttatacagtttatttttggcaatacatatctcaacagttatacatttgatgtcacatagggattaatatggtaacaaaatgactacatagagatttttgctacaaaattttttacataaaaacttaagtgcaacaaagtaaattacataagtagaatgagatggtctatattaattttgattttttgttaaaacaatgaaggactaaaaaccttattctaaaccaaagatatcataaatttgataaaaataaaaaatgcccaacaaagtatataaatacatacatacatacatatgtatatattatatagtagttaagattatataaattatgagtaccttggaattgaaagatggagaaatggatgaaggagagaagagagacatagaatgctgagatgaaatacttggaagaaaagttccacgagcacaacatgccacaccagtctccatactcaaattaccttaaaaattattcttctttgatttttaagactcttaaccaaactaaaacaaataaaccaaaagaacactaagctaagctttttgcttttgattttgtgttattgattgcattgggcatgagaacttggaaggagagtgtagtattagataagtgtttggacacgtggcaccctctcagtagatagacccaagtatagtagcattggctgagaagtaattatcttcacactcgtatatgtgtggctataaaataataagataatgataaaaggcctctgtcctcaccaatgataagttatgctga

SEQ ID NO: 195635 - DNA, 1755 bp, Cannabis indica
catacttattcttgacattttcaatatatttgagactaataaagaggagcccatttcataggctatctttcttgagaaaattacagatgatcttgtatacaatgtaatgatgatgacttttacagcaacaataactttttcggtaacttttctagtaccggcaatttttctagcgccaatgacttttcgagtgaaactgattatgttttacaaatatagaatctctaacttttttacaaaatatggaattaaaaaatccatataaatataaaaaaataaaataaaaagacttataaccttatagtattatttatttataccataaaataataaactcttataatttttcctaatttctacttagaaaaatccaaatgaacaacataggcataaatttggagcctataggtgaaatgctcttgaatttgggccagagtaaatggcttggtactatactaggctctttcaaacgtgtcatttctgaccactttctttcagctttatagtgatttcaaaatatcaaaagtgcttcattttctgaaaaataacaatagattaaatctaattttaaaaatgtcatttagagataaatcaataaattgtgtatttttcatctctaatcacataaaaaaaaattatgaaaagactgaccatccaggcaacttgcaaatgtacactacaatgacgcttgtggcagagcatcggaaataaagcaagggggcaacacagacatgttgacctagtttggaaaggctagatctaatagttacaatttaaatgaagcaagtgaattattagatttagatttttcttgtaaatggaataggaatatttcatttaccttgcataatttaagaattgatgtttcaatattgttttgcaatctggtttgatatgggaatatattgatcgaggtggtagagccgatattatgagttttggaaaattctcataaatacaagaaaattgtgttctctctctgcgaaaatgctgaagtaatgttgtagcaactctgtagcagttaggatttacctgactagggggattagttattcaagctattttttaatatatcacatttcgtgcaagcaattttccattaacagtagcattatttaaagcaagtttaattacaatccttttaaatttgaataattgcttaaccattctcatattatttttcttttatttaaagttgtaattagttagtgttacatcgtattttatttgcaatctctgtagagacgattttatttactattttattatttgtttaactgcatatatttgcgtacattaattttcactatacaaacctagctcaaagattgaaaaacaactagtactaagaccggataaccacttagtacaaattgttcaaaatcaattctcttaaaggaaacgacatgcacacaactatataaagcatagtgcatcgagaactaccaaattttaagggactttcaaagtgatatttttggtgcactaatgttcattgaaattttgtgtgtttttgtcatatagataagttgaaaaatctattttttttttaaaaaaaaaaataagtgtcatataaggtggtgtttgatataatgaaatagtatatatagtaatgtaatgaaataaaagtggtaataagaattgattataatgtttaatttgcacttgaaataacattgaaataattaaatattttgtgtttagcttggtatgagaatatactacaaaaaaattttagttactagcataaatttt

SEQ ID NO: 195636 - DNA, 1046 bp, Cannabis indica
gaagtttaaataaaaaattactaaaaatatacttactgatacggtaaaaattagaaaaactagtttcgaatacaatacaaatagtgtataaaatttctggaaatagtgcagcacagttaactatgactacaatatatatatatatatagatatgcatatatatgtatatgtattctgaagcacaaaacacaagcacatcatagagagagtaaccaaaccagaagaaccaagaaagttaacaagtttgacagcattaaggcttttaagtaccactggcttagatggcctgttgaaaaacccaagctaggctaattcaagcaaaaggatcaccctgctatatatgattgtttcttgaagcaatacaaacacccaattactaccacctaatctgaaagcaaacaaagtaatcaattgtctctttttgttttatttttgtgaattatttctcatcctaaaacattagctagctatatgcacgtgtgttatattgattttttttgctaaacacatctattaatcatctctcatattgattcatatattattataattatttcccaagaacaattttctaattagttacaatatattaaagagaagaatgattcatgcattattgacatttgttacataaatttaataaattttctcaatagttaacaatgtattagagaaatgtattttttattagttagaatcagtaaaagaataggaatgctagtattaaatttattaaataattaaacactaactagttacttttaattttgtaactagttataactagctacataaatttagtaactaggaacaattttgtttatttaaacttttaataattacattagtttgtagattttgtggttaagcgatcttaactaagggagaacaagattttggtcaaggtttgttggtttgctaactagctagagatatatcctattttttattttcttttaatttaattataaattgataagcatgtttagatgagtttgtaactagtaatcatttgtcaaataactagtaacaactagttatatgaa

SEQ ID NO: 195637 - DNA, 1128 bp, Cannabis indica
aaaaaaaaaaaaattaaacttcataaactaaacgacattcataatgtttaatctagtttacttttttatttaaaatgtaatattatatatatatgatattattagactttttttatcatgaagaaaaatattcaatagtgtaataatgatattcaatgtttaaactcaatgaagtacccttttccacatattttctctagttgttgttgcagcaataggaagaaaaataaatgtataacaataatgaagctaattcacatgaaaataaacatctcattgttatgcaaaagagtagagtaccatttagcaaaggaaactaatagaagacaaccatcccctactcataataatctattctcaacagttacaatagtgtaaagcaactaaaatatgagattttcattaatggatagtgtttctaaagaaggtgaaatccaaatcaaggcatccgtcaactctgattctttctcgggttgacaatcagtaataactctgagacacttccaattaagcaagaaaacgtatgaacattaactagaaaaaaagaacaccagaaaatcaataactatttgcttttaataataatttattacataatttacagtcagttcttttttcgatagaaaataattaagtaaccaatatacttgtacaagattctaatgcatgtacctggctgaaactgattataatcttgaaagaaaaaagaaaaagaaagggtgaatttgacttagtctgattattttgagatgagaattgttattaattataattgttatatgagacaatagataagttacaatattcagatcaagataacttgaacttaatcaatggtgatcaattgaagataaacaccttgaagacaacttgttcttcttcttcttcacttaatttggttcctcacttctattccctctctcattgttacatgtacattaaaccttaccatacaccagcagatattctcacacaaaagctcttacaacagattgatttctctatctcaaaaccaagctccaagtgttcaattttaatatcaatgatcaaatcatttggctaatattaataaatttggagctatacattaccaattgggctcgatgtgattctgctcaattccatcgc

SEQ ID NO: 195638 - DNA, 1799 bp, Cannabis indica
agtgcagatttcatcatcaccagcgtcatacttcagtatattttttagattatatacataaaattcatattatatatacatattatagagatgtctcgtttactcatagtattttatatataagattatcttaattaatgataaagtagtaaacttaagtactatttattttattctcttttcctcgtgtaactagaaagttctctggttattaataattaatttaacttaattttttatggcatgcatgcttaaaattttgttttattatattaataataataataatctacaattaattggtaataattaattatataagtaatagagagaacaaatgtaaccctttttcttgtacctattgcgtggagcaggagataatataattgtgacctttgcatgtcaaaaagggtaagatataaaatacttgtattttatttataagtttcattgcaaatttattatttgtaataaaaataaaaaaattaatagttatataagaaacaatatataggtactattgtataggtccattgtcactttctataggcaaacatcaaagtggtccaaagcactatatactataagttaaaagccacgaagccttgatgatattattattattattattagtaatttttaatatatatgtgtatgtgtatgtgtatttttaggattgtaaaataaaataaaataatttataataatattccaaaaagggaacaaagtaagtctgtgttgtagcaggttaaagccgctctcactagatcctttttctttgaggaaaacactgccaaaacctcagaccaaacagatctcaatctaataccatcgtaccttactttacctgtaaaaattcaaaacaataaataaaaataattattatcgaacccccaaaaaaacgtggtataacagtgtacgtagtaaaacagactattcagaccaaaaataataataaatttttgaaaaggataaaataacaaaaaaaaaaaaaaaaatccttagaaaaacaaaaagaaattgattggagaataataagaagaaaaaacaaaaggtaaagtataaagtagagtataggcaaaataatattactctctctctctctttgccttgaaacacaaattttttggacttttagagatgatgatggagttttccatatatgggattgcttcaacggttgggaataatcttgtttatgtttctttctctattttctttttcttttcttttttttttttacttttattattattcaatatatataattgatgaacaaatatagatcgataatattacacaagaaaattgaaaaagagtattcatttttttatatatctctttttctgtgtgtgactaagactacgagtgagacttgactgtggagatggaaatattggcttggaggtagctagctagtattaataatacatattatattattaattaatgttgttgttgtgtgtatatataaatatgcatgtaggtagtatagatacgtgtaagtatttatatatatttattattatatatagtgtaagtgtacaatgttagatcgctttcatgattcacagagacaaaactactcctttgggtttccctttctgggttgagcttaaccttttactctctctccttaaaacaccgaccactcttttagtttttcctttaacactttccatattaggtatttccaattccaatcccatatatatctctatctattttagttttttcttattataatttcttaccactacgtaattacaataaataaaatatattcatgatctatatat

SEQ ID NO: 195639 - DNA, 1045 bp, Cannabis indica
cattgtagaatcaccaattaatttaattagagaaatttagagtcgccactcatcatctcatatctctcatatatatatatatatatatatatatatagtaatttttaaatgtttaagtgaataaagttttttttttaaaatcaccaattgatttctattttattttattgtagattttaatatggtcaactatataactaaaatttatagcaatttttttttatagaaattttaagaagcaaaattgaaacttgaatcataactaacaatatgtactcaaacagtttcttaaaagaaaaagaattaaaattatcttcgttcttgaaacccattttaaaaaagctattatgcaacaagagttttatcctccctgggaattaaacccaccttaagagcacgaggaatgtgttttgtaaaatcattttacacataggattggagagaacgaccccagtgatcaccaatgaaactagtatccacctcaatcacatgcccaataagatcgccaacctcctaacccacttcattcaaaagacaacatattggtagattatgagttgtatccaaaacaaaacaaagtcaaaattaagattagagtagttttcgattctcgtttgttcaataaaaactaacatagagtgctccaaatccaaagttcgcctttgaaagcacaaaaaacgatcatcatcgagcaaaaatttaataaaaaatagattaggtttaagaagatcaacatcaaaactcccctttaatttccacttgttattggtatcaataacaacaacatcatgtaggatcacacaggctaaaacgatatacccagcaatctagcaacattttccaatcatttaaaaactacagccacatcaaaatctccttgagcatccttagatgtatcgacgtttaaagttcattgtaatgtgacttacccattagatttcatatcaaaacatgaataaacaacaacaaccaccactcccaaactcacctcgctggcaatagaatctcagatatgagaaatttcaactaaaagaaagaatagaaa

SEQ ID NO: 195640 - DNA, 1650 bp, Cannabis indica
cgcgaatgatgaatcttcctatcacttttatagaagaagatggcaggcatgtgcattttcccctcaacgaccaattggtgatcgaggctcaaatcaccaacaaaagagtatcccggatactggtgtacaatgggagttctgtccacatattgtttaaagctacattccaggaaattaggttagttaaaactaaccttgcaccttgcccaatccaactttaaggctctaatggagattctttactacccatggggaagatccaactcctagtcgtcactctaaacaagggtatccatcaaatatttatgcatgaagttcccaagctataatggaagtattggaacggtaaggggtgactggaaaggtgcacgcaagtgctatagtgtctccaccaaagcagttttcatgtgagagaagaaactgaggagccaaatcctggagtaccaatccacctgacactaggggtggtctaggaagaagatgagttagatcttttaatgggagtcgaaagaatgattgatcccatggaggatgtggaagaggtctgtatcaatgacacatatcccactaaagtcatgaaagtgggacaaaacctccctccagtggtgaaagagcacatggtggccaaagttaaagctaaccaagatgtcttggcgtggagccatgcagacatgatgtggatcaattcccatgtgatttaccttaaacatagacccagatgcagaccctactcgacagaagtgaagaccattggatttggtatgattcgtggcagtaaaagtagaggtcttgaagcttacctcgatccagtttctatgggaagcattgtacccagtttggttggccaacccagccttggtgccaaagccaaattggacatggaggatgtgcatcaattttatagataacaacaaagctagcccaaaagactgtttcccgctgccgcaaatagatcaaatggtagatgccacactcagatacaaacttatgggtttcatgtagcgaacactaactataatcaaataaagatgcatgtactggataaaaaacatacaagtttcagataagggtgtgtacaactacctagtgatgtctttcgggcccaagaatttcaaagccacccacccgcgtcttgtgaattggatatttaaagatgttttggtaaataatacatggaggtgtacgcggacgacatgctgtttaagtccaaggagcatggagatgacttagaagaaaccttttcaataatttggaaatatgggatgaaactaaatccaaagaagtgcaccttggagttttctcaggaaagttcctaggtatcatcctcagctctcggggcatcgaagaaaattcaaagaagattagagctctcttagacatgtcttccccaagaaagcataaggatgtccaaattttaattagaaggattgttgcactcaacaggcttgtgtccaaagacactaataaatgcattccattctttaacattctctgtgggagtaaaaagtttgagtggactactaagtgcgaaaaggtcttttggaacctaaaggagcatctggcaaaggctcccatcttgtcaaaactgggtgaggggggactgttgtactcgtgcttagtcatgtccgatcatgctatcaatgttacact

SEQ ID NO: 195641 - DNA, 1416 bp, Cannabis indica
tttaataataattataaaaaatcctcatagctgtatgtaacaatgaccatctaaattagtaaaagtgtttgcctttttttagatacttacaaaaaaaagttcctcttgactagatgccttcactcactaattgtgctgccttaacttaattttaacccttcaacctttattattattatttattattattattatcattcatcaacttctactatcaatggctctccctgattcttcttcctcatcttttcattgtgtatagtcttttctttcttaaatctcaatacaatgtatatgttcctaacacaatatatatttttatttttatttacatattctgagttttagtgattatatgttactgatgatcataagatattttataacatgttgtaggaattcttaatttacatctacaaaagtcctttccatggaataagttctcttttgtgtcctcaaatgaattgtaagagaaacaaactttaccctcccattaatttaagcaaattaaataaataaaaatatatattatgtaaataagaaaacccttctcattattattttcatttatgagtatttttcatctatatgataaaaaatttatacagtcatcattttaaatgactatgttcataaattattaatatcaaattgatcataattatatatataaaaaaactaaataaattcaatatgttttatttactttttaaaatctgaaaaaaaaaattaaagagatttttctttttcaatatcctttcttaagaagttatttaaattaaaaaaaaaaagaaatttatcctattccaaccaaaatcataaatcataacttcctcaaaatatttttattttttatatataataatatttaaaacaattaaatgcttaattacttaactaataatttatgtgagtataaatcctttatgtatattccaaaatataataatttcaagttgtaaaattcttttttgaagcagcttattatatataatatattcctttgaaactgacaattgagttgagttgatttgaatttcaaagtcaaggctaatatgttatgtagttcatagtaagaaaaattcttggcctttcttttatgtaatgtgtggtgatcgactatatatataatgttcaccaactcatattccagtcaattaaactgtttgaatctacaaaaagattcagtcacagtgtatgtaaattttttttactgtatacatatctctatatatcctaattaataatacatttacttttttatcttaaatctttttgactgctaatttcaacaagaatatcgttgaatacacatatagctgtatatttaaataaatataataatatatgtaatgttgatttgaattcaagccctccaaattataaggcttcaaaagaacacaaaagaaaagaaaa

SEQ ID NO: 195642 - DNA, 909 bp, Cannabis indica
caataatctaaaacaaaatataataatgaattttaatatcaaatcttcttaactataaattaaaaataaagtaaaaccttaatggtctaattatttttcaccatctcataaaggtatatacccaatgaccgtttgtgtgtgcagtagaagtgcagattattatacataccaccagcttatatgaattttgaaaacaaattattctcactttatccaatttctatctttatatggccccaaaagttgaagtttttaattaatgcattattcaaactaaatgaacaaataattaaaataaagtgtaataattggactaagagaaattctttccctagatgttatagcttcgtatgtaaatatatataatttggttatttttttttttaaagttattttgaaaaatgactttatataattatatatatagggatatgattttgtcccgttattttactttcacggattgtaatccgtgatatacggcagccgttagatgagtgagttatttgatctgacggttgagattgaataaggggtaattagagttaaaaagtagaaacgtaccttgatacttatttaatgtaccctaagacccatttaatataccatggaatacattccgcgaaagtaatcagataacaaaatcataatatataattaacaaattagtatccaattcgtgtaacaatgtgtggagtatgttgataaaatattaactatgttcaccactttgaaaagcattcttgagaaaaaactatttcacatagtaactttttaaaaataaatgttatcactctcattttaaaacttggccatcatgtctttaaattttgtaaatatttgtaattaaatctctactatatatgtacttttttttatcttcacgaaattcttagtttttgacttaaa

SEQ ID NO: 195643 - DNA, 728 bp, Cannabis indica
agccattttctttccatagtcatggctgaaagtcaaaccatcagctggctttgtataaaagctgatttctgtccaactaagccaatatatacaataaacaatacaaatacataaattcttaattgtaacttgtttttgttttctaataaaatttatattaattattgtcattttgatatagggtgtttattaatctactaaatgtccatgcattttgtttgattaagaaactttattaacacttcatatacacataaattatattaacagaaacaagaagaagtgaagagaaagattttattagatttaataattaaaaaccttgtaacttgttgttaccttgttgctatgaatcatttaatacaaaaattaaaattgtctttaataagcaaccttagatatatattcattgtcttatcttttaaataaagtaaaaaaaaaatgtttttgaattaaagtggtgtaagttcattacaatacaaataaagttggtaattaattctttgttttattatagtgtggaaagttatttataaataaataactactacactacaatggaattatgggataacttttataaagattgattcaaaagaaaaagatatacaaactcttgaacatattttatccctttaaaagaaaaatttgtaaatttgtaaataacaaaataaaataagaattttgattaaattcaggatttttttttttatgaaagaaaacatgtt

SEQ ID NO: 195644 - DNA, 1214 bp, Cannabis indica
aattacatgtatagtaaaatatttaaactttattttgtagtactgttaactatttaaaattttctaaacatttataactgattctaaataattacaacctacaacatcataaaaaaaacttacaaaatttattttgaatgtcaaatataaaaaatttactaatatacttctttaaaattaaacaatatacaataaactaaaactatcaccaaaattcacacaaagatagagggtggggtggggtttgtctcaaaagacatttgtgtgtgtgtgtgtgaaaaccagcacaccgtacaagtaaaagtgccaatggtatctaaaagtttcactactcaagataaatggtcaatatgtggcataataaaagccacaaaacaaaatctaaaaaagtcaaggtttagctaattaatttgctgtcctatctatcttcttctttgcaaaatcatacccttatagacaaaagtcaagctatttggtttgctttaattctaagaatatcctattcctatagcataaatctccaaattgtttttggctaattatctaattaacaagtcaactattttacatccctcgatcttgtaagtaaaaaaaaaaaaaaaaaactcttgatgtactcacgagttaaggtaaggtaactgatgggtttcttgtgagttacaactcaagaaccaagaaatgtcaactaattggtatcatataaactattcatgacaagggtcaagtatgatatgacatttttataataatcttgtctacccaaaatctagaattaacaataaattaattattattattattattactttattttttgatgtatttttgttacttgaaagagtcaacttaaaaaatgaaagaaagaaaaggtcatggggggtcattggcattggcatccaatataggtgtttgtgctatataacaattgaattgagaaaagggttccctagaaaaaagagtcttcaagtcccaacaatggaaaaggaagagtgccctttttgtcttttgaagagaaaaaaccaaggcatgaaccatgaacttagagagggattcatagatattggggtgtgagtgggaaagtaattggcattatcaaactttcacttattgtattgaagaaaactatggagaaaggttatacaatcatacccactccatctatatttccatccacagttgtctcatctcaactctttatttatttttaattaatt

SEQ ID NO: 195645 - DNA, 832 bp, Cannabis indica
ttatttatttattttaaaagaaatagtaataaaaaagagatatatatataggaggaaattattaaattacgtagggtatgacttgagcaattcatgcatttaattaattagtccttattttctccccaggtaataaattgacttaaacttcattttcacccccgcccagtactatgtcggaccactttgcttagggatgctatatatgtaactactggggcctcaatattcagctctacttgttttctaggccaggctaattaattaagatataagctatatatatattatatataaataaatatagagactcagactcatctccaaaaaaagtgatgcttaaatggaaaaaatagacaaaatcttgttcaaattaattaattaaaggcagagctaaattaagtttagatcagtttgaccgcgttttgtgctgctactcattaactcattattacattatatattatataaatgcatcgatgatatatctattattggaggaataataagttatatatattgccaattccagtcgtcagctttccccttattgggttaatagtatagtagctaggttttaatataacaaaaatgtcttgtatcactaaaatgtaagacgtacattgggaaattaatccattttttttatttatatatatatataatgcaaacgtttcaaaatatatcttataatattattattaaattataaatattgttttaatgtcgtggcgctcgtcagcctaaacggcgttgatttcggtgattccttcctttcgtttttgtcgtttcactgatactcaaagcacaaagatagagagagagagagaga

SEQ ID NO: 195646 - DNA, 1601 bp, Cannabis indica
tctctctctctctctctcatggtttggtattaaatatgtatcatttagataaatgccaaagaagaggaagaagaaaaaaagtcacaagaagttgtggccccttaaaataactgatcatgaagagagaagacatggactttttattatttttgaactaacaattttgaaaaaaagtcttctatttggaaaataaaatatgtaccaaaaactttttagcaaacaattaataatgtaaactattaaatggttttggtagtttttgtatggaaggtagcataatggaccttttctattaaaaattaggatttggtaacgatggatcaatttcatgccgacagctgcaaataataacaaaaattttttgatcactttatttatttattttatgtgaaaaaagagatcacgtggtacagattttttctccactccacgtgttagctataaaggtcttatattaaacttcaacctactttaattgagttatcaatagtcacctttagagtttttatcacacatatgacaccacctccagcaaggattaaacctttctttaattacttttaaaaaggattggagtgggtttcgaatcctttgacccaaacaagtaaggatgccaataagataaattcctactactacactacacaacacattattttttttggtcactttattttattttatatatatgacctcaaaaagggggtgatgaattttaaaagggaataagtgggaaagcaaaaataaccattaagaagatccccaatgtgaaatggatcttaattacaacaagcacatggaaattaattgtattctaataattagttactagctatagctaaataatataatatttaattttcttaagaaaaatataatgtttcttatttaagtatgcatctatgtacaactctttaattggttcacaatttttaaataagtatatgtgtaatagtgttagagaattttatattaataatgtatgaaataagtggtatgtgtgggctattttttttattgtcaattaatattgagatactaccacatatatctttacaattctaacatagttttagagtcaaactaaaactttaacgagtatctaatctaattccaaaaactaatataaaaagaaaagccaaaagaattatttgtgattgagttgtgcaagataaatgagtaaaaaatagctaccatcttgaggtagatgttagagagtctcacattatgtataaaaactaaatacaatacctaaaacacatgaactactactctcattgtcaattaattatgagatagaatctcatgcactttactatatactcacttattcttacttcctcaacaatacacttctccatattctaacaaatagtgtttttttagcatattaattatattaaagtactgtttattgaattatattagctagtgatactttttgttttttaattagaaaaggcaaaacccaaaatagcaacatgcaatctagaaattgatagtcaataatggatatattatatatacgatcatgatacattagatatacaatatatatctaaaatatgaatccaaacaaaacattaaaaatagtaatttga

SEQ ID NO: 195647 - DNA, 595 bp, Cannabis indica
ggacatcaatgtttgacacgtgagtagttccgagtcatagcaagtcaacctgggaggggtccctagccctgcccctaggttggcttcgggaactttgaaatggaagtttggactttggcaacttgtttccactcactattttttagtattctataccatgaggacatggagcaatcaaatccaggccttaggagctgaaattacatgaacctgcaccacaagagttaacttgggcacctagggttttgcctaacacgcaggttgacatccctaagatttgagtttctaggaccgtcttaatgcaaataggtcaaattttgcattggaacatcaagtagacataccacggacatatttgaggcatctgaatcaaattcaaaaaaagttcatttttgagcacccagagcacccggtgcccgggcacccagcgaccaggttgataatttgtcaatcttggcgctttccaagtatcagattggtgatccaacttttgcatcatcttcttcttcattaaaaatgggtaaataagtactttcaaggaagaaacaacacttcatgggtgccagaacaacgcccagcgcccaggttgacattt

SEQ ID NO: 195648 - DNA, 1224 bp, Cannabis indica
agttattatgtgctgaatgttttcataatgtctacatgggagttgaatgagtatgctcattaaagctgcagggtactataggattgtgttgctcagtgtgcttaaacgaaaaaataaaaaatttgagatgcacatttgttctactgctgattacggttatacgacaccaatgtttgccttcttaatgatctgtcttgcgtttgattcagtgcagagttaattttacaggagaatatagactacaatgatctagtaaactcaattcaaaatggaagcttattgatcaatgaagaacaaagtgacaagaaagcttctgacaatagagattccgaagtgacaagtggtaagtctattgtataatttttgctgtttttatttctcacaaaggaatttaagtttttcgatgaacttaacttagattttctaagaaagtaaagtggttaacatcagttgctattttttatatgtagacattttaagttattcaattcttcttctaaagaaggaaacaagataaaggtttagaaagaagctctttgcacctaagagtccattattcaggcacaagtgtactactgggtgtcattgcatagactaataaatgatctgttattcaattttcaagcttaaataactttaaatacttgcccttagatatgctacagtagtacctagattacatataacaatggcaaaacacatttcaattatatttagaatgctgcgtacacctattctcttttgtttagttgatagagggtcgatttacttttttctttatatttatatagttttcagttcctctggatcagattacaaattgcttaaaatgtactctctgagtagttttgatttttggctgaacccttatacatgctgtatgcgaaacaaagaaatgaagggaagacatgttaacaagagtagccatccacatgaatattaatctctatttgggagctttaaattgacttatcaaacatctgatttgatactcagtttatttctataaatccataaacagagtggatcttgggatgcaataaactgcatatttcttccacactggatttttgtcatttatttctcggttgtttatacttttcatgtatgcctttccttttatgatactttgttgcccattgaggatttggttacaaatggaacagtttggaagcttacttttcttcttgtctgtttgcactacactaataggtaattcacaag

SEQ ID NO: 195649 - DNA, 2399 bp, Cannabis indica
gaaattggtttcttcattaagaactggtttccagcgactatgccaattctgatgacttttttgaagtttgctgtcggtgccggaaaagtcgccggagtccgaattgacattgcattgtcaacggaaaaatcaccaagaaggtagtttcttcatcaagaaatcggtttcttagtgattttttcagtgatttttcggcgaaaatgccaattctgacgaattttccggcgccgacagtaactctgatgactttttcggcaccaaccgctactccgacgagttttccggtatcagtgacaaataaaacttcctaaacaaataaaaacattaaattgggatttgaaaacctaattacatatatatatatggcatatcaaataccataaaaagacctaaaaataaaaaaaaaaaaaccatataaattagtcaacttaaatgtgctatatttatctaaaaacttttaaaatcggcataatttcctcataaaaatattgtctatctttacatatacccacgatcattctatttttagtcaaacgtctttgattgcacagccaataattattttaaaaattacaaaagtagtttaattctatgacgtgaaaaatatgttaaatagactaagaaaaagacaattgccatatattttacgtagaaccggcatatttattattaagcaatatgcatcgttcttttcctcatgaaaagattcctccatgtcatcgatcgatctatcattatccaaataaataatttaaattttgtcaaatttatatgatagaaaaaaagagagaggaaacaaaaaagcttctgtaacaattgactcaaaaaaattcgaatagtaaaaagtagatatgtagataaattaactttgacttagaggctatcaataacagtacactcgacttagtgcgttgtgaaaatttttaccagtctcaaaaataaaaaataaaaaattaaacatttaaaacatgactgggtgagaatgaataaggattaataagcatcgaaaacagagtgcaatagagacaaataaacaaatatataattcatgatattgttatatatgaaattaattatactgacttaacatcataacatggtatgtttcgtatcattattcattagacattattcattagaaagacatgatatatatatatatatataaataagtagtgtggtaactagtagggtacaagtacaagcatggtgtgttttaatattgcacatatctgtccgtacagtgaagcttgatcaatcaacttcatcatcttactaaaattaaattatggcttgtgtagagacattgtttgtaatcatatatacatactaatgaacacacattaatctttatcaacttgcatttatttaataactgtatatataatcgtacaatttttaatttttgtgcttatatagtttttgaatcgtgagattcagcgtattgtcgaaatgccagtatactcagagttggcaaataaaacgaaattgtgatataatttttatatatattttttaaataattgacaccataatcagttctgaaaattctgaatcgataacttagtggataaggaagtgatatgcaactatatataaagtttgtgggtcttgtcgtccttcttaaccaaattaaagttgtccatttatacacatatataattgtggcttttatgagaatctagtctcgtctagcttgtaggccatgttaaattaaaaccagtgaatattttgtgtacacattaatattattgacaaaattaaagagatgtatctatagatacatatcaatgatatcataacaacttttttactttcttcttcttaataacaatataagaaatatgtttacgatcatttagtcttagtactcctattttattttttttgtgaaaaaataaaagtcccaaattatgaagaactattgcaaatttctcccttcacttcattgtgtctattttttttttttaaaaataatttacttagtcaggagccacaataaatatttaatgaagctgattcaatttattaatattaaatatagaaacattagtattaaaaatgaatgtgcttattggcgacttgcgccaaattagtgttatttagtgatacgcccaccaagcttttgggaaaaatgatttaaagagaatgcaactaaaactctttctaaatgaaataataattaatttataataatcgcaataatttagaatattctttttcaatcgataaaactctacaaagtcgtaactcaaataataataataattgatctcttaataaaatatcaattccctacaacaaaaaagtaaaacttgtggatatatgaattttcagatgagcattgtctgacaatcaggatataattttagggtggattaattaaattttttactaaa

SEQ ID NO: 195650 - DNA, 1130 bp, Cannabis indica
atatatatatattttataataaatcataatataaatgatatttaaatttaaaaatgttattcaaattaatataattgaaaggaatatttaagctcacaattttttaaggagccaacattaccctctacaagggtagttatattactaaggggataatattcctaggttaattaaaaaaaagtacaccctcaaaacaaactaagcaataatttacattatcattctcttgctagcattaacatattccaaacaaccccgtgaatatatatagctatatattaaatttaggggaatttttacaaaaaaaaaaaggggggggggggaattaatacgtgcatatggacatttgtgtatgaagtattcaaaataaattaattataaataatattatgaaggagaatatgattataggaaaatatgttgaagaaaaaaattggcgagggtttacaaattgcaaattttttgggtgtatagatttatgtatcgaaaatagaacattttgaataaaaaggagtaaaatagtttaaaaatagtagagatatggggcttttctaaaggtagttggcgagggtttttcgtcgtgggtgtgggttctgtgatgctactgggtttcatgttgaagaaaaagtcaagacgaagcttaaagggtttcttatataaccatatggcatcggttatttgaaaataaccaatgacataaataaccaacgtcatagggcacacgtgtcaaaaaaagttgatacctatgtcgttggttatttttaaatcgacctcatagagtagtttttttctcagattaaatactgcctctaaatggttttaatcaatgttatagctgcaatttttataaaataaccgtctctaaatgtcaattttcaatagacgagtatttttacaccctttatcttttcttttttataaaaaaagatggaaaaaatagcctttaaaaggttgttttgtagtaatgattgttgtcttgaagacgacatatatggtctttgtgaaccacctcgtacagatgtcatcgagtagatgaggcttcgtacgaaccttgggtgcaaggtgtaggagccctagtgatcatgggggtcacctcacatggcctttgtacaacgcaaggtgggggaggc

SEQ ID NO: 195651 - DNA, 1703 bp, Cannabis indica
tctaccaactagggagtagtttaagacgatgccgatacatcatttttcagaggaaggagccccaatatatggttagttactctacttcaagagcttgtttagaaaatgactttttagggtttttttttcttctctttaaaatttctttgatttgagggttatgtactgatttggttgggtcttatgtattgaggaatatgtattattctagtttatatttttgtggggttgtgctttgtgttgaaataagtgaaattctatgtgtatttttttgttatttattgtagtcaactattgattcattgtttgatttcaatatttaataagctttagttgtggaaagtatgtgaaaagttgagtaaatccatgtgagttctgtacatgctttgaaatacatgcttaagaatcttacacaagtgctcctctatagtggggtctattatattgttactgtagaattgattattttatatgtgtgctttttactaataaattcaactccattataataatcatttaatcaaagattgaataatttatagtatatatttttttgaaacagaacaatttatagtatttgataggtttttaattttttcaatcatcttctcttctgtgacagtttattcaaggaaagagatatttcattttatattttgcatagttaatgatttgaccttgtttgttttatcttaacatgtatgtggtttcattgtgtgatttcataaaatttgttttgtctaatttagaagtatttatcacatagatgccataagacatgtggctgctaatgtagttttcaatgaagaaattcaagctgtacaacaacaagtcctacaaatacaaactgaagaaccacaagttgaccaacaacaagtcccacaaacccaatttgaagaaccacaagctgaagaagattttgaactagaagaagaagagtatgcttaagatatagaagcagagaagaatgctgatgttccaaccaatccaaataggtggtggggatctgtgactgtgttgtgcaatgagacagacgaagtggatgatggtatagaaagtgaagaagacttaactagcttatgtagtgatgataaagacactactctgaagaagtattctatagagtataatccaaagacaaagtgggaagacttcaagttcaaactttatatgtagtttggcagtatagatttgttgaggacgactattagggaatactcaattcagaatgatagagattttaggtatgtgaccaatgaatctgatcgagtgagggcaatatgcaaatgtgatggctgcccttggatggtctatgctcatgttctctctgacaaaagaacgtttagggtgaactctttgtgggaaacgcacgaatgcccgttggtgttgaataataaaaaggctgactcatcttggttagcaaactatttcttggaacgattcagattgaatccgaatatggattttaaggcatttagagaaataactcaagataccaagttttctatggttagtaggcatactttttacagaacaaagaacaaagcaatgaaattattggaaggatctgttgaagagaaatatagaatattagatgactattgcaaaatggtggtatcaactaatccacgtagcacagccatattgaagacaagattagagggtgagaaaagggtatttgagagagtgtacatttgcttgaa

SEQ ID NO: 195652 - DNA, 690 bp, Cannabis indica
aatcaaataataaaaaataagaagatgaagataaagttgagagaaaaaggtcaacttcattaattttgggcaagtctgagttcatgatttcataagctcatgccagtttgtccaaggttgatcttgacattttatatttcataatgtgtgtttataaaaattaagtttaagacaaatctaagtttgttagaattagctttatacttttatatatatttgggtagcaagagaaaaaaagaaaagtgattttaattttgaaatgtaatattgacatttgagttttaactttttatttagttttaattttttcaaaaaattttaaatttgattttgaactattgttgaaataaatccctacatacattgttcagatcaacataaacatagttacaagaatataaacctacaagtggtcttcaacctctaacaacctactgagaaaccaaagctagatgcaaagtttgttaaaattattgtaactaactctcagctctcttatctacttttaagctataaatacaagctcaaacaactggaaattaacaaatcagaacagaattgagagaaaaggaggagacttatagagataagtcttggagccctagggttagggctcggagttcaaactcaaagggagtaccataaataaagaagaagaaggagttagtaacaaagagagagagagagaga

SEQ ID NO: 195653 - DNA, 745 bp, Cannabis indica
gggagtgtatcaactatactaatccgggtaactcatcaagatacgctttcgacttccgtcgtatggtcaacagggctggtcttatcgatttgggatttcttggccccgtttacacctgggcaaagggtacaaccactgccttcagggcttcggcaatgaagcgtgcccgccttgatcgaggcatggccacgacggactggagagtattgtttccaaatgctgtaattcatcatctatcagccacttgttctgatcataggccaattcttctagacactacagggggagttagcggtcggaatagactagttaagtatgagaacatgtgggcgcgtgatcctcgatgtttttgggtagtcaaggaagcctgggccaatagattacaccttaatccaatgattaacttccatagaaaggtccaggccacttgtcgcaaactttcattgtggaacaaaaaccaattcaagaaagttagtcaacaagttcacaatgccacagctacgttggaaagcacggaaaagagaaccccttcgaactggtatgcaattcaagaagcaaagaacaaccttaacgaggcccttctaagggaggaaatccattggaagcaaaagtctcgggttcaatggcttcatgaaggagacaaatgctcgaagttttttatggcctccaccattgtcagaaggagaaggaattttatccagtgcatcaaaggttccgagggaggtgactggatacgaaaccaaac

SEQ ID NO: 195654 - DNA, 2166 bp, Cannabis indica
ttctttcattaggttcttaatgataatttgaatctaatatggaatcaaatatttgactttgtggtacagaatgcattgcataaaatgttgattttggaagtttggaaccatgagtcttttgtaaaggtatcgttattcttccctttgtgtttcatttattcatatcaagaaattacttctttataccaaaaaaaacttcttcattaaataaaacctcaagaaattacttctttatatattacaaaacttttaattggttttaaattaactttagaacatcaattttagttcacaattttctgtaggttaaagtacctggggggcgagggaagccatccataattgttgacattgacaaggatgaaggtctaaggtatgtacgtagtacatataatagaaatagtaaattgttcttttaaaagtaaattacataagctactgttgtaatttctattgctttttcacaatgcaaatattagaattagtgtcatttcagtatccatatttcttttctgcttgcccatttgaaagaaagttttgttccacaactagaagtttcttctctgattgcttctaggtactaggatttcttatggtccattcgtttattttttaatattgggatatgggtgatcttgatactaaatggtaaataccaaattttgcaaacttgtattattattgattttcatgtcaccaaaagcttctatagttcaaattatattttaagtcagatttctcaatccttgcttcatattgcttttcttttgtatcccttcatagttcgatgctgcaaaattgagaaaactcagaccgaatttcaagtagagcaggggctctgttacagctggcaatgcttctatcataaggttccccctctttctcccccaaccaaaaaatagaaagtaattttgttttaagtgtggtaatgcaattggatatgttgtttcttgtgtcttctgtgttgaggcttgtactgtctaaatattaatatacatttcagcaactggtttagtaactgcgattcttgtagtttatactacaacaaaactggtttatattctagggttgcagattttaagtagccttaatatggtttggttcctttatcatgaatagtgatggtgcggctgcattagtcctagtgagtggagagaaagcacttcaacttggattgtaagtaattgcaaagattaagagatttgctaatgtagcttaggtactcttacaaatgtattggcttcctagttctattttactgttgctgaaacatagctcaaagaagattatctttgcaggcacttgaattcttcacaattgctccagcccttgtgattccaaaatccattttaaatgctggtttagatgcttctcagattgattactatgaaataagcatttttttgtaagattttagtacttataatctctctactgttcctgatttagtaagctttttttcttagtttcattcatttatattttgttcttttcctctccaggttatagctctagccaatcaaaagctgcttggttgtaatcctgtaagttagtagaaaactagatcatttgtttcaagttggtttagcgtgctataagtctaaaatatatgctatttcaaatctaattattcctacattttctacaattgctatagtatgttttatttgtccactttcatttgattttattcattttgctcaatgtctttatctacatttttttcccttctaattttcacgtatttcaagaatgccttaatgtacatggtggggctgtatcattgggacactcacttggatacagtggagctagtatcttggtcacattgttagaggtaatttataagattctcatccctagctctgcgtacctagtttgatgttctaatgtcattatatagttctctggttttgtttaggtgttctcttattgatctaaaatcattatccataatcatatgtatggttacattctctaaaatataatagacatgcgaagtgacattcttttaaatatctgttgagagtttagttgcggtggatttaaaagacattggtaaatttgctctctctagtgtatttaacttgttggaatttctgaaatgaataatgttgttgcaggtactgagacattaaaatgtaaagtacggggttggtgccatat

SEQ ID NO: 195655 - DNA, 603 bp, Cannabis indica
taaacaagataaatttagaactaagagatcctagtaaagaatgacgatagtggtggtgcttcgatcaccgcaggctaagaaaatggaggccacgattcgtggtggtgctcctgtcgaactctcgtggctggttggtttcataaagaagatgaacaagaagaagcaaaaaataaaaaataatataaaataaatttatgattttaaaatatattttttactttttattttattttaaaatttttaattaataaaattattatttgtaccaataaaaaattgacacgtgtcattttaacggatcagttagaaaaggacaaacagacttatcgaaaacatgatcttggagactattagagcgaatttttgaggttggaaactattttgcatcaatcttaagtttttagggacttttactgcaattattcttacccaataaaaagtgcacccatatatatatatataatttaactatattatttgaagggaatcaatttattcaaacagcaaaaacatattacaagaagggagcttcaaccttcgaggcatcgaaatgtccaaaagctatgtttaaaaagacataaaaacaaacaagcttattaggca

SEQ ID NO: 195656 - DNA, 720 bp, Cannabis indica
attaaagtcaattctcatgggtcatgatagttggagagtataaatgaaactcttcaattacacagttatagtatattacatagtcaagacaataatactaaattgtgtaattacctccaattacacccaaattcaattctttcttagctttccaaacgcaacctaatggtgtccggggtctggtcaaatttcaaagatgcgttaaatatgattataccacataaatgttagttagggtaatacatatggtaagaaatacaagattcaaaatgctttcagaaaaaaggagcaaaaaacagaaccaaacaaaatatttctatatccttttcctccttcacaaacaaaatcccaaaacgcaaatgccctgcatttctagcattacattaacacaaatatattttaaacctacctaatcgagatacaaacaaatctaataaccagcttatgctattgttaaaatcatataattcatatacacaattatctagagaagaacccatcagcgtacctcaattttccagaaacagagatgaaaccataagtagctaccgcagaacgaaaattacaatcagaggccgagacagatacgaagagtgagagagtgaaagctacacgatcagaggccaagagaatgaatcgtaggaacagaagaaaattggtttagaaaccctatagaagtcgggcgattgtgctgtcaacacatattattatttttaaagt

SEQ ID NO: 195657 - DNA, 2313 bp, Cannabis indica
gattttgtcaaaacaaaatttgggaaacttgatatcttggtataatatttgagagccaattttgattaaaatttatttaaaattatgcttattccggtttatgcaattcaacattagataaatgttgtctaagactacaaaaagaacacaagcgtgtaaatctagtcaggtttatcaaaacttttggatttgattctaatacagtttgacatgcaaaatgccaataaaaatgttgtttaagtgttgtaacaatctctggttggcctttttagtattatgataattgcaactttcttcacgttatgatgagaaaaatgaaacttttgcaggtaaacaatgcagggatacctggaggcaaactaaatcctgaaactttcaaagctgctgctcttgaaaaggtatatgtctggtgttcaatatgtgattcatttctaggtataatattaatttaatctagaggttaaaattaatgagatatttcttctgagaggtttaatgttttcagaaggaatgaaatcaatggattataatacaatccatttgaggctaactcaagtggcaaaaaaattcagtgataaaacacaacatggtttaacaactccataatcacttcaaatataacatgttggtttctatgtcactgtattctatctcataagtatattgcaaacctgtgattcagggccatttcttcacttactgaaaccacattcagagcaataacatttatacaatttcttctttctttgattcaaagagaacaagttttaatgtttaatgcagaaagggatacagctaaaaagggcaagtgaatttatgacagaaacttatgaattaacttcggaatgtgtcaaagtgaatttctatggagccaaagcagtgacagaagctttccttcctctcctccagctttctgattcacccaggattgtgaatgtttcttcctaccttggaaagttatcggtaagaaaacaatatttattggaacacaaatttcaagttaatcctcattcttaaaacatgtttgaaatgtcccctttatttccataaaataaaataaatgaaccaataaatgataaatgggataaatattaaaatgatccctggatgtgttttcagtttatacctggtggatgggccaaaggggtgcttagtgatgctgaaagcctcgatgaggatcaaattgatcaacttttgagtgagtttctaaaagactatagagaagattctctagagagcaaaggctggccggcttctgtttcttcgtatataatcacaaaggcttgcttgaatgcttacacaagaattgtggccaaaaagtatcccaacttttgcatcaattgtgtaagtcctggtcatgtcaagacagatataaattgcaacactggggacttgactattgaagaaggtgctcagagtgtagtgaggttagccttgctgcctaatgctggtccaactggcttgttcttcaatcgccatgaagtgataccttactaattacagttcattaacttcgtacttgtattccaccaccaaacaagtaccatttagcattttctatgtatttacaagtcccctgtttcattcatattgaataataatctattgcctcttcccctgttttattttagttgttctcatgataattaagattactttacctatcacaattaccataatcatatatgggacccggctataatagtgttactttttaataggcaataggcatactagaaacaattgtttcatgagagtcattggctgatgattgaaatatttgagcctttttttttatataaataggcaataggcacactcgaaagacaggtccttgttagtttctatttgaaaaaggtatgagaaatttcctttcctcccgatgaagttgccaagtaaagtccaaaaagtactgaaatggactgagaaaccatcttccttgaacattcactaactatagtccaattttgtggtggatacaacctctaatagcggcttcctaacaacacccgaatgagtacactaactcaatgatttgtttgtttgttggttttttcttttccaatggttgataaagttacggtatatcactgaagtggattttttgtacatgggcaatataacacccatgctcctcgaccaagttacgatatctgatcatgcacattgcacactcaccaccaaacttatgtcaacataaaattctatattttggcataaaaaaattaaaaaataataataaaattatattaaaatagtttaaaagaaaaattataaaatttgaaatcttttttctctgaaacttgactattc

SEQ ID NO: 195658 - DNA, 3759 bp, Cannabis indica
ttagttaaaataattttaagtaattgaattcatgtgtatatataaatatgattttaagtaaatgaatgcatttataaatatttaaaacatgaatgattcattaaaattttatttatttttttttaaataaaaagaaagtggataattagaaccttttaataattaatcttaggagtgtaatgaaaaataaagttgatgttatcataattaaaaaacatgaaaaaaatagttcataatacaaaaagatggttacgtaaattaaaataaaataatataaaaagcttacgattaataaaaatttacttatattgtatgtggctctttgtataagaattggtaagatgataaaattaaagattaataaaaaaaatctaaaaaaatataaaatgaagaagaagtatatcacaatattaatattgaatattgtccattgagtatattatgaatatgatgatgaggtaatgcaaagggatggagcatgattttatggccacatttactcaatgtcaaaggttgatgaatatgctggctcagaacaacataataatgaacagaccaaccagccatctgtctcacaattctctggtaaaatcctttctaaaccctcctctaaatggattcttgacacaagtgctactcactatgtgtgtcgcaatttgtccctttttcaaaatacttatgccgattctaagttttcttatgttaatttacccaatggaaatgctgttaaggtttcttgcctaggaaccattgtgatttcacccgatcttgtccttaaagatgtcttgtatgtccctgatttccatctcaatttattatctgtttcatccttgcttgaaaccagagcttgtgtcttcatttttttatcctgactattgtgttattcaggacacattgaagacacatcagattgggatggctaggagacttgggaagttattctaccttgaggagcctgctgagaaaatcagtcaccaaatcctttctttgtaatctgattccaaaataaatattgatacaatttggcataatggattgggacatttgtattaaaactcattcattgaataaataattgcaatttcaaggtcaatcttgtcctaactttcattactcaatttgtcattataccaaacaaagaaagcttccttttgtttctaatcataatatttctaaagaatgctttgatcttatacacatagatatttagggaccttttaatactcatactattgggggacacaaatatttcatcactattgttgatgaccattctagatgtacttgggttaattttatcaaaactaaggctaaggcacaaactgtcattcctaacttcattcagctcattaaaactcaatatcaaaagacaattaaagctgttagatctgataatgctaagaaattgcagtttgttgagttgttcaatagtcttggcatcatgcattatcattcttgcattcatagaccccaataaaattctgtggttgaaagaaagcatcaacatttattaaatgttgctcgtgctctcttgtttcaatcttgtatcccccttgtgtattaaaatgtgtgtatttttactgctgcacatctcataaaatagaacacctacacccaatttgaagagcatctctcctttttcaggttcttaaatccaagcctccaaattatactcatttaaaagcctttggttgcttggcctatgcctctaccttgtctaataacagatcaaaattttctccaagggcagccccttgtatccttcttggttatcctattgatatgaaagcatataagttacttgaccttaattctaatagaatattttgttctagagatgtgcattttcatgagactatttttcccttccacactcctgatgcatttactgttgagcatcaattttttttttttcttgaatctgctactgatatatcacagcataaaaattattcccctaacagttctgtaccttctcctattaattttgatatacatcccaaaatgttcccattcctgcccccaataatgctgatatacctgggaataatctgcatagtagcagactcattagaacatcacataagccctcatatttgcaagattatcattgttttttagagcaaactaaccctgccaagatattgtaggaatccccaaaagtcacaccttattctatttctcaagttttgaattatagcaggttgtctcccacttttcgagcaattgttttggccatttctagtcattatgaaactgaattttttagtaaagccagaggcataccagtttgggataatgccatggattgtgagattgatgctcttcagaaaaatcacacttggatcattgtttccctacctgcagaacatcatgctattggttgtcgatgggtttacaaaatcaaatattgagaggtttaaaggaagactcgtggctaagggttacaatcaacaagaaggggtggattacacagatacttttgaacctgctactaagcttgtaactgtgaaacttgtgcttgttcttgtaggtataaatagatggtatttacatcagcttgatgttaataatgccttcttgcatggagatcttaatgtggaggtgtatatgactctacctccagggtataatcctaagagggagcttccaccaaatgttgtatgcaaactaaaaaaatctctatatggactaaagcaagcatcaaggcaatggtttgctaagttttctagtgttttgcttgaggaaggcttccatcattcggctacggatcattcattgtttatgagacatagtggagacaagttcatcatccttcttatctatgtggatgatgttatattggctggtaacagtttggttgaaatggaggctctcaaagctcaattgaacaacaaattttaacttaaagatcttggcaacctaaaatactttcttggattggaagttgctaggtcccccaagggcatcatcatatctcaaagacattatgctttgcaaatgctagaagatcttggacatttaggatgcaaaccagtgactacacctatggaggccaacctgaagatgaagaggacaaattggccgatcctaagctttatagaagaaccattgggaagctgcaatatctgactattacaaggccagatatatccttttcagtcaacaaattaagctaattcttgtttactcccaaagctaggcatatgaaggctacaaagagggtccttcaatatgtcaaaaaccgtcctgggcagggtttgtttttccctgctacatcaggaattcagcttaaagcctatactgatgcggattggggtgcatgtcccgatactagaagatccactacaggtttttgcattttccttggacaatccttgatttcttggaagagtaaaagaaacatgtggtttttagatcctcagctgaagctgagtatagagctatggccaatacctcttgtgaacttgtttggttactttctgtccttaaggaattgaaaattgaacacaatggtcctgcttggctttagtgtgataacaaggcagctcaatacattgctgcaaactcatgagagaacaaaacatatagagattgattgtcacttagtgagggaaaaggtgcaagaaggtgtgattaaaaccaatcatgttagcacaaaggatcaagttgcagacatatttaataaggccctcttccctgcttctttaatgctctcaaaacagatgggactataagcattagctctccatcttgagg

SEQ ID NO: 195659 - DNA, 1566 bp, Cannabis indica
aagtataggtttaattctgtttgcaatgatcttggatatgactttatgtaacacgttgcaaagagagatagggcagaaatgattagttcaagtcgggtttggaactttagggatgagaactatattcatagtattgatgcccctatgcatattaccagtaacaaagaagtcagacactgcattacaaaagtcatcccccaccgtatcccaatattgcttgaagaatagaacaaacatcttatcagggccaggagctttatggtttcccatgtcaaacagggttctcttaatttcgtcctgagaggggcattttattagctcctctttttccacctccggaatccgctcttgaaataactgattatagttgaacgcctggccatcatcaaacccattaaatattcctttgaagaagttaaaaaactccagaccgattaactctcggttcaaaatccataccccatcattattcaaaatgctttcaatagcattcctcctacctcgtatagtagccgagagaaaaaagaacttagagcatttatctccctccttaatccacaaaatcttggccctctgcttccagtacatatctttccttttaagggcgtcattaagaaagcgacggatcgagcattcagtattccaatcacaggaacatgcaagtaagctctgcacccagttaagcttttcctcgaggtttttaatgaccgtgtccagtataccatactgtgttctattccaatgtaaaagagcgaccctagtagcacccaccctcctaaaagctcgggcgggggcccaagagtgggagatgaaattctaggcctggtcagccaccaatttacttctattatctctcgtccacccttcctcaaacttgaagcctcttttaaacttcacttccattccattagtaagaagaaacaaaggtctgtgatcagagttacacgtctgtgatgagcaaagaacaactttggggaacaggttgaaccaggcaccatcaacaatacctttattgagagtagatttaacatggcccctaccaaacctatgactatcccacatcaaccggtcaccctgaatagataggttaatcagaccgcgagagtcaacaaggttagaaataaaagggatgaattggtccgtcccagtggaaccatggcgctccaactcactcaacacaaaattagtatccccaaggatcaaccaagaaacaccgaacttatccccaatcttcatgagattcgtccaaaattgtttcttcgcatggaaatagggaggaccatacacacaagagagtagccaaggatgggttggggggtcagagttaacaattccagagatatgattacgggagcaggagagacattcaaatctaaaaccatacttccagaccaaaattatatctccagcagtactaataggtggcacaaaaatgttaaagtaaaattggagtgatttaagtgaacgtaccaggggagctgcatcaacttttagctcagtgaggaagacaaaatcaagagaccgcgatctgattagggacttaagttcccgaactgtagaggtctg

SEQ ID NO: 195660 - DNA, 524 bp, Cannabis indica
ttttttatctacgattttcatttatttcatatttgagaaactgaacgggtaaatgactgcctttgtaaatacattttcattaaatattatattgaatggaaaaaaaatattctctcaatattgtcggcatagccatttcaaaaaaaaatatatattgtcggcatagttttgcatttgtaagtataaaatttctagtaaaatagaaagaaaaaatatgtcttggagaaagacacccaaaaatcataatcaaaatggtccaactctcacacactcttgccattaaatgggtaagcaccaaagtgtccaacaaaacaattagtatttttttttaactgaaaaaacaataagtatattactaactgccatttttaccaaaacaattaagcacaaattaattttcaatgactgacaattgaagaatctcaccagtcaaaatgctgcccgtacagataaaaacgaataactcagaagtcatgcatacataaacagaagataagtagctaggttaaaattttttttttttt

SEQ ID NO: 195661 - DNA, 1671 bp, Cannabis indica
attacttgcgcaattattagcggctttataaaaaaacatatacaaaattatcggatcgatatatagaaataagtaaatgcggtagtaaaaaaagatatcgaaagtaaatgactcataaattaggccacatcaatttctaataaagttttcagcaaaagaattctaataaagttgatattaatactgcatgaaaccggccactgatttctttttaaaaaaacaaccggccaataatttaatacatagataatactaagtaattaaataagattgctgtaaattagcacacttaataataataataataataataataataataataataataataataatattgctatggatcggagaatatagcaacatcaaaaattaattctaaagaaaaatatatagggcaaatatatatatataatatacctacatatgagtctggttccaactctctcttacacttgattcttttgggagcagtactaaaatacctgtaacatataaatattcatatatatactaatgtattatgtataacagctagcatgaacaaaattattattctatatatcgccaggactttttataataagtttttttattatttttgaagaaacctcatatactaatttcaagactagctctggctaggattacttaaattacttttatgttaacatatatttttattttcttgcacaaattatatatattgcacgatccccatgaataaatatacataaaaaatacatacgttacccaaatgttactcacccaagaagcaagcacatgcatatatgatctatatatgtacatgcatttttaatataattataatagtatatacatatataattaaaaaatgaaggaaaaataaacttattatgataatatgtaattaacaaaaccaaattaaactgtaaattacatgacaagagttctagagcggttagatccaagaggagaaacacaggttgagaaggatgaggtgctaacacccatgatcggaagagcgaaagaggactcaagaaaaaccctccgctggtaagtatctaggctgccaccggcctcggccagatccttaatcatattcttgtaggtttccttaagcttcttcaaaatgctcttgtaatgaattttcagccaccttaatctaatctttctcagcttctcaatcaaaacagccacccttcgcggcctctttccgcccagcctaacacgcggtagtttcttccgccgccgcagtgggatgccgtggcgcctgttcgggttcaggaaggccatgttttgggggaggagtagttcatgctctatacccatttatattatatagattaatactaattacgtccgatgtgggacagagagaaagagagagaggatataatggtagagatatgcacaataatatatgtgtatttataagagagaaagttgactataagtgtgaaaattaaataagtaataagtaataatatatacttcgaaaaagaaaaaagggaatcttttagttcaggaccattgcttgtttatttttttaaattggaggaggataagatggtagagatatgaaaatgaacccataacatatataacgtacaatttacaaaataataataattgttcttcaatgcaaaatacaaattaggtataaaagagttcattatattggat

SEQ ID NO: 195662 - DNA, 3363 bp, Cannabis indica
atcatattaccctataaattgtgtgtgattaaaaataattgggaaaatattttgtattagccccactaaaccgtgtgcatctttttttcttggtaagatgaaattatgctttagtacagaaaaactaaaccgatcgacattttccctttctatgaaaataaaattcaacgctaatgatactctgaccaaaagtgtattataaataagcatattattattaccactagtaaaggaccattacattactgagacataatcactgctctatataacttttgtagattttttgttttttttttttaaataaaaaagaaagaaaaaattacatggcccaacggtaagcaagtatagcttagtactagtagttatttgatttagttggtcacatggaagatgagggaaagtagctaagagagaaactgaatagaagaaaatgatagtaatgattgtggtagaatgaaactttcttttttgagacactcagcatataaacaacactttaacgactattatatatgtatataaagaagaaaagaaaaggcacctatgatatgatatggtccctaaaataataaaattggatgattggtatgttttaatgggtgtggcctaccactttgacaaagagaagattggtggggagaatgtgagtaacgaaagacataccattcatcaatgtgtcattttatcattattcacgaattcacactttacacacacatgatatacaataataataataacaactcactccccaccttttatttttagttttttatttttttttttctttttgaaagtgaacctttcatttcagttaaagtatgcaattcatatcatgaatattgcaaaaattacaaaagggaaaaaaaaaaaaaacctaatttatatttaagttttaacctaagtcattaatttctaattaattaggtcaaagtatatatgtggtaaaaaatttaagactatttccaaccggtaaaaaaaagtatccatttactttttctcttgatttcttcaagtttaggtaccaaagaaatcactacaataaatatgagtattaggcgcaacaaaaattaattgccactaaaatcatagaaattcgctcctaatcattattagaggcgacaaattgcccttaaaaagtcgttgttaataattcgcacctaaaagcgctattaaaagcgacaaaaaaatcacatgtaagtaatacacgaatttctgaactttacttagtcactcttaaaaaggcgtgtcaaaaatctatatttgacttttagggtgacgtactaaagatttttatattaatttttttttttaataatattagaaatattgatatttaatttataaaataataataataataataaataaaataaaaattaatagtaacaaagtatcacaaataattaccatgtaatattattaaatagtacaataacataataaaagtaaatagtttttacaaatataatattagttgttaagacaatttaaataaaacagaaaaatagtactaatgatgtggttgtagttcttggttttataattgagacataaagtcatctaaccttccgttctcatcgaaccctgcaagaagcggtggttggcactgtgatgtctgctgtgactgtagcggctgtgatgtctacggtggttgtagcggctgtgatgtctacggtggctgtagcgactgtgatgttgatgcccccatcatccattgatataggaagacggaatgctcctgtgatgacgaaaggttgctatgatgatctacccatatcattcaaacctagaaatgctgctgcaaaatttcttcgtacatgtatgaatgtgtgtatggtggtccatacatgtaggggtaaggcggtggagggtgcgtagtggctgaggtggcgggattggttgtgctggatgttgagatttgtgattgcgaagatgtatgcatgtcatgatgtaccgctgaatgacaagaatgcgcaggtgaaccatgagacatgtgagtctgagacgaatgtgtaggtgaaccatgagacatgtgagtttgagatgattgaggcgttgtagtggagtatttactctttagcatattaaggactgctaaccttgtagggtccacagttgatgagtcgaattgtgatgcaaagagattaaacatcatactcatgtcattcaccaaatcctgtggaggcgcctgcgattggcctgactagttgaagatatacccttcaatttacggccaattccacgaacgtgacccatcttgaaccaaatgtctcttcaaataggctgatgtaatcaaatgacgactcataatcataatttgacagagattgagctgcaagagcagcctccaactactattatcttaaagcaaaatgttagaacaatatgacactaatattataaaaatataagaattaacttatgaaaacttacataatcttgttttgcatactcattgataaagcttattctttttagtatggacttccttccatgtctcgacgtaatctggggtctcctattatttatgaaataaatattatagattttacaatttaatataacttaactacaattataattgaacttactaattcaaagtgcctctaagctaagaattttatttcttgggttgaggcatacttcatcttttctaagttttaccgcctccttgtaatcctcaggtttcttataaaaacgtttgaaatgcttgtgccaactatttttctttgttctgtatctattaccacactcagttttggcacattttgaatttttttcaacatacggattctcttctatttgatagtaatactacatcaaaaagtaaaatattaacaaatataactttagtaaggataattttttttaattatttactagaagtcttcgaagcacttgattcgcatactgttggggcactacattctaatcttttaaatctgtaggacacatagtagcaatgtaatcactcgaaatacgtgaaaaagttgcatgctctactcctactatcttatgtgaaattggacagtaaactaatggtagtggcacttttgcctcccttcttattttctccaattgttcacgaatagatggaccacaaccttttctctgggcattttctattttcaataagaacaaaaaactttaatcaacatataatttttttataatttcaaatatattagaataaatataaattaccagagtcgtcctcacgcatagcaggaatcctagaagaatcgttggaatcttccccgctactgtctccacaagctaaatttgccaaaattttgatactaaacacaaaaaatttgttaaaaatatttatgaataaatgatttatacttctaaaaa

SEQ ID NO: 195663 - DNA, 901 bp, Cannabis indica
tatgacccatttcaactcaggactgaccctgcttaaatgatcgttatagtaaattcttttatccgttttggcatttaaaatgctttttaatctattttatgatcgtgtacgttataactatttatcactaataaatttctaaaaattctgaatagttctcaattctaaaataagatttaaatagctacttatcacacatataaaaacaaaacaatcacatgcaacaacatatataaattttatttttaacattataacttactcgtaattttttacaaataattttaaataaatataacatacacaacaaataagtgatcaccaaaatactcatttagtgactgtagacttacctttattatatgcatgtatataaatataaaagagtagtactttctgatttaagcgtttatatattacaacatgttttacctgggactcgaacccaggacctctaacactcacacacccacctatagccacttgagctagcctcacatggttataaaagagccgtacttaacccatactttttctaacttccaattgctttttggcggcgcctaccaaaaaaaatcaatgcaagagcaagagagttattacaacatgtacatttatatattaaatatgaaatcatgttacaacttgcatatacatatatatttatacacgtatacactctatttatatcacatacctcccctccatccctttcaacacattccacaaaaacaccccacaaaagaagagtacctaaacttcttcaaaaaaatggctaaataccataaaaatttcatcttcactatctctcttctcttatcttacttatctttaagcatctcttattatgatcatcataataagtgttcatttcctaaggagtgtggtaaggctaagacta

SEQ ID NO: 195664 - DNA, 1988 bp, Cannabis indica
aaaaaaaaacaaaaaaaacttgtagaagatatcaagagacgaccaacgatctccttgcgtgatttcgaacgaatacaccaattctcaatttccccaaaacaattgtttagtattttttattttgacttacattaatttttattggttttactaaaatttgagtttattagataattttttattgtgttagtcatattgtttgtgatctatagttaatgagtaacttttatgtgtgtaaagtctagttgacatagaattgtgagttttactagttaattaaagcctttgatgtgcaggtttagtccaaattatgtagctaattgccacaggttattgcttctcagatagatgaggatcaaatggatgaggaagggtctgaggttttggtggttgcagattctaaatggaagcatgctaagggggtttctagtgtggactctaatgtggataagaatatagtttttagtgagaccattgatgtggatatgtgaggaagcagtacggatttgatggctctaaaaaacgagttattagttggttctactggtcagaccctccctacaacatgagtgtcctcaattggaactatcgtgggcttgacaaccgacataatgttcatttccttaaagatgatgttcgtcatatgaagcttgtttttatttttctttttaaaactttatgcaagaaagataaaatggaatggattcatagacaattagagcttgaaggaatgtttgtggtggagctgagaggtaggagtgggggtgtagcaatgttgtagagtgaggaagatcagacaaacttaattggtttttctcaaaaccatattgatgttattacaaaggttcatggtatggaggcttggaggttaactgggctttatggttagcctgatagagcacaacgtgggaagacttgggattatcttcagactttggtgcataatactagcttgccttgacgtgtgtgattgtagacttgaataatatggtggatcaggtagataagtggggaagagcaccgtatcttgggtggatggtggacgggtttaataaaggtcttgaagatgtggggttgagagatatggaattgtttaatcatctggttacttaggagtgtagtagaaatacttttgagtttatggaaattcatattgatcaggctttagctacgttagcttgactttctttgtttgatatggcaagacttataatttgtaagactcatcttcagatatagtcccattttgtaagaaccaaaaagattttgcatcgtcagtaaatgggaggcagtttaaatttgagaatgcttaattggtagagttaatgtgttttcaactagtcaaggagagttgggaaggaagttctttgatgaatattcagcagaaggtgcgggtgtgtggtgataagctatgagtttgggggagagatattacaatgaagtttggggaaatgataaaatcttgtaaagtcgaacttaaaaagcttcgcaataagaacgatttgattttgagccaacgattctagttaattcagaagaaactatttactattcttgatcagaagaagatttatcagcgttagtggtcaaagcaattgtggctacaatccgaagatcaaaataaaaaaaaatccatgcgaaagcaagttctcagcatcgtaccaatcacattcataagctgaaaactgatcaaggtgattgggtggagtgggacaacaaccttcatgagttggttgtaaaatatttttctaatttattttaggcttctaatgctaactagcgcgaggtggttcagtgtgttctgagtactgtttcggctactcagaattcggagttgctcaagcctgtgttgaaagaagaagtgaagcatgctttgttctaaatgcaccaagacaagagcccaatatcggatggtatgactcctatttttccaaaaacattggtagatagttgtccatgatatggtaagtatggttcaggattttttt

SEQ ID NO: 195665 - DNA, 999 bp, Cannabis indica
acacgagtccacatgcacttcacttatttttctcagcacatgcactacactttttgaatcaacgcttcttcagtaaatgaaaaacacacacaaaaaaaatgaaaatgatttgatgattttgcagaaaacctagcatagaaatttattatttagctttcaatttgttaagccagttgatgtaggatagtgtgacaaacaatgataaaagaagacgactgagaacagacagaatcgtaatttttcttttctgcatttcaattattatatcaattagcttgttgaaacgggaataggttttgtttttctcaccatttcttatgatatcataaactatttggtgcagtttgtctctgtttgctttgtagagttattatacttctttttgtattcaggatcaagttcctccttttccgtcggagacagctgtttctattattgaagaagagcttggaggttctgtaaatgaaatctttgatcggtttgactatgaaccaatagctgctgctagtcttggtaatttttaattgatgttttagatgctttacgactcaaaatttccaattggactgtttttcacctagtatttgcaatgtagggataatctgtactatttgtaaaaatagtcaaagaaggaatgtaatgtgataatgttgtgtatattttactatgcaggtcaggtccaccgtgcaaaattgaagggacaggaaattgttgttaaagtgcaaaggcctgggctgaaggctctctttgacattgatctaaaaaatctgagggtttgtgtctttctcacatttattttaattgtatcttttctggtgtttgcatgtgttttatattctttggactggtttctgttttcattatttatttctcttgcattttaattttaactgtgtaacttcagcttccacaggctttggaaactttagatttcaattaaatttcttctctcttcactttcattgtgggccttgtcataagttagttgttgcctgtgtg

SEQ ID NO: 195666 - DNA, 1703 bp, Cannabis indica
cgaagttaatttagtttttttttttggcgagtcaatattcattcacaagattaatattcccgttaatgaaaaaattaattaaacaaacaaacaaaaaaaatcatagctaagctaccatttgataatgataatatatagtttgaatatctttcaaataaattgtgatctacgaattattaattattaaaatatgttgtagaggtagctaggctaggacggttacctaattttcataccattaattataaaaggagaagtttatattatatataaacacatatatttatatatagagggggagattgcaaaacaatataatattaactaatttaaagatgttgcataccattccattggctgcctacaataataagcttgatcttgccacgtgtctccatctggaccgttcatcttcattatcgtcatcatcatcaatctcggccaatatgatttgcagtgatggtaaaatttatgaatatatatacattatatatatggttgaataatttgtattttgtagcacatatatatatttatgatcatataatgtataaagataagtataattatttgcgggctcgtttagaacgtcgtattaagtcatattgtattatatcgaattggattatatattatatttttataatactatattaaattttaatttatactaaaatattatatatttcagtgtccataaaaattaatactacttatagttttacacaaaaatattgcgtaaaatacatttcaatataatactatacaatacaatacagtataatacgacgtaccaaacaaacttgtgtaaaattacaattttttaaaccatatgtagattattttccttagactcaaatatttaggcttatatatttaattgatatatatgtatatagataaggattttaaataggaataatgtgttattgtaaaatttaagtttttatatttaatttttttatctaattaaaaaatattctcatcattttttacattatatggattgaggcataaaaaattaagaaaatttatttgtcaaaaaaaaattgagtttgacttaaatattttttatacaaacatatttttttatatagtatataaagagatattttttaatattcttttaattaagtagctagattaagcatataaatttaatttttttattattcgtaataagatcaaaatctaataatttaatattatagttaaatttttatagtaacctaaaaaatattgtatatatatattatatataaattcaggtccagccacaatgctagggagaaagcattattattgtaattcaaacatgttgcagacgatttatccattgccattagtaaatgtggcgacgtgtctccatcgacaccgtttatcttcatcatcagtgactaatttcacatgtgatggtggtagtactactcttaatgtgaaattgaatagtagtaaagatgatgatgatgataattataataaccaaaaaattgtgaagagagatgggcataataatagaagaagaatgaagatgaatgatgaatattttgatattgagctcgaagttcgtgattatgagctcgatcagtttggtgtcgtaaacaatgccatttatgcaagttattgccaacatggtacgtaattacttttaattgttctgtgcatgtgttgcatgccctagtttgtcgttttttttttttttt

SEQ ID NO: 195667 - DNA, 1728 bp, Cannabis indica
ttttgtagtcgctgtgtgacatgtatatgaaaatattttggaaacatttgtaaaaagtttaactcgagatcccgacaatgtactctgagaattgaaaaatggttctagtgaagggaggctcgagagtctaattcgaataggccacattcttctgagaggaaagaaatttatagattatattaggaaaataagcttgtggctacgttttttacctctttagaaggaaataattttctccatgatgagagaagccaagttaatgtttacccctaaagtgattcaaaaaagaagaaaagccaagtcttgagacaccattgtcttgttggaatttggaagccgattgctaagaccaaaccgcataagagagacatggccataagtgagatgagtgttgcgaacactttggccagcaggccatttgacttgttcaccaaggagatcagtaagaatgaggtcatgattcatagtcacttcatcattttttgctcctttaggcattttcaaggcttcttcaatatcattttaagtgaatgaaaaccaatggccacgaacatagactttaccaaagtacttagattttttatcaagcaaatcatgagtaaagttagcataaaattccttaacaatgccatcaatgtaaccttcaaacccagttaaagtgtcctcccaattttgattttgaatatacttcacaatgcataaactctatgagcatttaaattaaaatttctctcaatttcaaactttcgggtagcatataaggtccaatcatgttgattatcattataaaagaatctagaacttactacttgagaggaagaaagattaccagacaaagtgcttttcatgggttgtttacccttggctgctgctgaagctttgactgtagaagcagaacgagaagttactgcgctgcagattttggcaaggatggctcaggatccagattaacaaaattatcctcaattttgattgggacttcctcactgttagaagagacaacatcatcgtctactgaaatgtctttttcggatgaaaaagactcagttttggaatcagaatccttagaagacacttccatgggttcttcttcttcatcattactcgaggaggccgagggagggttaagtttgagctttagcagcaggaacaggcctatcatgacgtcatttggtttgagcttcttgttcaagagaagcttgctaggcatgggtctgagatgaaagacctcttagggttgaactaacaccagttgtagcaggtggtgattgagtaccacgaaaaggagatgcctcaccagacaacgaggaagattttgaaccaggcctagaagtcttaggcaatcggatatgcctcatagatttttgagcaagtattttgggtgctcttttgctcgaaggagtggaagatgacactttctttggttcacatcgaagatgaaatgaataacctagattcgaagctgttgctgcagcatgagatggttatgacggcataggggaggcatttgatggagcagccttagtattaaccatctttcttgggtaccctaaattctttgtcttagccatgaattattgaaagtaagaatgaaaacaaagagtgaggaaaacaagggagagtaatatcgggtagaagatgagagaatgtgagattaaataaaaaatgagttggtataaataatgatatgaaggaagagtaaaaagaaaactgaaaacaactgccttt

SEQ ID NO: 195668 - DNA, 2656 bp, Cannabis indica
tctcagaccgacgatgacatcctcgaacaagttcactattctccagatcctcctgttggtgaccttcatcaacctactattctgtacttcacccttcaactctcgatcgtttggctcatgaagatgtatcaagccctttcttcctcagtacaaaatatgacactagcctcattctggtttccaccgttctcaacggtgctaactatcaatcttggaaacgagatataacaatggcgctgatagaaaaaacaagtctgccttcattgatggcaccctacctcgacctacaactggtaatccccaccttatttcttagattcgttgtaacaacatggttatgtcttggcttatcaactctatttcttctaaaatagcaaagagtatcatgtattttgatcttgccacagatatgtggcatgatcttcaagaaagattcaatgaaggtaatggactccgaatctttcagctacaaactcaactcacaagtttacagtaaggtgatcaattcgtcacctcttacttcacaaaatttaaatcaatttgggatgaattaaagaaattcgaacctaacatcacttgtacctgtagtaccatgaaatttttccttgattactacaattaaaaccaagtttttcagttcttaacagatctgaatgagtcgtatgctttagtacagactcagattcttcttaatgaacctatcccgaatctgtctacggtgtttttcatgatcgttcaagaagagagataaagaacccttggctcatcagaattgacttccctggcatcctctgttcgaccatcttcatccaccaatcctccacgctcaaaaaaaccacgaccctcatgcaccaattgtggcaaaccaggccattatgttgacaagtgttactttatttatggtttccctccaggctatggagacaagaaaaaatcatataaagggaaatctagtaccaataatgctactgctagccccaactcagacaatgtcgctgcaaactcccatgtagatctctctacccaatgctagcaactcatttcacttcttagccaataacttagccaagcacattccgtgatgatccaaacactgcccctgcaacagccaacatggttggtaacaaatcttttttttttcaaactttttcttggatcatcgacagtggagccacacaccatatgtgttctaccaaatcttgttttgcttcattttctaatgatgcttttccacaatatgtgattttacctaatgacactaaaattccagttaagggtattggtactgtcaagataaacaagcacatcactctcaataatgtgttctttgttcccacattcaacataaacctatttccattattgcttttcttgacaacaccactagtgtcatacaggctcattctccaaatgtgtgattgggatagctaaaagacttggaaaactctatgttcttctccaagaatctcctcctatagctagttctggttgttctttgttttttttaaaataatgtagaccaatggcataaacgccttggccatccctcaatttacattttaaatacattcaataaaaaaatatattctagtttttccatttcacaaaactatcattatcatattttccatcttgccgaacaaaaaaaaaattatcattcatatcaaacaacaactttgctaaaaatgtatttgatctaattcatatggaaatttggggacctttcaatgttataagcatcgaaggatataaatatttccttacaattgtcgatgacaagtctcgatttacttggactttcatgctcaaaaacaaagcaaaagtccagacagtcattcccatgttttacaacctggtatgcacacaatactctaagcctattaaggccattcgatctgacaattccatagaactaaacatgcaatctttttatgcatctaacgacattgtccactaccattcttttgtagaaagcccacaataaaactcagttgtggaaagaaaatattaatatctcctcaacatagcaagagcattgtgtttccaatctcacttacctcttgtttactggtcattactcattcaaattgccacttatttaatgaatataacttcttctgcactattccaaggcagcacctcttatgaacaacataacaacaaatcacctactaagatgttttggatgtttagcctatgattccactctaacatccacaagacacaaattctcaccaagaagtcgtgcctccatattcattggctattcccatggcatgaaggtatacactcttcttgacattaaaaccaagcaaatttaccactctaaagatttcatcttccatgaacacatttttcccctcactggtcaaagttcccatactaaaatacatcagtttttccaacaactaatcacttcagttcacataccaataactctagatacaacaactacaactactagtattaaaaacacaccagttcatactactaaggtacaaccaactaattcctcttctggttcaataattaaaccagcctccactactgaggcaccatcgagagacaatagctcttttaccacattggaccaagctaatgaagtccagtctatcacctcaaaaattggtttccacataaacagacctcctcattt

SEQ ID NO: 195669 - DNA, 904 bp, Cannabis indica
taatcaaaacaaatcaaacactttgttgcttgttcttcgtggataaaaaatatatcttttgactttaattagttaaaattatatattttgtgcaattattaattaactaattaagttgttcgtggataaaaaatcttttgtgtttgtggccataattgtacgtagcaataattaatatataagttgatcaaactttacaactatttgattgagacttaacattgactacgtgatgataagaacctcaactcaattatataaacttctattttggggttggataataatttttctctcaacattaattaaatattattcagatttaagacaaattggtatattaggtttagggctgacaatatgggttacaacacgacgacacaactcgaaaacaacacgaaataaatgagtttgggtcacgtttaataatcgtattgtgtttgtgattgagtttctgacacgtttaataatcgtcgtgttagtgcttatcttaatcgtgtcgtattcgtgtttaccttaatcgtgtcgtttctaattagttatgttgacacatttaataattgtgtcgtgtcataatcgtgttgactaatagttgtggtgactttattcaaaaaatagttgtagtgacatcttagcaattatttagtcacttcatgaaaattagttgtgactaaaagtgactttcagtcacaatattatttttattgtcttaaaatttaagtcggactttttagccacaatctcatcacaaccaaaaaaaaaaaaaaaattagtaaccaaaatttttggtcacgatattttaaattttttagtcacaatttttattgaaactaaaagtcaaggttttttttttcttttttttttttatttaatatataatgtatgcagaagataattacaagtt

SEQ ID NO: 195670 - DNA, 2373 bp, Cannabis indica
gcattttccccacacagatcctctcgtaataacagttcagctcgctaataaaaggaaaaagagggttctagtggataacgagagttctattaatattctctacaaatagacttttaaaaagatgggtttagaagaagcaaggttcaccgacgatagtgtcacaagtttgagcacaattgaactcccactcaccatgggagaatcaccattatctacaagtcagatccaaagtttctagttgttgacatcccttctgcttacaacatactaatgggttgcttgacattaacaagaatgggggcaattagctcgatcaaacacttgtctctgaagttctccactcattcaggagtaggggctgttaaaggcgaccaactattagctcgacaatgctatagtatgaaattgaaaaatagaagggcaagccttcaattgatggtaattttgatagaagaaaacgaggaagagttggaagatctggatcctaaaatccatgatgaaaattaccaactcaggcccatcgaaaattagaagaggtgaatttagatccaaataatcctacaaaccgtgtcagcattgggaaaggtttggaggaagaactaaaataaaaactaatcacttttcttaaggcaaaccaagatcagttctcttggagccattcagatatggtctggatcaacccgaatgtgatatgccatcacctcaacatcgacccaacttatctctcaaagcgtcagaaataaagacctttagatcccaagagatagaatgcattaagagaagaggttgacaaatagttgaccaataacttcataagagaagcattttacccctcatggatatctaatccagttcttgtccctaaaccaaatgagacatggagattgcatagacttctctgacttgaataaagcatgccctaaagactgctttccattaccaaggatcgaccaattggtagatgcaacactaggacatgactgatgactttcacggatacatattctggttataaccagattacaatacatgtcccagatcaggagcatacaagttttgtcaccaatatgggactttattgctataaagtcatgccattcaggttaaagaatgccgaagcaacatactaacacctcatgaatggtatgttcgagaaccagatagggaaaaacatgaaagtttatgtagatgatatattggtgaagtctgttaaaagagagaaccatacaaaggatctcgcaaaatgctttgccattttgaaaaagtatgatatgaaattgaaccccaagaagtgttcttttggggtgtcttcggaaaagttcctcggtttcattgtgaatgcgagaggatttgaagctaaccccaacaaaataaaaatattgcttaagatgccttcgccaacaaaaccaaaggaagtacagtctctggctggaaggatggcaacactcaacagaatcatctcgaagtcaactgataaatgccacgtggagtggagtacggctgtcatagtccttggcttgaaccagggacagatcctcctcgaggagtttacggaccacaacaatatcattttgatgggcgtgccatagtataagcgacgtcttgctcacccttgccttctccttttgcttttccttctcaccggtcgccgctagcgcagaagaattacactgagagatttcatttgttccagcaatacctgccgtttctgaaccgtcggagcttatgaggggagatcggatccaactttacatgttttctgccacatcatccttccacttttctttttatgtaaaagagaaacttaaaatataaaaaatcaatcttcttttttacatatatagcataaaaaagtccataataatgtaaacaattcaaaatgttcataaatttaagaattatttagatatgccataaaaaaataaaaactaaaaaaatcccataattcatgtattttcttctatagaaattttatatgtttgattttatttggacctctctaattttatggatttaaaaattattttcatagactactaaggagtgaactagaaatattaaatataatgttgcataataaataaatgagacaaaacaactacatagaaaaaacaagtagatttttcacctccttaataatagtcaaatctcacagaattactcattaataatttaatcttaaactatttataaacataaaatgcataatttatttaataagaaaaacatatataaaaaaaaattaacaaaattttgtaatcttaaatttctatttcatcattagacaaacattacttttacaatgtcattttatctactttgtaaattcaactctataagaagaattcccccaaaaaaaaaaaaactctataa

SEQ ID NO: 195671 - DNA, 2187 bp, Cannabis indica
tctctctctctctctctcgtgatgggtgggtagactagattcatggtttagtcccatttagtttgttttgattccaaattagtcatgataatctgagtccacaagtcataagcttaggtttcctatttcgcatctcatatattttagtaagataggaggattcagtttttaaggatagaattcccaatcaagttttgggagattctttcatatgtatgaagagtatactcttttgaactattgtatgcactgtcttttatcacaacgtgactatctctgctacagaataattgagaaagtggtgtagtagtgtgtcttggtaggcttttctttgtctgtgtgagatttacttagatagagacggcgagatattgttgagataaatatgcaccaaaataacaacaaaaacaccctataaacttataattatatatatttttttgacaaaaccttattaacatatttgtaaagcttatctaggtattgtcttgcaatagctcatatttagctttcccaaacattaaggtggtgtggttatgtatggatgtcttctctctgatgcagaaatacttgagcatgcagcttgtcttgcacagttttatttttcttatcattgttctagaaagggaaagtgctctttggagctatagtaaatgttatctttcatacagacccacaacattgcattcatttttattgatattcttgtaagaacttataatccacggatctctatttatttgcatctggataatagcacactgcgcttaactttacatctagctaatactggaatagtacattgtacattgtggaaaatatgaaatcccggctatgatattggccgagcttgtgaaaggcttagaaccgttcattgtgttctgagcctgaattttaggggataattaaaacacatttcgatggttttcttttcttttgtttggaaatgaacaaacaagagattttgttaagtaggaattagattccttttatttttagagtatttagaacttttacatgtagatttcacttttagagtatttagaacatttactgatagatttcacttggaaaagtgaaaagtttgtaaaatatattttcacttccaatttacttgtatatatccaatgtaagaaaaaatttcttgggtttccttcttttcctctcccctcacaatttttttttccatggtaaaatcatagctccaaacaaggaaagcttcagggaattcatgttttgttcaccttaatggatatttgattattatgaaacaaatataagaattttgctttgatttttaaggtagagtggtgagatgaaatggcattgctttgcttagaagtttgatccttcgttccttttctttatttccccttttcaagcaatcttctactgtcacgggcaagaacccccatatcattttttatggaaaaaattaaattatattcgtaaatgctcaaaagggtaccgagatagttagaatttacatgaacatatccataatagtgaatatagggattttgcttgatgattaaaaaagagaaagaaggtgttttactctgtttgaagaatggcatctgtcattttggctgatatgtgtggcattcaaaactaggataaaaattatagtaagaccagtttgtgcattactaactgatatatggtgaccaacctaacttttggctgcaggttttggaccgtggtgaaaggatcgaaattctggtcgacaagactgaaaacttgcagttccaggtaattacatgctttttgatttagtagttcagaaggaataaatatacttacagttgatgtaatatgctaacatgaacttctgcacttgaatccaggctgacagcttccaaaggcaaggaaggcaattgcgacggaaaatgtggctacaaaacctccaaatgaagctgatgattgcaggagcagtacttgtattgatcgtgatactgtgggttattgcatgtggaggtttccaatgttgatgatcgctggacaaagcaaatgctggaacttcattataatgttttttttagccgttttctttttattttgatctctatgtttttagccgtttttccattacttggtggtgttacaaagcgtttcttatgtatcatgtacattgaaactctccagtctttgccaaagtctagaaacatataacatgttcaaccatgt

SEQ ID NO: 195672 - DNA, 1030 bp, Cannabis indica
caaaactattgttacttaatactgcaatattgataagaaactaaaagttcggagtgttaacacccaaataagtaattagtttaattgttatttgaattagttagttaggttgtttaaggttagtctttattttgttcggttaaaaagccttgtaatcttaatactgatttgtctataaataaaaaggttaagtctaatagttgagttagcttttgctaagctaattctctgttagctttttttttttctttttgagttcctacatggtatcaattgtcttttaactcacgttcatgccttcttcaacctccaaacttgtccttgcttctacaccaatgtcgaatgcctttgcttctgctgtctctacacagccacaatgaaatcctttctcgaaatccctcaccattattctgaatcgtctgaattttctcttagaaatcgcaggtagtccttacagtcatcagacacgaccttgatgaaatcctgtttattggcgtccctctcctccgcagtagctagttaatggtgcaccgaatcctggatactaacaatagcggcgcaaagatcagcccttgctgtcttggttacgatcatccatgtcggaaagtttgcttgcctcatttgccaactacttcttttactatttggcgtgcattgcaacaaaaattttctagttaaaccaaaacttgtcgcctccaactcaagggtcaattctccaatgtgcaaaaaggcaacctctccatctcagaatacgttgataaggtccaatccatctctctaatgctttttgtttcgcaggctcccctgttaatgattaagatttagttatgtagctgttaaatagtcttggcccaaaatttagcttggttgtctctggtatcacttcaagaagtgatgctttgtccattgaagaagtatagtccctacttttctcgcatgaaagtcgattggaacatcaccattcaatgatcgatctctatgtcaaaatgcaagtaaatcgcatttggaaatggaagagctagaggtgttc

SEQ ID NO: 195673 - DNA, 1837 bp, Cannabis indica
gaacatgcaatgatgtatgtatacactacaacaatatgaccaagtctcataatatatggtccaaattggatctgtatagcatgaaagtttatatagtgatcagagattcccatatgggatccaagccaaattaagtatttaaataaaaaatcaaaactcacccctgttgtgtctatataaaaattatatactccacttcatcttgtaacattatgtagcaatggaaattaagaatgctatcaaatcagacaaaaataagaagaaaaatcaacaagaataggagagttacagtctacttcctatttaaacatctttcttaaatttctgtacctaaaaaatatatggagtaaataatgaatacatatcacaatttaaaactactaaatgatactaaagtatatatacacaatgaaataatggtaaaataaagaggagaatcctatgcaaaacattttaaaacatctcatattggtaatggattatgccgagcaattggtaaatagaggaagggatgagcctttagaagggtcaacccagttccctcttccatgtcaacagtgccatcaactttccactcaaagcactgaatcatagcagcaagagtgttttgaacaagcctcaaagcaagtgaaattccactcccaaaaggcaaaaaatggaagctttgtcctctatatagttgactagtactactctcatgatcttcactaatatgaaatctctctgacttgaactcaagtggattttcccattgatattgatcccttccaatagcctagatgttaacaaagaactgtgtcttttctggtatgtcattgccattaatagtgcttcttttagatgactctgtcactagtaatggccctgttggatgaagccttagtgtctcttttactacagcttgaatataatgaaggttactgatgatatctgactcttctactaatctagtttttccaatcacattgtctacttctcttgcttttctaatgatgtatgggtggtttatcagctcagtcagggcccattcaattgtaatggtagatgtgttttccctgctgcaaacatatcctaacaactataagcctgtaattagtcactaaatatacatttatatgtatatatatgtattaattcatacaaaaaagtcttaatcaaacataccaagataatgtctttatgttatgtgtggtcaatttgatctcttgactctcatcttctgatacatcaagcaagtcctttactttgctacctctgatctccttcttcttttgtcttgcttcttggtgttctttcataactctatccattatcacatcaaccttttctctaacatgcttaagccttttcctaaatccttacaaagccaaattcttaaggaaccaaatacaatcaaacaagttaaattcccctgtaagctcacctgtggctttcaccaactccctaatctcctcaccttcattcttctgtcccataatcattctcgatacgatattgttagttaacctcaagagctctccttcaacatcaacagttctatttccatcagcatttttaagcatcaaacacaaaattctctttaactcattgcgcctaatggggagaaggtggtccaaagtttggccaccaagaagcttagtcatgcaaagcttcttcataatttacaatgaggagtatagtgagcaaaagcaaagccaaccattgtttgttggtggttcgagaatagagttcttgtgtctaaagaacctttttcgccatcttaggggaggaaacaattagacaagggacttgttggaattcgatcttgaatccctactgttaggaatgcagcttcgat

SEQ ID NO: 195674 - DNA, 1340 bp, Cannabis indica
aatcactttactaaatttatttaattttgtgagaggtttttctattattttggtctataattatcaaatcaaaaatattacatttaatttcttaaaaagtaatatttttgttagtgggggctatagcccccacatgagtacaagtaagtccgtccttgagtattattatcgtcaaaaattaaacttagatatttaattacaatagaatgttaaacataaaaatttatgccacaaattttattttttttttctcaagattaatttatcaatttactttttgaggtttttttttttattaattttattttattacccataaaaaagaaagaaacttttgtgttgtatgaatgaggagcaaaattttttttttctttttattttttttagttgtgacagttttgtgtaacttccagctcaaaaaggctggctgtatatatgtatgagatagtgggtgaaaaaaaagggaggttagtagttgtattcatcattctttatgcttttcatgaactcaaacccctttaacttcacacccaaatataaataataataatttattttatttattttttaaaatgagattgttaaaatgttactttgggtattatgtgaaacttacattcattaatgtagaatttaaattattgttctttttctaaaagaaatatttgttgtgaaactaggattttggtcccttattatattgaggacaaaatattagggggaaaatattattttgaactttgtattttgaaaaaattactgattggattctctattttgttaaatgataaattgaactctgtattttttaaaatgatacaaaataatacatgaattgatttttttgtcaaaataaaaattaataatatctcaatttagagttattatgataaaattagatacattttcgatatttatttgtgttagatgtttgtatatgagtgtgttatattaacaaaaaattatcaaaaattaaactcaggatactatattgtataatttttttaaataaaagattcaatttattattattttttcacttataaagtggtaaccatgaatactttagggtttttttttttttttgaaaaccagcgtcatcattcaattaataagataaagtagttagaccttcctgtcattacaaaacaggtttcccgggaaagaggagaccggaaaagatccatacatctggtgggtaaacgcccacttaactacattatgggctacatagttacaagttctactaactttcataaaattaaaacatataaaaaaaggagaggatttaagacaaaggagacaaaagtttttataaatatgtatccatatataattta

SEQ ID NO: 195675 - DNA, 1461 bp, Cannabis indica
ttttgactatgaaataataacatataaaagagaaatgttgaaaggtatcagtagtgtctagtattttcttatgtgttaattttattattagtttaattaagtaatataataatttttaaagagtatcgctagccaatagcaaaacaacatatttagaggtgataaacactactgatactaataataatattccatacaaaagtgttaagaagtacaagatcagggtcagctcaaacgatttgaaagtctctagtaaaaattaaatttagatatttattgaaaaaaatatcaattaatactttatacattcatttttgtaaaaaaaaaaaaaatacttcataaatttagtaaaattaaatatgcctagtttattatttttttttaatggaatattagaataatatatgtgagtattgtgaggcctaaaagttttttttcactctttttttttttttaatatacattgtcaatcaaaaacatttatatataaaaggaagataaaagaagatgggatttctaatataggaaccttgtacaatagttcaagtcttatatatttttgttagataaataatatagagaaactactaatcatttgtaataggtcacttcggtatgatgttggtcattttaggtgtctaatagcaatgctcaatgatatatgagtatactcaaaaatacatatgagaatatcttttttcatttttttttatggcagtgtttggtatagttacaatattaaatctataaattttgaaaatttttaaacactttacattatcgaaaataagtttgaagttttttgaacatgcacagtaaactagaatatgaagaattttattttcggtaccgtaaattatttaaaaattttaaaaatttacaaagttaacactgtaactataacaaataacaaataccgttatgaaaagaattttttaaaaaaatattctaatatgtgattttgggtgtagaaataaattaagagattgtaattaatactattcgtgatatataattacaaaacattatatgataatatttttcttttaaaattaattaatttaaaattgggacaaaacctttgtttaaactaattgtaacatagcagtgtgcaatgtttttgtgtaatttgtttaaataaataataaattatactatatatctttttttaaaaaaattatttaaacaataataaattaaaaatatatttaataaaatatcccaattttttttcacattaataatgtataaaaattagtttacctatcattatattttagtagttctcaagagaatgtttttgtaacattttacacaatttctttatgtacaaaaaatgaggaaattataaattttatggatttttatatttttttttataaaaatatggcttttttccaaaaaagttattttataggaaaattgaaaaacaaattaaaaaatgtaggaaaatcatgtaaa

SEQ ID NO: 195676 - DNA, 1866 bp, Cannabis indica
aaagggatactaataagttttattgttttcatacaaattacgggcacgacgcaaatgaatacaataacttgaagcaagaaatataattcctcattagaaaaaataagaacttgcagaaatacgtcaagattgataaagaataaagggacgcctaaacagattacactcaaaaccagttaatgcctctactagtgaacagacatcttcaggttatcatttaaggccccaccttactggagacttccgcaaatttagagaaaagtatgctcgagccttacaatatgaataaattgatgcagttcttatcgtagaagagaggaagcctaagcaactatgtgttggataaccagccataactttcaacgaagcagactctaaccacgtcatttatccatacagcgaccctttggtcgttgaagtgcaaattgcaaataaaatggtagctcgaaaaatggttgataatggagattcctcaaatatcttgatcctaccatgccgaccaggaaactcaatgtaacacgctactagattagacgtgttattgtgatttcttaatgttgtgcattcctttgctaatcaaagggtttatggaaaaaggttaataattaaaattttcttgattaacctttaaaattaaataaaaaaagctttacataatctaggatcccgttttcaaaatttacatctgtattacaaaatatttaactactaaagttatcatctagtgactaccaaaataaaacctactttctcaaagattgaatactcaggtctacccgcccgatatgtacaaccttcatccgctcgtgctcattgttgttcagctttacctttgtccttacctacacatataaacaatatctgtgagtcgacagactcagtaagaaaagcataattataacataatcataaactagattataattgggcgctcgtacacctaattataatcctatctcgtgtcccacacatactgagtatagaacattcgtacgacagtactattaaccgtaatatcagcctatactcggtactctagtcgtaccaatgtcatagtgtcaattagtactttgccaaacatatattcgtcgatattcaatgctactctaggtgttgttctaacaacattcagaaggtgatcaaaatagtaaattttttcatgctaaagcttcctcttggcgctgttataacaacattcagaagcttcaatgcctagacagtagttgggctgattgggatgcggggttattggatgttatgctgaattattttaatgaattatctgctccctctatttgtgttgcaactgaagtcattgatggattccaaagacgattactgatgtccataatgaaactttgcttcggcctgttacaaatgataaggtaaaaaatactttgtttcaaatgcatctcgacaagtctccatgtcctaatgggatgactccagaattttatcaaaagtgttggcatattgtgggggctgatattgtgacgctctaacaattaggcacactacgacaatcaatattaaaatcctaatccccctaaaccgagattactagaaagagaagaccgggaaaatttaaactttatttgcaatggaatgaaaatataacatgtaataatttttaactttacaaacaaaccaaaaagataatatgtctcgggatcccacaaacttttcacaaaatattaaagttaattcacgtgtcgacctaagcgacaaaattcgagattacaaaatacattcactggtagacccaacccgcttggtctagtgtggcctgaacatgtacaatccaccgccaagctctcgaactcacggttgattacaaacagaattgccctttcctgcacagtagag

SEQ ID NO: 195677 - DNA, 1297 bp, Cannabis indica
attggtcgaaggtgtgacatagtctgaggctttttagtttttggaattagcgtgataagagtcgtgttgaaagaggaatgatcaccaccatcattgaggactttcaaaaccttttgggtgacattctcacccacaatgtgccaataattggtatagaccattactgacatgccatctaaatcggggcaaccatcttcactcatggactttaatgcttaaaatacctcatcagcagtatacgactgtgtaggggccatattaatttcatttgagacaagggagggcactgtagaaaaaactgttcgtgtagcagtaaaattgactcctccggttaaaaaaatgttgctgaataatgtcagcaagacttaattgggaagtatgttccaagccattagagtcagttagttttgtgatcttgtttgcttcctttttgttgcttgccttttgatgaatgtatttagtgtttgagtcacctgatttaagccaagaaatacgagaccgttgttcctaataatcctcttcttgtgctaagagttcatctaagatattctcactgatttgaaactctacaaagtgttcatggtctgtgttgttcgagttttgaagggcagcaacattttgatcagaggatttaatcttccttggcaggtcaccaaatataccccgatgccaagcttgcaattgagaggcacaaatggaaatattattcaaagtttgagatgttggatcactggcagttgaattcttccaaaatctagaaatgagttgtaagcaatcatcatcttttaaccataatttctcaaactgaaaacgagatttaaactgttgtatacggtgttggttcgcttgagaaacctcagccatcaaaactctatgttccgaagcatagaagtccaaatgagtaagaacaggtacaaggaagagctcaacccatttcacattaatgaatccatagtctaaacatttttccacattagaccctctgaagttgttactgtgccaagtgaatctatccccctcaaactccaattcattaaggccacaaagatcgatggtgtctcaaaatgcatctatttgagattcattacagatagcacctccgagtttgtcatcatgagaaataatttcattgaaatcatccaagacaagccaaggcaaaagaggacctaaatcttttaatctttttagaagttcctaagtgaagcctctttgagaaacaataggtgcaccatagaattcagagaaatgccaattagagccatcatggaacagagatatagcagtcaataaagtttat

SEQ ID NO: 195678 - DNA, 927 bp, Cannabis indica
gctcctcggtagaggcttggctagtctagctggtagaggcctctggagcgttatcttggactggcctggatgcaaacaaagctgccccatgagcaatcaggtcctcgtagagaggagtatccatataactatagtatccctttatattgttaatgtaacactcataaaacatctttatggacatatcccgatactcagttgtaaggtcctcctgatcctttaaggcagcatccaaatcttcttattttaacttgtatgtgttctctgctgcatttaactccttcctcggcttggtaacctctgcaattagatcagtcacctcgtgattacgaacaccaagcagctgacccacaccatcatactggtcatgcaactccctcaacttcttatatgtctcctctagatgtgtatcaacctcatcaagctcagcgtccttctcagcaagcttggcatcctttgctttaattttctttttgaaagacatagttgtgtatttggctcaggcatgggcttgaccaagttttagaaaaggttgagataatgagagaagataagttaataaaagctgcacagaaaagttgtacgaccaagctgtatggaaagggttgcacaaaaaaacataagttgggcaaatacagaaaaactcatcgaggcaacatctttcactgcactagacgttagatagtccaaggaatcgttgtccaaatcacgaatctaataaccaacagtaggaagacatctttcaagataactctgggcaacctccttagccctgtcttacgtgctagaagaagctgcttgaccttgtctttggtggcttttactgggtaactttggaggaaaggtagacctcaaagaaggatcagcaatcacaagctggttgaccaaaggtggaccaaaaggaggaaaaggcagagtggtctgggt

SEQ ID NO: 195679 - DNA, 1547 bp, Cannabis indica
atttttatgaaattttacatagaaacccttattgcaactagcgctgtaacctaaattgcaagtaaatttgaaaaaaaaaattaaaaaaaatagtatatgagataattttcctagaataaattagcatatatcttacacttaaatataatgtacaattaatttgttatgtaacaggtttcagcagccttcagagaatagccatagggctagttctctcaaccataggaatggcggcagccacactctcagagatgaaacggttatcagtggctaaaaccgatggcggcggtggaggagatcttcccataagcgtgttcatcttaatccctcagtttttcctagtggggtcaggagaggcattcatatacacaggccaactagacttcttcataacacaatctcccaaaggcatgaaaaccatgagtactggcctcttccttacaaccctttccctcggtttctttgtcagcagcttcttggtttcggtggtcaaaaaagtcaccggaaccaacggtagccaagggtggcttgccgataacataaacgacggtagacttgacttgttttatggtcttttgacaatcttgggtgtcgtaaattttgttgcttatttgatttgtgcaaagtggtacaaacctagtagtaagggtaataataaacaggctcagatgtctgctatgaatgggagtggtagtgttgataattgctagctaattatgatgatgacgaagaagattactataggtatgttcgagtagttctgtttaattaattaattatgtactaagttattcagggcttttgtttttattagcctagtggttattatcatgtttgtacaaataatcaatgtttgggtgtgatgttttcttatcatctgatcatcaattgatgcgtatgtacctttcttaaattgctctacaatgaaattatagttagttttttttttttgttctagtcaatttgcaattaatgctataattccaattaataatagtgtaattgactcaagtagttggttgcgagtgtgaaaattaaaaaatattagttgaaaaaattgaagcaagaccctatacattcattgtaagcatgctcctctttcgatattcttatttattaagaaaaatgaaagaaataaattagattccaataagatattaatattaattaaattatagggatatcattaattattattttatttatttatttatttttttcttgataaaccaaggaagtttatatttgaacaaacaatttacaacctatccggcacttgtataacaaaacaagcctgctcctctatttacaaagattcataccattctctttctttttgacttaatttcttaggaaaaaacaatcctcatctattctttacatctttaattctttgtacaagagtcattatgtaagacttttcccattctataaaatgccatttgtatttttccacaatctatatatcatagcagccatcactgctgtaaaaatttgttagcgaaacctgctcaatcgttttttttttttttttttttgataatcag

SEQ ID NO: 195680 - DNA, 945 bp, Cannabis indica
attttatacgcgtgtaaaataaaatatttaaactctatttttagagtgttaaatttttttgaattttctaaaatttttgtataatgttttaaaaaattataatataaataaatatgaaaaaaaattaaattaattttttttttcttagaggtcaaaattgaacctttttaagaaatgcattgtagattagaaagatacaatattataaatgcacactataaatattagggtgcttttacactatactcttctaatttttctttattttttattctttttataatttattccattttatacaaatttttacaattttactatctttaactaacttttttaaatttgtatttttttatgaattatacatatttaactttagtaaaatttaaacgatcttgtaaatttaccacttcatttgttgattaaatcttatttgtcaaaaactttacaaagaaaataacaagttttatttttctcaagtagaaaaataacataaaacatgcaattaatgtcttttattattcaacttaaaaatattaaatgtcctttattattattttagtgcaaatttattaatattaaaaaacaaaacataataaaatctcaagcaatcataaatcataatcattatcatcatcataattgatcaaaaataataataataattaacctaaaacaaccattataaaagaattaattaattatagtagagtggtggttggttgtaacttgtaagagcaaagagcgtgtctctcactttctctcaaagagcgtggaaactatataaaataaataaaaataataacaaaagaaagatagtataaagaaaatttagagagagagagaaaaataaaagaatttagagagagaaagttaactgaaagctatctcgtgaagcaataggtgaaagaagaataagaaatagagtaattggcggcaaaacct

SEQ ID NO: 195681 - DNA, 771 bp, Cannabis indica
aaaaaaaaaaaaaaaactattatcaaactcgttctgagagcttccagaacactttctaatttcgaatggtaatatcttcagcattttttgttcctctccccaaacagtacatgatacgcctcttaatcgttacacaacatttatgatataggtttatacaatgtctaaactaggcttcatcttttgaagcaattgcctcttacaaaatagttttgtttatcctccaattactattttaccttcatttagtttttctggcattgaaaatgccccaaattcttttcattgaaagagaattcaggaggcattccaagaagtagtagacataactccacatctgcttttgtctgcataatagcatcttcttctacattgttgttttggtttacttttgcaagcttgttcttgagaattaaagttgctaatgacaagttaatagcaacgtttaaaaggtcttttctcttttggaggattcagaaagagaattgtctctgtttgaggtgcctcaacgtcatcatgaggctaacacctgatttattattcttattttgagagtgcttgaagtgttgtgcctaacaaaactagccgttgcgttgacaatgacattatttggtgcaacaaaagtgacttttcttagtattggacctaaacaatagtgcctagaatagttatttattcataaaatcatagcattagttagaaagtacgacatgagaacacttgagtttactagttcaaacttttaattgaatttgaatatatatatatata

SEQ ID NO: 195682 - DNA, 810 bp, Cannabis indica
agtcttctttctgctatttgggagctggatgaaatacgaagatccggctagatggccattctcttcagacctccctaggtggtttcaggaatggattattcagaaacggctaacggtggacccaaagtttaaggaacaatggaagatgaacaattcgttgaggattgcgaactcttgggaggctagagagtctaggagacaacttccaggaaaacggagattggtggagcaggtggtggaggacatgccgaaaactgacgaagaaagggtaagtcgttttccgatggttaccctccccggcattggtgaagtatgccctttttaggatacagcaaatttggtggttccgaaagttactgcaaacattccttcttcggaggcactaggagacaatatcgaaagcgatggtacccccagcgtgcagtcgaacgttgaagacatacaacctaatacattggtacaaagtacagtacctgaccttactgtgaacatgaagaccaatacagatgaagtccccaatacgactgaaattacccaatgtgataagggggggggcatccaggtacgtctatggtatcgggcctaactcatgctttagtgggcctggggtcttactcctctctttcgggaagtcaggcccagtccatctcgtggccatcaaatgatctctggactttgggctttaaaactctgtcgggcttgggcacggtggataaatttatgcgtgagcccactatcttcaatcccatcttggacattgaagactgcagatctctggatcaggactttgggcctaaaaaacggaaagct

SEQ ID NO: 195683 - DNA, 509 bp, Cannabis indica
aaaataatttccaacattaattgcctactgttataatagatatgatgattcttacatggggcgagatccaaagactcagctaggttagcaaggtggaggaaatcacagtgcattcatagcctccattgaagtggttgatagtgaccaatggtatgttgatagtggagctaacaaccatgtcacatccacaacctcaaacatcaaccagaaaatcgagtatggtggtaaggaattttgacaataggtgatggtaatcaaatccccatttctcatgttggaagtagcactttacaaaccaattttgacagttagttgatataaaatgagttgttaccagtaccaaaaattgttaaaaatttaattagtttgtctaaacttactactgacaacaatgtgttattcaaattcttattttgtgaaggacaaggtcacaaagacgctcctacttcaagggacacttaaagatggatgtatcaacttctaccaccaaaatctcagtcagcttcttg

SEQ ID NO: 195684 - DNA, 925 bp, Cannabis indica
caacatgaacacatccaaatcaagcaaacatcttttgaaatccatatttcatgaaaataaatcattaccattgttcttaggctagtttttggaaatattttactaggatctagatttactatcatgtatgtttgattataaatctataatctaacttcctaaatatgaattccctaaaacaatgaattaaacacacataaagttatagaaaaccttacattgatggcagtaaaataatatgactccttccattcagatctctaacccttgatcctttctatcgtaaagtaagatcaagatctgaacctggtttctccttcatgtgataagaacaccacacaatcttccacactatcttcagtattaactcaaattgtgtgggcaatcactcatacacaatagagttcgaaattattgagaataagaagaagggaattcaaaaatagatggagctctctttattctcgaatctatctaacaaagagtcaattaggttataaaataagagctataattttctatttatatggtagctattagggttaggtttagaatttatatagaataaaagaaaagataaattttgctttatttaaatccttttggccgaattccttagtgggcctattgggattcaattttgccattttatttgaaacttatcttttctcttctcaaatgccatttcttaattctaactctataaatgtcaattctatctatttaataattataattaattatcaaataaaatttccatttaacttatttattaatcaaacctttcaaagtctcttaattaataaacaaaccctaagatctcttttcttcccaaataagctattgcttagtgaaagctcataaataagacatagtcttattgagaattctatttggttaattaaaataaattaattgagtctgc

SEQ ID NO: 195685 - DNA, 921 bp, Cannabis indica
aatgtaaggattatcttcgtgtcatggaagcagtgatacttatctttgaaatggccaactctcgtatcatgcccagtgcatatgagttgatcaagcgattgagctttggtcaaatgtccctgggtgactctactaagacatactgcttggtaggccactcaaccaccatgcatgacatcacacgaccaacatgattggcaagttacttggccattatgcagggaatccactcgaccaccatgattggtaggtcactagaccaccacgcatggacgtcatttggccaacatgcttggccagtcactcgaaccacaatgctttgtagacctcgcgaccaccatggatggtaggccactcgtccaccatgcatggaagccactcgaccaccatgcttggtaggccactcgaccatcatgcatggaagcgactgcgccaccatacttggtaggccactcaaccaccatgcatgaatgtcactcagctaagatgcttggcaagtcactcagcgaacatgcttgggaagtcaccgaacaccacacatggtagcccacttggccacatggctggaaaccactcgaccaccatgcatggtaggccatcttggcactatgcatggtaggctactcgaccaccatgcatgaaagtcactcggccaccatgcatggatcccactcgctcaccatgcatcataagtttctcaacaatgctcttctcgattagagcctataaatgtctcattctaaggtatgaaaggggttcgaaaatcattttgtaacaccagtcttaaagaaatacaagtatacttttctctttattttggcttagaacacattagtattttcattttcatttacatatcatctttaccctcatactatgttttgtgttcgaatcttaattttccaagcacaagttgattaa

SEQ ID NO: 195686 - DNA, 1240 bp, Cannabis indica
atgtatctgactcgtagtaagatgtgttgttatcctaaatccgccatcaatgaaaggtaatttgtcattacaaatttggccgatttaacttttatggtaatttaagtcaatctatatagaattttgtaattatgaaaatcgaagtcaaaggagtttttaattataaaataaggtaaccagcatagtgtaatcaaaaaattaagaagttataaataggaaagttaaaatattttttaagtaaatataatttttgactatgtattttgtaaaaattattaattggattctctattttattaaataataatttgcactttttatttttttttaaattgtactaaaagtaccttaagtttaattttgtcaaattataacttaattataacttatcttagagatgttaagaccagattgattatcaattttgtatatgttcatgctagagactagctttagattagttattaaaaaaatggattaaaattgaactcagtgtattattttgtattgttgaccgagattttcagcaactacctaatctcttaaatataaattataaatgtgtttaaagaaggtatttttttacgtggttggagcgttaacgagctttagtctacgagtcagttttattatatgttgaataaagttataacaatggtgttttttacttttacagagatgatttgatagagttttcccccttagtttgtcaaatcgaatcccttttacagtcgtacttatagaggaaatggatgggcttttttggagggggttgtggctcgttccctacttccaactgtcctttgtatgtgactttccttagcaatgttatattcactatttgtggttttgtcgaataggctcaaatatgggtttggtgagacaaaaccttacacgttcgcggcaaatggaactgttgaggatgtgagtcgttagcctgtgcctgggaaaggtgcgtgtacgtcaaaaaagtttgggggaaatccccaaggtattaattttttgtggtgaacttgttttgccacttgaatggaggggatagttaacagtgcttttccttaaaaagcgctctataatttaggagcacacacaataagggtatttaggaggtccttatccttctagaaactcatgtgttctctgtttggaccttggtaccttatgggagggtaatacccttctggctgcctattcctctcctagagcaatgatgttgacggtgaaaactcatcaatcaaat

SEQ ID NO: 195687 - DNA, 1146 bp, Cannabis indica
attcaaccatatcaaatatcaaagagcgcatatggaacttgctccggaatggcaaactctttttaattagggggaaagaagtattactgaaagtgaattagttacaaaaattacaatttgttgttactaaatgtattttaagtcataatatacatgttgtgactaaaaatatattaacgataactttatatttaaatactatgttttagttattttcaaaaaaaaaaaaaaactatgttttagtcactacaagtgacttttttgttgtgactaaaaatcacaaaaaaattatgttctaactaaaagattgtcactaaaagtacttttttgtagtgaaaaatgggtctaaaatttattataaaaattgaaagttgctttgtaaatcaaaatttgaagaatcgggtttcgatcttttgtccacttcaaccaagcactattggctaaacgaaaaaaaaaaatgtgttgtccccaaattggtgtgccctccctgttcccaccaattattccaggacacatcattcatacctattttacatgtatattttaacctatttttataaatgtgaactttaatcgtagtatataaagtggttcaaatttaacatatgctaaaagttgtgtcaaatttaatataaaatataatcaaattttacactataataaatattatttttttatttactttttgctacttattaatctaattaattagtttttatattttatttatatatttaataaggtttttatttacttctaataaaaatttaatatttttattgacttttttactttttttattaaaaaagatgctcattttacctttactggagtattattataggacatcagtgtcagtagtgtctagcatctctagacatgttattttgtaactgactagcgatactctttaaaagttattatattaaactatatgagatccgatacttgattaaaccaataataatattgatacataataataagatgctagataccagtttgttttagcatttctcacccattattgtagcattattgtggaatttggatcaattaatataacacttattcattttttttagggtgaaagtatatactattcattggagatacatagcgcgcctaaaaggatttagtgtataa

SEQ ID NO: 195688 - DNA, 2988 bp, Cannabis indica
gtagactttctagcattaacataggtctagaaaaatgatttggtgtagtctaagagtattaaaataccacccttatcaactaacatatagttcctattttgatgttaagatttatttgattatcttccaatgttcatttcctggattaaactgatagctactcataactctcactcaacagcaggtgtctggtctaatgcataccaaagcttacatgagacctcttactgttgattcttaaggaattcttttatgacttttatcttttctagaatagttaaaacttttccttagataaataaaatctatgtctaggagtcaaagacttcctatagagttagccattagaaaaattctccaagatcttactaaagtaagttgtttgcactaaagtaagtaaaataccatgtataccattaaccataggtttagattatctcaaacctataatactatgatcaggaacttttgttaagtctattgaatagacttattttcaaaatttcctttcttgtcattgtaatagaaaacttttggttactccatatgaatggttttaccttgaagttgatcaaacagatcatcaattctaggttatgggtacttgtttttaatggttaacttattcaactccagataatcaatacacattctaagagtcccatctttcttctttacaaataaaactggagctccccatggcgatacactaggccggataaaccctagattcagcatcccctgaacttgtatcttaagctccttaagttctgccggagccatacgatatggtgcttttgagacaggttttgccccaggtatcaggtcaataataaagtctatttcctgctgtggtggtaaccctagtaattccccaagaaacacatccaagaattccttaaccactttgacctcctcgggtccgagtaccacgagcctatcaaaatcaatcacaactgctagaaatcctacacatccactgcatagtaaattcttagccttcagtgctgaaattattgggacacgagaaccttgaactgatctgacataaataaatggttcctcattctcaggttgaaaagttaccatttttcgtttacactcgatactaacagaatatttagacagaaaatccatttcgagtatgatatcaaactcgaccaaaggtaactccactaggtcgacatttagttctatgcccttagttctgattaacacagatctaacccactttcttgaaatactcaactcctcattaggtaataggattccaaaccccgttcaaaaatatcattaggcctaccgaactaactaagcactctcgatgctacatatgagcgtgtagctccagagttaaataaaatagtataagtgaagcctttaataaagagttgacatgtgactaccgaagaactgatagcagcatccgcctgagtgatagcaaatactcatgctggggtaggcctagcttccggcttaggttcctcccttttcaactgaggacaatccttattgaggtgtccaactgatccacactgaaaataagttctccggttacacaccctagggtgttgcttcttgcaacgcgaacactcagggtaggagtaagtctgatgtccccctttgccctgatttccatgaaatttcttgctttgacccaaacttccattaattggaaaagttctcttattcttctcaattgtagaatcaccaccctccttaccagaactagaaacaaggagggtagtggtcccaccagcactaggggcctcttgggtttcttgcagagattttaccgctccttctgctcaaagagccttgtcaaccatctcagcataagttgtagtgtcgttggtagtaataactagatcatgtctgatcttggcattcaacccttcaaaatacttttcctttttgctaaaatttataggcattatccccgaagccaactaggccattcgatcaaattaggtcgtgtattcagtcactgacatattatctccctgaaccaactcaacaaactctttccactttgcactacgaatcacctcgttgtaatacttggcattaaacaaatcccataattcttcctaggtattctggtgacgtcccgagtgagggacaccatcttccaccacacaagagcatcctcctggaattgaaatatggcacacaccaccctgtcatttccagtaactcccatgaaattcagtgttctctcaataaccgtcaaccactgttctgctttaaagacatcaagacccccaaaaaatactggaggtgcctgcttctggagctgctcatacaaaagctctgtacggttgtcagctacaaattgttttgatggcattgcaggaaccacaatagcaggtggttgcaggggaggctcaacaggagcatcccgctgtctaagccttcgaatctcttcctcttgctgagtgatttgggcttgaatctgtgtaaacctctgctcccaatcaaaaagatcctggggtggattctcttggccacctctttgagcatgaccgcgacctctgctgcgtccacggggttttgggggtttctaccaccccgaccacctccaatctcaattatttcaccctattctttaacattttgttgggcgtccatattctaagacttagcttgcgaaccaacaaggcatgtaggttagacagtggtcaatatatttccaagaccgcatataggattgaaacaacatttcacacataattacaatataacttaaaacattttgttaaaaggtaaaagcttataaaaccgtgagttgagctcgacattggtgtagattgtacatatcttgacagtctttagtgaacaacccggtggctctgataccaaaatgtaacgcccgtacttgacaattaattaaattgaaatttaaatatattttattatattagtcgggatcctgagtttaaaaccactgtttaaacataccatatatgttaggaattattttaccag

SEQ ID NO: 195689 - DNA, 1970 bp, Cannabis indica
ctttctctcactccctctctgttcgactcgacgaacacaactacttactgtggaaacataaagtttttgttgcaatcaaaggtagcagattgcaacgatttctcgatcctcatcttactcctcctacgttcctcactgaagcagatcgtcttgccagaaatgttagtcctaaatttgaagactaggaacaacaagacaacattcttgtttcttggctgctgtcttccatgtctgagaagattctcactcgcatggttggatgcaaaattgctgctcagatttggatgactatcaaagaatactacacaaccttgaatagagctaacattgatcaatttctgcaatttacttcaaaatgcaaagatgcagacatctcttggagactatttgctcaaaatcaaaagactggttgatcttctggcatctattggccatgtgatatcccctgctgaacatattgcagccattttcaatggtctcaccagtgactacaatgtgttcatcacatctgttaatacaagaacaaatgagtactcggttgctgagattgaagtcttgcttatggctcaggaggttcaattggagaaatctgctcaagaattggatatttccaaatctgaatcaaatcttgcccataccaagcccttcactggtggtagaggtaccttttcttctacctgttttcccaattcaactaatcctggttccaattctatgttcagaggaaatcctatgcagtaatctcatctgcaatatgctgcaactcacccaccccctggatttagctcttaacaaacccaactaccagccagaggaggctactccagaggatctcaatccaatcccagaggtgctttggctcaaggcaggggtcaatattctccatggggacaaaaagtctaatgtcaactcttccataagattgggcatatagtggccaagtgcttctatcgatttgataagtccttccaaggtcctgaaatttttcaatcttttgctggaagtgcaaacattgctgaatccactcagctgtatgcctcaccagaaacccttgttgacaccagctggtacccggatataggtgttactcaccacctaacaaccaatccacagaacctatcctatggcaatgactatcaaggtgatcaacaaattcaaatgggagatggctcaggtttgcctattcaagaaattggaaaaacctcctttatctctccctttcattccaagaatctagttccaaataatcttttacatgtgccttccattacaaagaatttacaaagtgtttctcagtttggtaatgacaatactatttggtttgaattttatccttcttattgtcttgtcaaggacttggatacaatgaagaccttgctggttgggaggcttaaccaagaactctacaagtttgatgccattcaactacataccctcaccaaaaaccaacaacatcagccacaaaatcctactgtaatgtactctagcctacctaccccatcccctcaatataactatgctattattccccctattaatgttgaatactctctttggcacaatagactttgccatcctttagctagaattgtacaaaatcccctttcctacatccaatactgtctattccacaccactataacttttgcattctgatttatggggtgttgccctactacttcatccagtggttacaaatattacattagctttgttgatgcatattctacacacttggatatacatgctaaaaactaaatgtgaagccttacctactttcattagttttaaggctcaagttgaactacaactaggacacacaattaaaagcattcaaactgattgggggggggggggcgtgaatatcaagcattcactaaactattacaagaacatggcatcactcacaaagtctcttgtccatatacacacatgaacaaaatgggatagctgaaagaaaacatagacat

SEQ ID NO: 195690 - DNA, 2540 bp, Cannabis indica
aaaagctgagattacaactttcttctagtaaacccaaccttcgtggtctagtatggctcgaacatgtacaatacacagctaagccctcaaactcatggctgatcaataacagatttaccatttcttgcacagtagagcacccgtgagctaagcccagcaagacagtataaataataatatgcataataatcaaaaacctcataattattgatgccactgcatctatcgtctatttgacatagacctacgtgttacgcgtacacgtctatttacataaggtcttagaacagtttatctcgattctaattaccgagtctatcctaatgatgccttatgtgcataattctttatctcaacatatatagtatagtattgcattcaaaatcatttaaatactagagtagtaaccctagatcacaaaactgtttgcttttagggtaataaccctaatcccagttttctcacataatatacgcataataacatacatgattgctgctacacttaactctatgtgctagcttactgtcttacatggtaattcaagtatgtggagatatcaaacccctgagtgttcctgagcaagcgccgataatcttagtcacatgttctcgagatttcacaaatagggctaatcctaaattcaatttcacataaacacattattttcattccatttatagattaacatattgagctcaaaacgagctttccaatgatatcaagaacgtccaaaatggagtcccgagtcaaaagttacagcaaaaacaagaaactgaaaattctcagaaaaattgggcctcgcgtggcgagccaagccgtggcctcggctgcccaacctgttggcccacaccgcggcgagccagatcgtggctgtggcgagggaccctagaaccccaaaaattaccattttctcgaacactcaaaaatcattccaaatcataccaaaaccttatcaacaccatacacaaactcaaaatcaaaactacaatcaccctatccatgatcaacaacaattctaagccaaaaacaaagcgcaaaatcatagttacaacacctaaagcatgctacacaaccatacatgcacaacataacacaaactttaaaacttaaacattcaaagcaacaaaacccagaatgtcaagtgattagcccagaaaatcaaagtgcaaacctagatttacacatcctaaactcaaccaaaacttcccaagacaacaaagatgcacctagcatgaatctactagcaataatatagccaaaaacaccacaaatcatactattctcaacaacatgcatctaatcacatatgaacataaagaacaacttagaagagctccaaatatcagaaattcagaataaaaagatcaagaatcattaccttaagttttttcccaagcttcaagcacaagaatcacacaaaaatcaagctcttttcttccaaatcaattgaaatcaaatagagagggtgagagagagggggtcggctaagaggggttcatacctagaaaatggttttctaattttccaaaaaatgatattgttgattattaacttatgtggataaaagaccaaaatgcccccaaggccaaatatatccataaacatatatacaagggcaaaattgtcatttcgctcacacaaaactataaaattaatcacattaattcaaattttctcatttattttgggccccgaacccgattcggaccaaaatactcaattgtaactctcgctaacttgtcagaaatacctattgatagacagaataaacatactatataataatatagtacataaacacattatatcattaaattacgattttacccttttcatgtcaaaattatgaaaattctcttggcacaccaacagggtcttaaaatgcaatacatcataacagtttcacatattaaattatataataatataattcttaattatcacataattaatctagttagggctactaattcgaatattaaaccttagattattacactttatgtcctacaatattgtatagtcttggctttcatctaaatgagcctatccttctcagcgatgccagcatccaaggtggtagcctggtcttcagcgagccggtgaagtgcctcagctaagtcaaccttggcctccagccccttgatgatattgtttttgtcctaaagttcttgaagtttaacagacatttggttcttaaaggcctccttggctcctttggcctccttgagctatgggcaagagtagaaaatgcagattccagctcagcgcactgggccttgaccttttcctccattttttttcttggagtcctccttatagtcattgaacttctgcaaatatttcttattagccttggcatctgcttcaccatagtactgttcgacctcttggatgttcttgttgatcttttccatggcctccttcctgatgttctcaatttgggcctccagtgtctgtttggtggccaagaaaagatcaagctgaactgccatagagctcacttatttgcacgctccgcgagaaccgccatctaa

SEQ ID NO: 195691 - DNA, 1453 bp, Cannabis indica
aggcatgtcgtgtgtcatgcttttcgggctggtctatttgtgcttatgtgtcgtatctttcgtgcttcacgtgtcgtgtcctgcttaatgacatatttttcgtgtcaatttgtagtatcgtaccgtgtcgtatccaaatttgtattttttttgtgcttagtcgtgttcgtgccagtttcgtatcgtgtcaaaaagtctaatccgtatttacagcactaattttgagtaaaactaatgacttaggctagttaagtgatcatagaaaatattaatggggtatgtgtgtaagggtcgtagaatcgaacactcaacaaatataatataaatatatatttttaaagaaaaaaaaataataaataaataaacaaaaagtgaaactaataatttattttttattttttttaatggaatgatttatttttattaataaattgcagtatgcttataaatatatgataccatatccattatccaaaggtgttgcgtgaaagccaccgccagctactttcggtagttcaacgttagacacccatgctccaacatgtgtttggcatttggataatggaaccaaatccatctcataattattttttaatattaaaaaattaacaataacaacaacaacaaaacatgaagaccaatttattaataaaaaagaaccatgaataagaatttgaaattaagattagaagcaagaccaacctgaccaagaaagaatcaaaaaataaagaaagaaaaaaactcataaatcaaagcctaaaagctatcatctttatagagtgcctaaaaagtctaaagagcatcaaactgtagattccctttgaatctcagatcatatctattcattcatcaatctcttttcccatttccactttctgctcaagttttctttgcctctatttaggtaactgttatttcttcatttatgcttattcatgttgtattcattcacttttctctgattgtttaattaaacatttaagctttactgggttttttcttttatcttttcttattatgattttcattttatgaacatcttagttgtgagatagttaaaaatttattagttttttagtattacttttattttttttgtgtgtgggcatatatgtgtagcttgtgctaattaattgttagaaatatatttagtcagcggctagaattaccaaataataataaatgaattagaaattcagctattattacccaccatatagaatttttggagctgataaacattttagaaattaatgcacagaattttgggacaaacttcaggagcagctttaatattatataacttgtccctgtggaaatgaataggaactggaatcaaactaagattttctgagtgcatcataattattggaagggttgaatttactaatctacagaaatttaatacatttcagtagtggtgtaacaagagagatggtagatggatgttagg

SEQ ID NO: 195692 - DNA, 1093 bp, Cannabis indica
tgtcaatcggacattgtagttcaggtgaattaatcacaactctaatgattagtaataccaataatcctttccaaaaaaataataacaatattaacaataatcaattatattataatactaatgttggtgaaaatatatatattactcagttggatggcaagattatagctccaacgggctctgcatcatggggtgcaggtcttctacaatggattgagtttacaaagctacaaagaatcacaatcaaaggaaaaggtgttattgatggacagggctcagtttggtggaatgactctccaacatacgaccccacacaagatttggtaattgattttttcaaagccaaaatcctgaaaccccattacacctttagacataattaaactgattagccatgaaaataatcttgtttgttcaggaggaaagtatgagtgggaaaatgccaggcaccaaaccaacggtaatagtcattccctccacctaataaaagcttattttcccttcctccacacattttccttgttttttctttttaatttttgaaagcaaaattatataatcatacaaatttgttctgtttgagtgcacaggctctgaggttctatggaagtaatggtgtgacagtaactgggataacgattcaaaacagccctcaaacacatctaaaattcgatgattgtactaatgttcaggtcttcagtgttagtgtttcttcccctggtaacagcccgaacacagacggtattcacttgcagaactctcgtgatgtgaccatctatggcagcaatcttgcatgtggtaccttccaaattccttccctcttaaccaatttctttctcttatacaagtttttcataaccatatcatgtgtatatgaatatactattatgatgcaggagacgattgtgtatctatacaaaccggatgctcaaacgtgtacatacacaatatcaactgtggacctggacatggaatcagcattggtggcctagggaagggcaacaccaaagcttgtgtgtcaaatgtcactgtcagagatatcaaattacaaaacacattaactggtgttagaattaaaacatggccggtacag

SEQ ID NO: 195693 - DNA, 1756 bp, Cannabis indica
tatttactcaagagacaaaagacctaagatttttgctccttactcagtaaactccaggtaagtttggccaaaaaagctcgattcatactttcaatcttccttaaacccaaaccacccaagttgacaaatagtatcccaagatttgaaagccataaatctctatttgtcaaagtttccaaactaccaaaattttctgatcagcgcatcaagttcccgacaagaagctagaggaactttattagtggacatgacataaattggcaaagaagcagcgtgcctactagcataggacaacaacttaaacttccaaccttacagccactttaccatgctttctctcagcttggtatagtcttccttctttcaaaaacaaaccgattgcctagatgtatttcctccccgtgcatttgagaaacgcttaggagttggaggacagagtctctcctgatgttctccatattattggagaaaaaaaacactactcttggctttattacaaacctggctagaccacttctaatacaaggataggcacttgaacaacacctttgcttcattttcattaccacgggcaaacaaaatggtatcatcgacaaacaaacataaagtgtaaaatcgctagggcaactctaaaaattttaataccatgaatagaacccacatctttagatcgacttattatctttaaaagaaaaatgacttaattacatatattctgcctctctcatctattaattgccaatttttacaaattatctatgttactctttcttacatttttttttttttggcttgaaaaatagttaaatatttgaatggtggaaatatgttgaaatttcaaaagcagagatgagaatcgtgacaattgtgttgttaaatcaataacaaaacataattgactaggaatgattaaaaaattttatatgtggatgttataaattattcattttaaatatagtcaaataatttttatttttgtcttgttttacatgtttagaaatgtataacaaatatatgactaacttataactttcataaataaatagttttatttcaaaggtattcaattttttttttttgatttgactcaatcaaacttcaagtcaactcttagcaattcaaaatatattttaaccacaacatatattatctttcccctgaatttttattactcatttctgtcttaatctcctcaaaattagatgttagtgagtagtgacagtgaattttcttttggaatctgataagaaagaactctatcagcagaagttgaaagtgtcccaagtaaaacagctaaaaaaatcttataaactcttgagactaaagattagctaagatggcatctggggaagttaaagaagacaagtaccgtacacatatgtatggagaagcagagaaaaacaccaaatgggtgtatggagttcctcccaactatgatgttgtgaacaagctatttgaagaaggaagaacaaaggtactatatatatatccataataagtacatattatattcattttggtacttataatctgttgtgatcattaaaaattatatgtatatatgtatatggtagatatggccaacagggtcacttgaagagaaagtgcaaaaccttgtgaagacatgggaaatggagatgttccacaagaaaagcactgaggactaaaaaactgttgatccaaacaagtacactgtcagcataaatggtaagtagatttttattattgttcagataagaaattcatgtttgtgtgt

SEQ ID NO: 195694 - DNA, 1578 bp, Cannabis indica
cctaaaaaaagagatatttaaagattattccatcatgccgaaagtgattgcaattggtcctttttatgttaatcgcgataagttgacgcaaaaagaactcaagcatagattggcagcaagatttattcgaaatagtggtgaaggtggggagattcttctcttaaagttcaagaaaaatttcactagtgttgaactaaagaagctcttcaaggaaaaggtaattaagaataataatgaagacaaactaattaggatgttgtttgtagatgggtgtgcaatacttcaatttatagatagttatgttaataatgacataaaagagtctgatgagattagtaatattcaagcaaatgagatttgtcatgatttatttttggtagaaaaccaaattcccttcaaagtacttgtggtattaatgagattgagcgaaaaagggattgaatttgcaaaaagcatctattatttttgttctatgaacattatggcaccgttaatttattgtttgccaaggcttcaacgaaacatagatcgtttacctatcttacctgatcagcaaagacaactctttcaagaagataacaacgtgcctattcatcttcttgacctactcagatcagaactcttatttgtcgattctaaagataatagtagtgttaatgtagatgatgatgataagggtactaaaatttttctctctagatcttcttacaaacgatcttttcgcaatgttcaagatcttaaagaagttggcataaagttaaaacctgactactctattggcttaagatcaatatctttctcatctcgattatttactttcggtcaacttaaccttccacccttgattgtggatgagacaacaaaacaaaagttgttgaacttggttgcttatgaaatgtgccttaacaaagactatgttgtgacttcttatttgagattgttagattcactcatcgattgtgaacaagatgttaaagacttaagatcagcatacatacttaaaaataatcttggtagcgacgcacaagtagctgaactgttcaacagtataggtagcattttggttacttatgatgcttatgcgagtgtaaaaaacaacatacaaaagcactacgaaagaaaaatcgctacttggaatgctcaattgtgtcaagaacatttaagaaatccttggactaccctaggtgttttggctgcactagctggacttttgttaactggaattcaagcttattactctatacatcctagaaaaacataaactaccatcactagaatgagtaagtaataatacccatcttatagttaagcttcccttaatgtactatattaattaacatatctcattttttttacaggtattggtttaacaatgaagactactcatggaagatgaggaaaactaagtgatcttaattaaggttactctttctattaatgaagcatttatatgtagttgtattgtataattgggattagaaggaagacataatatgtaattattagacaatggatttaccctatttataatattatgtgtgattagatgtcaaatagtaataaatgtaaattcttatt

SEQ ID NO: 195695 - DNA, 1077 bp, Cannabis indica
aatctccatcactctttgagcccatcctataatatagctatcaccagcaaacaacataggagaaattgacaaagcacccttagccacacgacacccatttattaactgatttcgctcataccaacaaagtaatgccgaaaagcctccaacacaaataaaaaacagataaggagacaaaagtttccttgcctaatccatcgagaagaaataatgggccccatcctatgaccaccatgactaacttgatacctcaccgtgaaaaaataactcgataacagttgcactgatgttgtgaaaaaccaagtttctgaagcataaacttgagataattccactccatcctactatacgctttactcatattaagttttaacgccataaccccctcattcacggataccttacgcttcaagtagtggataatttcaaacgataccatgatattatcgaaaatcagccgacccggtataaatgcactttgtgtgttagaaataacctgtggcggcaccactttaaatcggttggccataaccttataaacaatcttgtagaccacattacacaaagaaatttgccttaaatcacccatcttcacaagattcttagtttttggactaagaataatattggtgtcattaatgccaattggaaactcacccaaagagaaaatctgatgaactaacttcatcacatccgcccctacaatatgccataatttttgataaaaccccagactcatcccatgaggacccagagccttatctgaatgcatttaaaacaaggctctacgaacttcctctttcgaaacaggtcacactagatcatcattttgagaagttgaaaccaaaaattgaatatcatcaagtagcttacctcactcagcatccaaaacaataaaccaagcgccactatcattttgcagcttagaaatataatttatccttttacgaacactcgtcgcttgaaagtaacaactattcttatcaccatctttcaaccaaaactctcaagttaatttttgtttttgataaatagtatatcatatgtttgtttatttttcttctttcttcttcttct

SEQ ID NO: 195696 - DNA, 906 bp, Cannabis indica
gtgaacaagaagaagacctatacgctatagaagaagaacaattgctctaataaagaaaaaaaaatctgacctcgagcagaaaaaaggaaaaaaaaaaatctgacaacaattgtgagaaaataggaaaagacagagagagaaagaatgaatcatgatttattttgatgagtgaattttgaatagggagatgccctttttttataggtatcatattatttttatatattattttttttttattgaaaacttagtgctagaaaagaggagagaaacagtacagcacaggagcaacaaactataaggaaggtagagaaccatttcaaatcaactcattatctaatcctagacctatccttgccactttatgagctaacagattacaatccctattaatatgacaaacatttaggcccggactgaaagataataagttcttaatgctacggattacatcatccaaaacactgttattccaattacaagattgaaggttatccactattgatttacaatcagtcatcagcacatccaccggtaaacgaagcaattgagcccactggatagcctgatgaatagccttggcttcagcaacagcatggggaacaagcccaaaaaaaggagtagaaaaacctgtcttaacccgattacaaccatccatgagaaccactcctatactatgtttccttccattagaatcagtggctgcatctgtgaaaattttgaagttacttgaaatagatggttgtgcttgtgatggtgctataagaatagctggataaatccttgccacttgaccctgctgcacatccaaatatttaaaaaaatatgcaagactccaatcataaacttccttaggaggaatagagaactgtttatgaaaagtgttattcctttgattccataaag

SEQ ID NO: 195697 - DNA, 947 bp, Cannabis indica
ctcaattttttaaaaacagttttttaaaaatttttgccaaacgactcttaatagtttttaaaaactatttttcagtttttataaaacagaaaacagtttttaaactataaagccaaacagcaactaagcatcctccatgggaagaggacgaggagctcaatttcttgcagcaccgccaaatcaacttcttttggtaattgtaaaacatgttttaataaatattttaatgtaaaaaattaagttattttttatataattaattagaattatgttgaggtattaattttttaccaattagtaccttactataggatacaattttttgtatgtaaccattcacccatatttttggaaagcataattcgaagtcgtattctgactatgaccatttattccattttgctaataattataccaagattttatgatacttccagaatattttagttttgatattgttgcaccaaaatcgaattttttcagaatatacgattatcttcaaagattttttagaaaactaaatatgtttttttctcaaaaattattattaattttaataaaacttaaaatgtcgtctaacaaacataaagatgagacttcagcataaacatcattctcaaaaataatataaaaacaagagattcaaagcaatgatatgcgtcactttttttttcctgatcgttaatttcacaaaaaaaaaagagcaatattagacatatcgtatagcaggaattacaatcatttataatgtaactaaacatagtaacagaattacgcaagcttaaataatttttaaacaatctgttcctatatttgatataactttagagtaatttgtaagttttttttttctttggtgatatgttatattataactaatcagttttggaaattaataaatttatagattgactcaaaagatatttgttgatgaagattttcagcaa

SEQ ID NO: 195698 - DNA, 1063 bp, Cannabis indica
ttaaaaaaaaaaaagccctctcacaacttaaaaaaattatgcagggtttgtgccatcttttgacaaatatagggatttattgtaaagaagccctctcaagttgtccctcttatgatccacctcatttagatgactctagcaatgaattggaatatgagaacatggacttggagaatttagtgtatggcaaggttgatgaagagattgaagcaagggaaagggccagtgaaggtgtttcttttcatcttcacatgccgaaagcactttttgatctggctgaaggtattaatcctggaaaattttgctgaatttttagatttaacttgatggaatgtttttatagtcatagccaaagttcttcaatgttcattttatcttgtgaaaccatccatattaagcatgacccttaaatcatactaaaggtgaaatcttagcactatcgttatttgtagggtcgtgtgtgtgggaaacttgttaattaaattataaatatataccattttcaaatctaatgtgccggtttctcctgaaattacatttagtgtacgattataatgaattctttcacgatatatgtgtatagaccataaaccttgtgttttctaggagtgcgtgttcttgtaagtcatttttattggcaatagccaatatccgatatatttcaacctttataataaccaaacttaatcttgcatattctttcccatctaactattgtcaaactccttatgacaaagccttggagatcagcagttggccactatgtgggcaatttggagtgaaggaaattctagaattttcgaataaaaagagagttcagcagtggacatgtgggagaaaactaaattttgggtagcaacttgatgttttaagtcaaaatattttgaggatttgtcattttagggattggaaaaatatactgcatagctaaaattatcctatgggggagttgtttcaattcaagcccgataggagatactttatgtttatattaatatctctgttaccacagttttcccccgctacaagtgaggtccctcaataaacttgagtggggatcagt

SEQ ID NO: 195699 - DNA, 1480 bp, Cannabis indica
aaaaaaaacaattctttcaaatatcttttgactagttgaaactgaaagctgagactactttattgaaaggccattttaattacaagggtgacagcaccactttcttttaaaagttgtgggtttctttatgaatgggaatatgaatgaaagtttcacggatattttaatttaaaaaaaaatagtgaccaaagaaatattcaatgacactgtaccctcatgttgttacacatcagccatttaattatttattatgtcaacaaaaaaaaaatctaagaggttgggaaatttctattaagagttctaaaggagaaatgattggaagattccctcatttcaaatcatgcaactaaaaggttgtatggacctctcttgtggattttcccccaagtgggcaaagctgtttgatcatacccacccatgagttgtatatgcattttcattatagaatgaaatttatggatatatgtgtacatatatctataccataatttacttcttgtcaatggatgtatttgaagaccataattgaccctttattgtagctctgtggtgttttgagaacctctgaggtaccactaatgaaggttgacccaacttattaatgtctatttgagggtacagagtagccacgttgtaaatagtctctcaggagctttcgggcgatacttcttttaaaaagctatgatatttcttaaagtaatttttctttttgagaaaatttcttaaagtaattataataacaatgacaaataaatataaataaattaataaaaacttgttttactcatttactggactagttttttttttttttttttttgtagagcgaacagttgtcttttttcttaatgtttatatagttcacttcttattattccttaaactaatctgaacatgtactgccttatatgaataaaaaatgattattacaactacaaggccaccgtgaagatattcataaattgctcttatttatttttcttcttttatttcaaatacaaaaagatatgtgagaggattattattattattattattcaaacaaatattaattatttggattcagaaagaagtagaggagttagtgcccaaatagctaaaatgaattcatgattgggaaatggtacaattcttgagcttggggtaaaaactaaaatctttcaatgcctatttttctttctttctttctttctttttttttttattaaaatgttagaaaaacaaaaacattgaaagtggggttcatcttatcttcaatggcaaatcatgatgttcctgaacaaacagaaaaacaatgcagagaggaaataaggcccccccacatgtaaagggcacgtagactcctccccaaaaggcacttgttacaaacatatgctccttacatgttatttattaatctctctctcttcagtgtttatccccctttttggatagacttgacaccttcatcaatcttcatatattatgatttaattttggg

SEQ ID NO: 195700 - DNA, 1007 bp, Cannabis indica
attgagtcagccacttttataaaattacatttacacaaaatcaattggattgatatgaagcaaatttcactgtgaatacttgagtatttacctgttatcctttgttttgtggttctggttagcatcgataatttgtttttggtgtaaaatttctaaatttatcttttcctccttttagggtctgaaaacaggaatgtactatctaagatctcgggctgcagctgatgctatcaagttcactgttgatactactggcatgaaagtaagggcttgtgattgccacttttcaacttcttcctcacgtttgaatatttgcacgctttttatttataagtttgtttctttccaatgccaggaaaagccaaaggttgaggatattgctgatactgatttggcacaaatggtttgttctctgacaaatcgtgaagagtgcatggcttgtggaagttagaagtatacatagattaatatatattttatataagttgttgtgatggagattctgcttttattctgataaagcaaagattggtgttacctaaaaaatatttgaggagatctttttgaaggttttgagatcaagggtctcgaatgttcgcaccgatcaatcatcctagtgaagtttggccttaaatcctctgtacaaatttgttacatatgtactgtgtgcgtgttaagttaatggatttaactagtaatatattggatctgcatggaagtctttactcctacaatattttattttcaattcaagcacaaaattgatatatttagctttttaaactaaagaggaacattagtgactagacctgcaaaaccatatattttgttggcattaaacccattaaatttggcaacgctaaaagaaaagaaaattcatggccaatggttttgctaatgggccggggatatatgctattccaccatgcctcaaaatttgacatggattgtagtttgtagagtaatgtcaatgtattattttttgtgaaatttacatttacaaacgt

SEQ ID NO: 195701 - DNA, 1107 bp, Cannabis indica
ctcagaaacaaaaccaaaagcttacttataccctagcaacaacagaaccaaaattcaccccttataacctaagctttttcatgaaaaaaagaactaaactcttaccttaggcttcccccttccaagtggtttatctctagctgctactaatggtgtagaggggctggttcttagacagcagaaattaaagaaaactttagtttcttgctcgagaggaaggaaaaggagagggtttgtttgattttatgcttatcctatatatataaacttcaatttatatatataaataataataataataataataataataataataataatattaaataattaattaataaaagattattttactatttttaagccactaagaaatctataactctaaggtatttggtcaaccctgaatatcctaaaatactccaataattctaaaactaacttaactcaataatctcattaaaactactaactaaacatgttgtaatatttttggcctccaatcaggtctccaatgtcgtcaaatttaaaaatatttttattctacaaataattcacattatactcacatgttccaaataaatctctgtggttaataaattacgcttattgatccacttatgtcaaaatttcattatttatattacggtggaaggttgccctaatactctatagttctaaacaatccctctcatgactcctgcaaaagaggtgaagcaatcccgcctttgaagctcaaaccctcgacacaagtaacaagaacccaaattcccatatttgtcatatttttcaaaagagtgtaaccaacctttaatcttcccactaaaattgaatggaggagtggactagtggagcaagaaaatccactaattaaatttgtagagagttggttttctacttccaaggtctgatgtttatcctcaaaacaaacataacatgaaatatttagatagttttgccgtgcgtgtaacccgaaatcatgaaaccatggcctgtcccacttcctttccttcgatcaaatctcacttttcgatttcaatgaattccatggtcacgattgctttctgaatctttccaaccacatcatcatcttgtcaaccaaat

SEQ ID NO: 195702 - DNA, 858 bp, Cannabis indica
ttactcatgtccatgtacatatatataatacacattctttagcttattcattagttttcctttaaatctagacaagaaaattaaatacaaattattttaaagtatagagaaaatacaatgcatgaagattttattttatttttttggcagaaaattaaattaaatttattatttggtcatgtgaataacagctatatagcaatcaaatatatgtatgtatacatatatttataaaacactactccaaatcgaaagaaagattgaattatattactttgcttagatttgaattttagagtacataacacataattaattagtcttctaattaaaacccttctatacctcctctatataaaggactaatcccactcataatattatcatctatacatataaatatatatatatatataacattacatcaactaataatataaatatggttagctcaaacttatttagggttttgataattctatcaatgatggtggttttaatcaaaggagcccctaacaaagtaaagtgtcaagacaaacactatccatattgtcaaaatgagctttattgtccggccacttgtcctgagtggtgcaccgttgattgtgccacgtgtcaacccatatgcccatcgccaccaactttgtcaccaccgcctattactccaccgctaccgcctccttcacgggagggtgccgcagcaaagaaagcgagatgtaagaacaagaattaccctaattgttatggcttggaacaaagttgccctggtgattgtcgtgaccaatgtgaagtggattgtgttacatgtagccctgtttgttgtaagtttctcgtaaactacttaattaataatttttt

SEQ ID NO: 195703 - DNA, 957 bp, Cannabis indica
tgtttcttatcatgtattatatccctgcaaagaagaaaaataatactaatgtacgtaatcgtttttgctattatatattgtcacaattattttcttgcttttgcacactccccttatgaccatatgattttgaggtggaatctcgttagatttgtaggatgctgtgctagaaaaacacattttcttatatcaattaaagagcatattttccattttgttgaatatttttatttcatgtaatggcattaatgatacgtacattaaaagtttcaaattgttatacttataatttggataaaaaaaaaatggatggccaagattattatagaagagacggaatgggatggctacacatcatgattttagggcttcatggtgataatggcctacaagcgcagtgaattttttcttttttgtcaatttattggagcaccacacgccctataataatatcctcaagtgttggcgacttatacgcacatatcaccaaataatttaacaaaaaaattgttagaaaaaacaagttacaaagttcatcataacaaaatttatcatatactactccataactaaagagtgtgctttatatatattttttcttaatttgtatataaattcaaatccaatcgtttagccaaaaaaaaaaattgtttttttagtgaataagaatcattgtattgctttaaaatcccaattacatcaattacaatttccatatacccatgtacccctgaattttatatatcatcgatccttgtatagtactataatatgatcaaactattatctatctacattttttgtccttggaaaaacatggagaattcgaaatttaatttcactttgaatattttgtacaatacgattaatgtgccaaacattgtgagacccaaagacaccattctttagtaaccaaatgttgtaaaccagtggttgatttgttttgctttatcaatc

SEQ ID NO: 195704 - DNA, 788 bp, Cannabis indica
atgaagctcagactttactgcttgctggtgcaaaaattagaattggtttgggtgatgtggatgtgttgaattcaccatggcttgcttatgatgataagccctttgtaacttgtacacatccagctcttgactaatgtaaagtgaggcaactaatactgttaaatggagaagattgggatgaagagttggtgacagatttgttcaatagcagagatgtttccattattttgaacactcctatcaattcggggagaggtgataactattattggaaacatgagaattcaggcttctatacggtaaaaagtacttacaaatatttacaattcaacaaatgaaattagagtgctgatatggaggaagaagtgtggaaaaaaattatagaaaattaaggtccctactaaagttttgcactttatgtggaaggcacttactcattgtttgcctacaagattgcaactccaatcaaaacatgtcaatatcccaggttcgtgtgttttttgccacatacatgtagaatcgatcagccatgttctgcttgaatgtcagtatgcccaaagctgctggaatcggacaggggtgaacatcagtgctgctgttgttggctttgatttctccctctggtttgagagtcttctgcatcgaggacggccaggcatgatttaggaaggttcaatggtagcttggtccatttggaaagctagaaacaagttgctatggaatagaaaaatacgtactgctgcagaagttgttattagtgcacgctcagtccttgatcaatggagtta

SEQ ID NO: 195705 - DNA, 666 bp, Cannabis indica
ttttatatttttatgttggtataatttggccaaagtcatttaggtaccgttgagtatatatggaattagcacaaaaaaaatagttagacattttgaatgacactattacttggggttatgattttggacaattttaccctaagattatagagaataaggttaaggacattttggtaattgtcaatctaagtttaatgagctatgtttaacttagtggattttctagaggttgttttgtgttttatgctaaaattaagagacaaaagtcgacaccgtcggaggaatcagagcaaagggaaccgaagagataaaagcaacaacaataagggatcgaaggagccacagtctgactggattttccgtcgcctgagaagaagaaaattggtcggagccgatgataagtgaggttgttgaatgaagctccgacgacgtagaatgttcaggcgataataataagccaaccgacaatctgacattggggaccaacaaaatagaaaatatattcaaaaaagcataaataataataaaacaaattattatatatactaacagttactaaagtagtaatcaaatacttcttaaaaaccccacacataagatctttttaaacacttcaataatagaaaattcctaaatacatatatctgtaaattcaaatacattttt

SEQ ID NO: 195706 - DNA, 833 bp, Cannabis indica
ttggtttttggaaaatttgtgtaaccttgtaaacaatgattacttgaagagaagatagttgttgttccaactatgttgtagagtattacacttagcttgaacttgttaaattcttggtgttctcttctcctattctttactctttattcattgctatgtttttttgattctcagatagtttgaattttaaaagtgtgtttgtttgtttagaagtgttctttccatcataagccttgattgattctttaaaattttcataacacaaaagactattaatttacaagtaccattcaatgagtagtgctaaggaaactaaaatgatattatttatggttgcatgcattacgctatttcaaattatttattacacaaaattttcattttcacataatgattctactttatttatttaactatggaactaagttgcggtttgcgtgagttcgactctacttttatatttttactgattaagtgatataatttaaaatgaaatattttaatatgtgtatcattaatatagtaaaattttgaaattagaaacctaatttattattttttacataggtaagaatgttgtgaaattatgaaactaaataaagttgcatatctttatgataaaataaattaaaataacaattatttctaagtttaataaacgggaagtgtaaataaaaatttaatattttcttcccaaaacgtgaatgtagggtaattgttataaaagggaccacacaacattttataattttgaaaacgaaaattgagggattacataataatgttagtgattgaatttttctatataagtatttagataaataattaatttg

SEQ ID NO: 195707 - DNA, 733 bp, Cannabis indica
atgaatacgggggcacctttattcaacatatctttattctaagcacatcttatattttgttaaggttcaaaaactttatttactcttcacctaaatcttatgcactgattcgtgtgtattatctcactttgacaagtgactagttttagtccaaaaactcttacatgctttacacatactatacacacaaacagattagaaataaggaggaagaaaaggaaatgaagtaagtaaacaacaaaatgagaaaagcagtcttaaaaggagtagcctgcaaagttgaaaagaaacgaagaaagctaaaccaacagttgaagaagcaaagcatatatattaatcacagaattataagaaaatgcaagaaatgggttacatagatagtttattgtccgaaacaactaatggctttagcctttaatacacttgcaagttctaaacaaacaatattaagtacaccacaagatgcatctctcatctcatgaaggcccctgccctgacatgtaacattttacactattatactaacttacttccctttccctaataacccccacaatttctgacaagtaaagaaaatcaataacagctagacctgtagatgcactttatatgaaagaattttacaccaattctacccaactataaagtttttcctggtgcctgtctgcctgcctattgaaacaataatgagtcgaaaagaaagaaaaattgatagctatacctgaaacaatac

SEQ ID NO: 195708 - DNA, 2260 bp, Cannabis indica
ttctattattaaattatttatatttaaatgttgattacaaaataaaaataaaaaaatcagattaattactatatattataactctttttttttttaaaaaaaaaaagataataacaataagttttttttttctatagaattatttatttttatattaaaaaatatttattacttaattactagatatttcattaatttagatatgtattgaaaactgaaaattaacccaataattttaaatttaaattaaaaatatccaatatactagagtttgaaatatatatcgattgtctatctatagatagatatttaactcaaaatcaatacacaaaaataatagtgtgactgaggccgtacgtacgtagaagattataagaaaaagaaattattaattttaaatttatataaataatttataaaataatatattaatatttttaaatatttctttaaaaaaaacaatatatttttttaaaaaaaaatcaactgttattataaatcagcatggttagtatttcttggaatatgaaaaataacaatactaaagaaagctgataaaagacaacgaacatcaacaaaaatttagaaaataggataaatcgcgtaacaaattgttcaaagtagatgagactctcaacatagcctaattgagaacatgaaagagggccttcgcttccattttatctgatcgaaagcattgttgaactgatttagacagtgcaacaatctcaataccttcaaaattcagaataattgctccaattacaccttagagtttgagttaacggcaacatctacgttaagcttgagagcatggaggtcgggtggttttcatggaggcagtcggagctgagtcatgtacaacaagagtttgagagtgaccaataatgactttaatatagttgttttaccataatcaatatcaaaattaaattgtttccaaacaaccttcgatttgatggcaccttcttcttatgtaaacttgttgccactgaaagggcaccttggataactttccatggttctagaagaattttcaccaacaaattatcatgctaatgacttgatgttgagatactatatatcatcaacaaattgaaaatgaaatccctactttcaagtgttcaaactatttttgttacgaaatttacataacacaacttgcaaaacttgtgttttctttaattagtttaaaacatatttgactgcatactaaacatataactcttaagataaaacttcaaattaaagctagtattaactatcataacaagttcatgaaatttcactatggtaaatttaattatggttggttgggtgggcttacaaattgaagcaattttctgcattttcttccttggaagctgaggcaaaggctattcagatggctcagaacaattggaggatattcatgtgatctcgaattcaaaaatggtggttcaagctttggatcaatagttttaaatctgtctttttcagttttagatctaattaatagttttcattgctgtgattttttctttgtcaagcttagtggtttatcttttgtggatggcttagcaaaaagaattagactctcgaatttctcatgtgattttcatctatctttcttagtatttaaacttggattctttaaaaaaaacaaacaaaaaaagaaactatcataacaagtcatgcaatcccacacagaaatatttaaccttcagtcattaaataggtgatttatatatgtacaaatattcatatatttacctcagtagggaaataattagtaattgatttgtttcaaatcaataaattcataaataatatgataaagatgaaactcagtaactagtagttgagatcataattactattaccatcattataattaaatttagaagtaattacagttccactaatctcaaatattccaacttaattggcttaatatttttttttttaaatgaagcgtttatatagtatactctttcagttccaactttgagttatgatatgtttaaaatcaagtaataatgctattagtattttgagaatatgaatatgaactaaagaaaagaaatatgatcaaaattgacaagaaatgatttatgattaggaatgtattctaatgtgtatataccaatatttacgtctatatatttgaaaaaaatttaaatttggaatatttttttaaaaagatttattatgagaatatcaaatatttatttcagaaaaaaaaaaatgaatctcattattattattagaatatcaaata

SEQ ID NO: 195709 - DNA, 1131 bp, Cannabis indica
cggtgtattaatttttttttttttttttttttgaaaaattataaaatcaatgacgacattatcattgtttataaaactattactgacgacaatgtcgtcaataatagtttttttttctttaaaaaacgaccgttgcaaagggcgggaatttcacctctaaaagtatcactaatgacttttaaaaaattaaaataaacctcaaactcccttctgatttctcatttcatcgaaccctttattttcttctctgaaccctctttctccatcaaacctgtctttccatcattctctttctctctgcccctgaaacctattttaaaaaaataacataaccatatcgttcatgtcgccgccatcttcactgcttgaagcatcaatggaccaccacctcgctactgccaccaccatattaacctcttgaagctttgcctgaccaccaccacctcgcgcctgtccccgctatcttccagtaatgtaattttattactcatatatattagtttaatattttatgtgtatattgatttgtattatatatatgtgtatttatatttatatattttttattttattgttgacacactattagtgagtcaccattcatattggagccgccacaagcagcccagataaagttatttatatcggagtcaccattgttaattttttttttcttcttatatttgcttattatatgttattcttttattttgtacatatatataatttgtattatatattaatcttttgtatgaaaatttaaatttttttagtgtaagtcttaaaaaattaaatttaatatagttttatgtacgtagttttgaaataaaacagattatatatgatttgtatctcttttctaagtgttaataaattgtttgatttattttggatatatgtaatttttgtgtatgtagaaatagtatgaatctatgatgtatttgaaaacttttagagtgtttagattgggttttaaaatttttaaataagttaaatgtaaatgttacgctgtcgggggaagactgccttgtaggagtcttttgctgctgagcgggagacacttcggaagaaggttgaaaagtatgaaacagctaccatggaggttttctatgaattctaaaagacaaatcc

SEQ ID NO: 195710 - DNA, 1470 bp, Cannabis indica
ctaatatctcactcttgtatttgtataaataacgggttcaccccattggaataacaactcagaaatttctcatttcactttctctttctctcttcatcttcttcttctttcttctcattctacttttatatttatattatattattttataacatttatagtttttatctgttttatttgttgactacttatgtaaaaagtatcaacggcaaaactctctatgtagttatatttaaggagaaaattgatgagtgattaaagttttgagtttgtaagtagtgcaaatttaatgattgtttctagtggcataagtactcaatgttaataaaattataatttttacctatagttttttgtctatacaaacctagctctgttttaatatttattagaagaagattcagaagtaattcatattatgaatattttttgttcagactcaatgatttaaaatttaaatattatatgtgtcatgtttaagacactaaaaaaatacccttatatttattacaattaacaacttaaacaaaaagtttgatgacaaaaatacacaagtaattaatcgatttttttgtaatgaactagctacctatttaaatgtcttggttttaaaagctagtattgcatactctttcttctctccactctcaagataagaaaattaagtatagttcttagattatgctagtatatgattgttctatttctaatgtgcagttaagaaaaagccactagtattgaaggtattcaaaaattagggctcactggtacaccatattttattgtataatatagtattatggtagattatattggtattatttaatacaatattatattctatattgtcttgtatttataaattgtgtaaaattataatgtctcagtatctcagtattaataggttgtgtaaaattatactatctcagtatctcagtattattgatttaaatttaattattttattgactattattttttagttttgctactattttatttcaaaacatgttcattattaactctaattataatttaaactatttttattttccttttacattaaatttttatatattacagatatttatttttctcatttattctttcctcttctgtaacttttatcaattagatacttttgactttccttttaattttaaaattttcattaatgttttgaaatcacaaatttgacgtttattaatatttattgactttttcatttattgggtgttttattcattaattttttaataatatacattatcatattaatttattgtctttcattttatttttattttatattaatttataataaattttattatttattttattatttagtttagataattaatttttaattgttaataattattatataatgtgcttgtattataaataataacccactatttcgctcttacaattttttgatgtttttgatgttttttatagtttttg

SEQ ID NO: 195711 - DNA, 2410 bp, Cannabis indica
cccccctgttttcgactcgtcgaacctcatctcttgatcgattagctcacgagatgtctcaagcctttttttttcacagcaccgcagatcacctcggattagtcttggtctctaccgttcttaatggagccaattatcagtcctggaagcgaggaatcacaatggctcttactgccaagacaaatctgccttcattgacggctcgctgcctcgcccagctactggtaatcctctcctcccttcttggattcgttgtaacaacatggttatgtcttggcttgtcaattccgtttcacctgagattgcactgatctcgccaccgacatgtggcatgatcttcaagaaagattcaacgagggtaatggaccccgaatctttcagctacaaacccaattaactcgattacaacaaggtgatcaatccgtcacctcatactttactaaactcaaatccatttgggatgagttaaaggagtttcaacccaacacctcttgtacctgtggtgcaatgaaagtcttcctcgactactataatcaaaaccaagtgttacaatttctcattggtttaaatgagtcatacgcctcggtccgtgtccgaattctcctcaatgaacctattccaaatctctctagagtttttgcaatgattgttcaagaggagcggcaaagaacccttggctcttctgacccttcatcctcggctgctgctgttcgatcttccactgccaacaatcctccaaaatcgaaaaagccaaggccctcttgcaccaactgcggcaaacctggccactatgtggataaatgctactttatccacggattccctcctggatatggcgacaagaaaaaggctgaaaaagccaaaagtactgctaatcaagtcagcaccaacctagacacaacctctggccaatctcacattgatctgtcggcacaatgccagcagtctcatctctttgctcagccagcaactcagtcaagcccccgctcgtggtgacacaaacaacactcctgcagcatcaaatatagctggtaattttctttcttctcactctcattcttgggtattggacagtggtgccacacatcacatgtgtgccaccaaatcttgttttcaattcttttctaataatactttccccaagtttgttgttctgcccaatggcactaacataccagtagaaggtattggtactgttaaaattaattcctatattactttgcataatgtgttgtttgtctcaactttccaactaaatcttttttccatcacaacttttcttgataacagctctaatgttgtgttctttgataaaaataaatgttcaatacaggctccttctctgagcattgtgactgggacaactaaaaggattgggaggctctatgttcttcctcaagagtctactcctataaaaaatcctagatgtttcctttctttacacaataatgtagaccaatggcatcaacgccttggtcacccttcaatgtatatttcaaatactttcaataaaaaacttgattctagtttctctattaaatcgcaacaattttgtcatgtttgccatcttgctaaacaaaagaaattaccatttatatccaataataactttgctgaaaaaccctttgatcttgtccatatagacatttggggaccctttcacatcattagcatagaaggatataggtattttctttctatagtagatgacacttctcggtttacttggaccttcatgcttaaaactaaagctgaagctcaatctgtcataccaacttttttcaacatggttagcacacaatattctgcaaccattaaagctgtcaggacagacaatgcaaaagaacttgcactttctgccttttatgcttccaaaggcatccttcattatcactcttgcattgaacgtccacaacaaaattccgttgttgaaagaaagcaccaacacttgttgaatataacacgtgctttgtgtttccaatcacatttaccccttgtgtattggccttatctcatcaccactgctacttacttaatgaaccgaatcccttctgctctttttaatggcagcacctcctatgagaagcttcataataaaactcccaaatatgatcatctaagaagttttggctgccttgcccatgcatccaccttaacttccataaggcacaaattcactccaagaagttgtgcctctatattcattggatatccacatggcatgaaggcttacacccttcttgatatccaaaccaaacaaatttatcactctcgtgatgttgtcttccatgaacacatatttcctttttttggccaaggttcaagcaatgatattaatatgcttttccagcaatcttgcatacctgcccataaacctgtcattcaagacaaaaatataggtgccaatctc

SEQ ID NO: 195712 - DNA, 1093 bp, Cannabis indica
ctttcatgaagttccacgttatcaacaattgattgatgagtttctaatcttgattcagcacgatcaatatcctcgaactctttaaacaaaatattccttgctgaagggacagaaaacattacaatatatatataccgtaacatggtaaacatgcatatttacttgtcaataatacataaacataaccagcaaaatagatttggagtggtgttttgattgataccttgaagataagcagaggaatcagagcgatcttttgtattcttttcagatttattgatcgaattccaatcaaaagatggggttgaaatttcagaatcatcattgggagttttggtttctaatgctagtgctggggtgggtggcggcagagacggaggcagttgtgggcttatttccctgtggttttcagttaccttaccctgtggagagggctgtgcctcatctttatggtcctcggaacaatcttgttgagcacaagtaccagttaagtgcaattggctttgagaagatgaagcctcatgtggtggagatggattgacctcatcattattatcatcactctcttccatgagttttgaataaacttgtttcacattgtcaccaattgactgcagttggctttgagcaggacaaaccacatcctgaaaccaattaattttgtggaaaacaaaaaaatcttgaaatgtattaaagtaataatgcataaaatctacatatcaagagagaccagatattaatataccatttcaagcattaattatttccctatatagaagttgaagatagtaccatagtacaagaaagaacagagtgataatcggtaggtacacattatatatgttaaaaaaaaaaaactcaaagcgcacgtctcttcaagaaaatacaaagagagagatataacctagtgtgtgtgtggatcactatatgtcaattgtgttttagttaaaaaaaaaggcaagagaccaatatgaagtcaaactctataaatagggataaaaattattatgaagcatcaataaactgtaccaagtgttcttcatcaaaaaaaaaaaaaaaaaaaaaaaaaaaaaaaaaaacctaaaaacgtacg

SEQ ID NO: 195713 - DNA, 628 bp, Cannabis indica
aacccaatagcactctggcaaataaattctaatccaaatgaataaaaaagttaaaagctaactagtactgtagcacttgagctctccttttgcacagtccaaaataacagatatttgagtagaaaagaaaatgaagaggagggggaatatgcatgagggagtgagaagaaaaaaagtgggtgaacaagaaaattggaaagggaaaaaaatgaaagtggacccaccatttatctgatagttatggaagagcaacttgttatacttgtcaaccaatctaactattttttccttaataattttactaaagtctcactttccttctttccccataccacgcaacataaaagaatttcattttttccttaataattgcatttttttcctttctttacttgctagtttctatttcccatacttatacctccccctacgattattatttcttgcctaccaaaggttgccaaaaaaagtgcaatttttaatcaaacctaactccacatttcatattgtcaagactcaatataaactcgtgttcttaatttgtcatcgaaaacataaggcaacaatgtcaactaagtgttcaaaatatggttgcataaatgtactatataagatgatccacaatgtg

SEQ ID NO: 195714 - DNA, 853 bp, Cannabis indica
gactatccataacacaacaggtcgcgaagccaatgctgctaccacaataacttgaattccccctcatggcctcctcaagcttaacacggacgcgacttgctcgcatgatcacaacaaagcaggtctgggtggtgtaattcacaacagtgaatgcggagttgttatagcgatcgccctccctcatgcctagagcggagacactacaatcaatgaagcaaagtatatactcaaatcgcttcactggtgccttgaagaatgtttccctatccattaaattgaaactgactgtaaaatgattataaatgcgttagcagccaccaaagaagacatctccctatttggagacctcatcaagcaaattaattcggctttatctcactttgccaatgcctcaatcactcatgtcaatcacacagctaatacttttgctcacaaacttgcaaaattagctttggggttagatgaagttacaatttagattagagatgactcttgtaacttagctgctgtcttcttcccttaagggcatccctttttttaaaaaaaaaaattatgatttggtagctataagtcaatctctttgtcattttcttaaaacaatcaggatacgaagtttagaaagagtcttattattccgttgcaattacttaagtaaattaaattatgtttacagtaaattcattagaaatatgttttaagagtttattatgtttatttgttattaaatatataaaattatgaaataattaaagaaactgttaagctattcctaacaattggttcacaagagccttgataatcacctattccattcataaatacagtagatactcgatttaagaatactctattc

SEQ ID NO: 195715 - DNA, 678 bp, Cannabis indica
aaaaacaaaaaaaactaaaaattaaatcctaatttattttatcaagtaatccaaaaatttatagttcttcttcttctacttcttcttccaggggtggtcgaatttgggcagcgacactcgagtcttgagaggcttcagatgagatcagtcagatttgggttgggatctcttttacactttaaagagaaagaaacctttgatatattgaaattgtacagccaaaaaagactttaaccgattagatttttacaaaaaaaaaagaatgtatatataatacaaaggcccaataataaaatgggttgagatgtattgggcctaaactaagtcttattacacccctcacaagatgaactatataaattttttagattcatcttggttacaagtgtacagaaataagtaggaaatagaagctttgtaaaaataatagtgatgttgtttttggtggtgacatgagttagcttcagtgtgccttcttagtccttctcctagacaacatggcagtcagtctcaatatactttgttcattcatggaatatatggttctcgaaaatgtggatggcgtataataaaggatggcgattatattatcacaataaaagatggcgagatctttgtcgtggatgccaaagtcctcaaggagggctaagaactaggtaatctcatatgtggcattgg

SEQ ID NO: 195716 - DNA, 846 bp, Cannabis indica
catttggtgctttcattaaaagcctctgtgaaaaaacttagaaaaagccttcccttcttttaaagaaaaaccttctcctttatggctgaaaatccagagaatattaacaccccacatgaggaaactaaccatcgttttggaaaagagcccatgggctctaagagatcaactaatccgcaatccagaaggaccacccgttccaggagggcccaacctcaggatggtcccaatgatcggaccacacgtccccgaagaactcaacccgatgttggtcctagaacgcaaacaacgcgcttgaggagaactcagcgtgggaatggtcagaatcctgagatgagggatgaagagctcaaccatggaggtgcccaatctgtgggagaaaggacttatgaaatggaaagtcaccgcctgagatgccgtttagaagaggcgcagtgtcgaaacgctgagttagaacgagaggcagcctcgcccagggcagcactagggacgaacactctaacacaacctgaatttggagtgagaagaccacgaggcagacctcgcggctcacgaaccaggagacaggaaaaggcccgggaagaacaatccggggaaaatgagacataaggaaaaaaatcataccaattattattcaccatgcaccaatctaaacgttcaaaaatactaccatgcttccaagtgaatttattaccaacaaaagagaaaatactaccatgcttccaagtgaatttattacaaacaaaagacaaaggaaacaaattatatttagataaaaaggattgaaagctaaacatagcatacggggggattagaaagctatgagccgtatgcaatatacaaaag

SEQ ID NO: 195717 - DNA, 874 bp, Cannabis indica
aagggttctcataattaaaacaacttgcaaaagaaaatttatcactaagagagaactcatgaaagagtcctcaagagaaaagaggattcgtaagggaccaaccacatgaaaaagaagttgaggaagcccgattagcttaacactcactaaaagtgccacgtgtccttaaagaagtcaagcaactaacactccctcgcctaagagatatcatatatcaaaaagaggttgagaaggtttaaggagctaaaaatccttcactcaaaagagagatacatattgtaaaattatcattataggagaaagggactcatgaacgagtcgtcaaaggaataaataaagtatggaaagggtaatatctgacggagagaacccataggatgactctcatcaaacaataagaaaaaatgtagttctccaataaaagtctacaagaacacttggaagaattcttataaactagtgggcaagtgataaccccaaaatttcacaaagtataatcttagagttattattaaaatacgaagtaaaatattattgcaactaaagtgggtcccaagaggtaactacccctatatagctctctccattttctctatttctctcttattggcacctccaatccccttggcaccaccaaccactttcctctcttcccttctcttctctctttctctctccttggaaactcgaatcccatcggcaccaaggaccatttctcttcctttctctctccttggtaccccaacccccttggtgccaccaaccgctttcctctcttctcttctcttctcttctctctttctctctcgttggcgcctccaactcccttggcacaaaggaccacatctctctctctctctctctctctctctct

SEQ ID NO: 195718 - DNA, 601 bp, Cannabis indica
tgttatttatataaatatataaagaaatgttaaaagttactaataatacttactactctcttatatattaatatcgctattgatttaactaattattgaattttatataatttaatgtaataagttttaagaaatatcaataaccaatcacaaaacaatttatctataaagtactaaatactatacttatatccaataacagtacttatatatattacgtgaattagggttttgtctcataaaaaaaggttttgtctttaaaaaaaaaaattatcatcattcatgtgttaacaggattatatgttgcatattcttttttatatctcaggttattattgagtaatcagtaaattatatttagggttttcatcagataagatggtgccacttacacaggcccgactctatgtataagcagactaggtttgtgtctggagcccacctatcccaaggatctaaaagaagtttgtctcttttaaagttatattttttttgtactaattttaaaaaatactatatttatttctaaataatgatccaaaaatgtatatttttttatagctccattaaattttagagtcggctcaacacctacaacaag

SEQ ID NO: 195719 - DNA, 1294 bp, Cannabis indica
caagagacttcaaattgaaaaaagccccaatgagatttcctctaaagtaagttaacatttttcttctgacacaaaaaatggttacagcagccaaacaaatttttcattgtataaaaatgaaatatacctggtcaaggggagacaattgcatgaagcgttcgtagtacaattcccaatttggctcaacatcaacattgatgggtgttaccaggtaaaccaaatgcaaatcagatgcgaggacaaatgcttctctcgcccttgtaagatcatccaatacaatctaagaaacaaacaaaagccataagtatttacgaacaatttgaggcggttcaactaaaagtttcatcattaaggaattagcagtactgaaacgaacaaatgaaataagaatacaatatgtagaaagatatctcgacagcatttgaaagacaaaaaaatttacaagtgattcttctggggaaagagaactgccaaaagaagcacgcccaaggggtgtggtactgtacaacttagtatcttcattccattcaagaaatttcatatggcacaaccatcgaagagattcctgcgctgatttcaccacatcctgaaatggttttgtagaattcagaagagtacaccttacatatcgatgaatatctttagcagtctgaacaattcccccagctacaacttctaagattgcatgaatcattccattcatgtcttcagacaaacaagaatgcaatggtggacagctttcatttagaagacctgagattcttttgatctcctctggtttgcaaataagaacctaattgaagacaaagaaaacacgaagataaattaatactaataataattacagcgccttctcggaaaaataagatataaaaaaggtcatctgagatgttaacatacactttcacccttcgtatctattccagtacgaccagcccgacctgacatctgtttataccttgtcccatcaataaaatcacgaccaattttgggttgacgaaaaataaccctcctagccggtaaatttaccccagcagctaaagtagatgtagcagttaagacacgtatgaggcctttccgatagcaggtttcaacaacctctctttcctcaacctaataaagaatcaaaaaaaactagtatacagaggaagtagcaatacaaaataattaacagaaaaccaaatagagcgaaaggaacaaagggacgaatctattggtaccaaaagaaaaccagtaaagagaaaatgactaaaaagcaaaagaataccgtcagcccggcatggtggtaagcaat

SEQ ID NO: 195720 - DNA, 1564 bp, Cannabis indica
tttttcaaaatttccatcttcacttatacaaaagacagatcctaggaagttcactttgaaagtattaactaaaaaccatatagtatatacatatgattacagttagtgataattaaagtatacctattgaattgtttattggaaaattcaattgaacattatttttttacttggcgatatgaatgtttttattttgggtaaaaatgtatagttcaaaatgttataacacataatttacttattcttttaaaaaaaatttaaaatactttatttttttaaaaaaaaaagaacagagtttattcatttaattatgcccacacacgtattttttttcatatgcatgtaattcattattttaagctttatttttgatatatatctagatcattatatataaaaaatttaattataatgtcttcaaaattaattagtatggacaaaagtgagaccttatattttttttttattataaatgtacattaatatttaaatttacatttcctgtatgtaatttttttcccattctaccgtgctataattcaactttgaagaaaaacaagaatttttttcaaaagataaacagtggggaattctagcattaatttaataataatgatattgtctttttctgatttcattaaattaagggttttaaaatgtgtcctatttgataccatttattttgtacattctatatcaattatttgttgaaaaatttgtagataaaacccacttcccactttaatatacaatgtaataattattaagatgggaatttttttttttttttgccagctccattgatgcaatacaatgcttaataagataagacatagatgagttatttgatggaccaacctcaaatctttaatatttatatatatgtatggcagagaattgtggaccaactaataataattgaaccatgcataaaaaaaaaaaaagagaagaatagaaaggaagtgtattaagttcaactcaatttggtgcaccaatttagaatgattggcacttggcccaacttaaggttcaaaaattgctatcacaatattggcctactctagggacagttaggcttctaattaatgctatcttctaatgttactttcataacattatttactaatgtagaagtgtttaagtttgcatgttttccatattattatcatcattattattagtcaattatattcaactacccatttttatatatatgtaatctctatcttgatataatcttacttaatttcttaagataggttttgaatttcattaattggttaaaatggagccaaatttaattttatacatatctttaaaactcaaaaatggttgtgaatttcttgaaaaaattattaggtaacatggaaaattggtaaaatagatacataatgtaataaatctccttcaaaactgttattagttttggtctaatcactaatggtggatggagatgaaaatttgagatgagtctgtagactccaatgtgtgtttttggaataatttttgagattttagcatattgttcaccaaagtgtcatacaataattatataattagagta

SEQ ID NO: 195721 - DNA, 1560 bp, Cannabis indica
atgttgaactccaatcaaactttgcttttttaatcctactaaaaattatcgataaagacaatttgtcatctagtttctttccttctaatttattattaacagcacttttaactagctaaaaaaatttagaaggcacaataaaatataactaagaaaaacaacaaatttagcagttgtagaacactaattccatctatctacacagtgaaaaaaaatgttgctaatatgttgaactccaatcaaacttttcttttttaattctactgaaagttttgagataaatttatcaacaaagacaatttgtcacctagtttatttcctcctaatttattatcaataacactatgaatagttcagacactaaaaatagtatataatccaatcctaccctaccctacaaagtgaccataaagctaaatctcaaacttaatttcctaaatcatataacccaaatctgacaacaagacaaccaacatacaagcaaaaacaataatttgacccaattattgtgctgattgcttttcctattacctatcctttttctacttttacaaagattagtataaagactgttcagttctacttctacctaccaaatgaccagtagggcataggggtcggacggccaatgagctcagtatactgatccaacaccgattcgggattaggcccagcaaagaaatacaagtcaataacccctccaatcatcttgtaagtgattctgtctccactataatctatatccatgccattactgttgagcaacaaaactccatgagtggctccagatggtgacctcacatccatatagaaagggtgggaaccatacagattaacatcggtattcacactaccaatgtcagcattccacaaagtcagagtctgattgggcctcagcctgaacgatttcctcgtttgttctcccaatccgtacaggttggaccggtcctttgggagagaagaagatatctgtaagaactggtccttgaaaaccaagcgagtctctggttttgaattcaccggagaagtatcgaaaatggtctctccggttgatctccgggagacgctgaagccaaatggggtggtgttgtggaaggtcaggaccaggtctgaattgggtttcgccggaaactgaatttccggcaagaatcggagctgggattgggtgtgggtttggccagggattatgtctttgggtacctcccatcgtttctttttggcgtctgtaattcgaattcttagacggtctgctgtgtcgtaactggatagaatggattaaagaaatcaattataacttttaacacatacataaatccagaaaagacaaaagatctttttatagcattaatatgaagttttatgacaattcattatactgttatagaaacatgatttgtctatagtgacttcacagttcacatgaatgttagttataaagcgtcggaaacataaaaagtaaacaaaaaaaccatacatttccttcgagatgcagacaagaaattggattttatacacctgtataactgattatgagatactttatccaataatagcaataaa

SEQ ID NO: 195722 - DNA, 1495 bp, Cannabis indica
ttttaaaattttactatgatttaatgttattttatattttttattcatctaatatttactccattcatatttttttttacccaaagttaaactaataatattaatattatttctccaagaatagatatggtcattaatattatttcttatactaattacaaaaggttaaatatcattttggatcctgtactttgcaaaagttatcaattggaccatttgttttttaaatgacaaaatggatctcatattttccaaaatagtaaaaataggaccctgagctcaatttttaatatttttttttaatataatcaactataagataacttttaacacgaacagatatagaaaatataaccagttttatcataacatctctagatcggattattactaagttttattttgacaaaaaatcagttcagggtcttatttatacaattttagaaaacacagggtctattttgttatttaacaaaaaagagggtccaattggtaaattttacaaaacacatggtccaaaataatatttatccattacaaaaaggaacctacactattttttatatatatttttactttgatgtgtaattctatgtttgtgtgttatttagtcacgagaatgaattaaattgttatttagatttcctaattaaatcttttaattttttttttataattaatttaatgtaattttatattttttattcatcaagctaatatatagagataacaaaaataaaaaagcagttgtttgcaacgtgaaccgtaaaccaggtaaaatgatatttttcatgaaccctcataaggtcgcatgtatgcctaagccaacacctctactccccaggtttggcggcgtgcgacgcttcagacttcaagcttgtagtggctgaagccaacacctctacttctcagagttggtggcatgcaatgctgtagacttcagccactagaagattgaagggtactttggtcaaaaattaagaaaaattaggttttaattattttgagattaagagaaaaaatacttttattgatattagagagaagaagacaggagatcaacttggaattctttttctttgtaattctatgtttgagtgatttagtcacaataatgaattaaattattatttagattttctaattaaatatattatagtaatatttcttgatattaatattattttttaaactaattactaaaaataatgcacataaacattttaaaaatactttccctaatgtgggacttatagtttaatatcttttgtcattctcctttttcacataaattagttaaatttcaatattgtttaaattaagaggtactgattacttactggtaagagttgatataaatgtctgcccagtttaaaaaactatgtttagtcgatgtgggttcccaagaatacaatagtttattatctttctttattctcccttttcacataacacaacttcttcactcaagattgatataaatctgggacttctt

SEQ ID NO: 195723 - DNA, 809 bp, Cannabis indica
ctgtaaaaaatgttaaaaaattttggggtttttttcttttttacaccaatcttttttttttttttttttttgtgtattttttactagaaatctacataacaattcacatagcaactaatagagtaacttaaatacgcaatcaaaataccacatagcaacccgtataaaaactaactggagcaacccaaatcgtaagttaaaaaaaaaattaaaaaaaaaaaaaaaaattctcctaaaattttagtccaaaaataaataatttgtgtaaattttacaaaaaaagaaaattatatcttcttcggcccattaacctaaatttagatagtagatatcattctttaaaaacacattaccatttcaaaaagaaaaagaacgctgaccttgaagtcggtcttattttactcagttgtttgtagtttttgaacatatattttcagaaagttaaggattcaaagtaaaaattaaaattcagaactctaacataaatgatacctttaaaatgaactaaaaataaacaatatgtgagtttcttttttctttccatttcattagatctgataatttaattggagcatggtaagtaggaaacttattacatgaacaagtgatagtttaaatgatttgtgaaagttgaatatatatatatatatatatatatattgagaggagagtgacccattaggttacaacgagcaagggaaagggtcggaaagggtcacttccagaccaataccaagtgttaactaatccaatagacatttggactagattgtgagcagttgtatttctcatcttactaatgtgtgtta

SEQ ID NO: 195724 - DNA, 777 bp, Cannabis indica
ttgtggatgcatacatgggaatatttgtggaccaaaacctgcctcgtaaggaaagcttaatcatatgattaagcgaactaacgcaaaaaccaactttctgcacactttaaaatcgaaacaaatctctcaatatatagacacgattttgtgcctgtagatgagtttcaggttacattagatgagtgtcagaatacgttattattttttaaccttaattactcctagatcaatctcaaccttcaaattaaataactcattcatctaatgactaccgtacatcacggaatacaatcacgggacaaaatcttttccctatatattgacactttacaatttataacacacatcaaaacttctttcaagaaaatgaccaaaatagggttctatacttctatatgtgagagacagagagagaaagagatcaaacgtaacattatagagttatgtagatgctaatacaatataatgttcttacttcctagtggggtcttgttgtaccagctcattcatttctttttaagagattttgtctttttaaaacgaataatttacgaaggttttaattgacttgcaatttaatgagacgcaactattcttactggtttatttacctacccaaacaataattagttacactcattaattataatgaagaaaaacaatttgtgtgttgtgacaataataagtttcattgtcctgtctttaggtggttggctggctctaaatattatgtcttttttttttttgttaaagtctttctacttgtatttgtattta

SEQ ID NO: 195725 - DNA, 995 bp, Cannabis indica
acaataatatacatttcaccaaactatgttgaaaaatcgattgtggaagttcattgaatatatataaaaaaaatatcaaactctatccaccgactacttatgttttgaaactttctcttttccacgtattgtttcattattataacttagaccatctttcccatgctcatgattattaattgattagcaattttcgtaatttcttatatacttactttattacttagtacgtaactaaaaaatagtttatatgtaatataactatgatgatatgacacttgtaatagatagaaatttaattttactaatggtatcacttgtattaattaattaatggtatactctaacacttaacaacattataacgtaagattattagtttaatattacaagttgtattttcactacgtatatgaaaaataaaaaaagtgaagacaacatgaaaaaaaaaaatgaaaaatataaattaatagtttggggaagcttcattctctttggagctcatgtgtatgttggcatgtttgaatgattaatagagttttagtaacagatggtaggcacgtgaagagaacatatagtattgttattaatattgacttttttttattggagaatttaatgttattgacttattattatttagtaaaggaatatgtgaccctctttgacatttggtagatctaagcataaaacacggaacatgtttagttatctactaagatatatatatattatacacactgcttttcttcatcgttattcaagcatatgtacacatggaaatttttacctataaattttgtttttaatctatttttcgcgggtatgattatatattttatgaaactaaaaacaaagttatagaataattaatgatttgacattatatatctttatgtataaaatgtctctatttaattattttgttggttaaagaatattaaaatatttaaaaatttaaccgtgttagtataggattagttttataaatatta

SEQ ID NO: 195726 - DNA, 770 bp, Cannabis indica
agtcataatatgctaactagtgagataccaacagagcttggaaatttggtgtctttgcaatatgtattggatctcagtagcaatttactcattggaaagatttcctcaagcctctcaaggcttacaaagttggaaattctcaacatatctcataaccacttgtcaggtaatattccacacacattttccaacctaataagtataagttacatcgatttttcattcaacaacttgacgggttcaatcccaactggaggaattttccaaaatgcaagaacaaatgcttattattatggaaatgttggtctatgtggaaactctacaggacttaagccatgcaaaactcataccagcggaagtaaaagtgctctaattttaattattagtctcgtttgtggcctagtttttgttactaccattgtaatcgctctcatattgtgccataaattcaaagtgttagataaacaaaggaaaacttctaaccaaaatgacactcgccaatcattgatgatatgggagaaggaagcaaaattcacttttggagaaattgtagaggcaacagaaaactttgatgacaagtattgcattgggaaaggaggctttggcactgtttacaaggctatattgagatcacatgagttggttcttgcagttaagcggttacacatgtcagacacgagtgatattccagaagttagtcgcataagtttcgaaaatgagattcaaactctaacagaagtccgacatcgaaacatcataaagctttatgg

SEQ ID NO: 195727 - DNA, 1421 bp, Cannabis indica
aaagaacaatattttctattatataatcgcatttaatataaaataaatatatatattaaattagttcaaagaataataatatatagagcatgccaatagttcactgtaaatgaaaaaaaatctatgtaacacattttatgtttttatttaccacgattttttttctaccataagcttataaattctataacgggaggcaatatgtctataacaattggtacccttctctttttttaataaatatagttcacttttttttttagaataatctataattcaccttttaaaatgatggttacgtacactatctgtttctttgtttttagtttaattttttttattatttttgtatgttatagttatttagaatgtcttataaatttacaaaaaattctaaatagtttataatgtacacaataagatttaaatattttttgtacacgggtttatcttttttatgcgtatgataataaacaattacttaaattttatttttgacactttaaataattttaaattttttgaaaatttacaattagtacaactaatatgtgggatctaccgaaataccgactatgagtatactaacagtactatatatttccaaatatatatatacatgcaaattaaacttataataaggtttttttcttctttattattatttttttttggtaaggaaagttataataaggtttaaaacgaccatatggtgcttctaatactcactcatctccgccgacgccacctaaagtattgttattgcatgtcgtttttggtattcactggcacacaaactaatcacttttcttatgacctttacgggtttaaaaaaagaaaaaaaaagctctaatttctgcattgcgcaagcgcaaaagtttttgattggggaaaggaattaaaatttcttcctactgcctaactatcatcttaaactttgttttttctttacttattcccttcatttttcttaaataattttttttctactctttgtagggaatagagataagatgtgacgaaaaagggcaaacttttattttatttagtttttttttttttgatcaaaggagaagtgttctcattaatcaacagacaagatacaaacaaagcctcacaaaaaacagaggcaaagcagcagcaaacacatcaatttagcagcctacataataaaccttgactaatggaatcaatcctcctttgtctatagctatacaatctatactttacaatccttttaatctctttaactatatgactaattgtgtaagagttattattattattattataattattattataattattattattgacataaatgaaaaaagtgtttaaagaaaaaaagtggtttgttaagaatgaaaagggcatgcacaagagtcagctattccatgtttctttccgcaatttggcat

SEQ ID NO: 195728 - DNA, 654 bp, Cannabis indica
tgattctttcattctggttacctaaaaaaaatattcagcgattggtttgacctgtgtaatttgaaaccaatatttgttaaacatatgaaacaacagtggaacaatccaaaaataacattataaaaatcatgacagctctagtattaatggttttaatatttttgctttatctctccaaaattaatggttaatttctaactgttctcatattctgtgataattctatttgtggatgtaaaagatgaagactttatttgttattttcaatatttactatttatagtataaaaaaaatactataacactaaaaatataaattttaactgtggcaatataaatgtaaatactataatgtgaaaaaaaattatatagattggttcatttttcaatacaagtagtgtgataagtgtactattttgttgtctcttgtagagtaggggtccaagtttctaggatgataaaccttatgggtttctgcatgttttataattgatccaaaaatgacagttctagcttctagccatctatcttttcttttttttttgaactgtggaggcctatctatcttttttcaaggcatctgtcttggtggacgctttaactttgttttattatatgcaataatgtcctatgtggaaagtttttaggagagac

SEQ ID NO: 195729 - DNA, 2224 bp, Cannabis indica
ggagatgagataccaaagaggatgcttcggtggttaagaagccaatgcctaagaagcccatccttgtaagggatgttgaggagtctgcccgtccaaacattcagcatattgttgggaaggagaaggccacaattgaagaggacgtagatgattcttcagatgatgacgtccaaacattcatttttacacttgtcttttttcattgtcttgattataccttctaatcgcttgcttctactctctacagcaatgtcaaacaggcttacacaagctatgaagagaaaggtgggcggatgatccggagagtccgagcaaaattcaaaagaaagagcctaaaagctctcaaacattggctctgccacctcctaaaaaggtgcctgaggacaacaaggttaccgttgacgaccctccacgtgttccggtcagctcaaggaccacaaagacttctaaggatttgcctcctcctcctgctcccgttcaaatatcaaagggaaaaacttataccccaattcccgtagagatgaaaagagctgaagaggtatgaagcaactaccttgacagagtccatgcggagaacagggagaagttgaagggtgctgaattatcctctggcagtcttgaggggaggctttctaaaagagctgactaaagtattctttttcaacataaacttttgttcggccataccgtacagggccttttcttttactgaattgctcttttttgctttaagctgaacctgcaggtcgagtatatctattcccagacaaaagcattggccaaacaatttgcaatagataactccgagctagtgaaggttcggcaggagttggtcgagaaagatctaactttggagcaagttaacaaggatctgctcgaggcgaagtagaagatcgacgaactcgaacgacaaagtgctgacactccatctgtagagaaattggagaaagatcttgaagcttccactaagcgagccaatgagctggaggatgagcgtgaggggctccaagttcttcaaaagcagaccgaacaagttagcgagcttgaacaaaaagtaaaggatgttgaggatgaggcagccacttccaagtcagcctagacgagaaagtgagttggtaagaaggggaatttaactcttatttccaacttgccaccaacctcttctttgagttcttgagttctagtcggccaatcctgacgccaattttaattatatgacaccggaggataaggcggccatgcttcaaacttgcaaggagatgaaggcagaaaagggaactaaaacggccgaaaccaatcagaccgaccagcctgttgagggagttgctgctggttcctccaagcaggttgcagtggatacacaaaataaagtgctttgaaaacggtcattggaccttagtacatagactcaatcaacatttacacggtaacagtacataaggtgatcacttaagagcaactttttactggtaatattttcttaggtgttcaccgttccagtatcttggtacaagaattagcttcatgttttcgtcagaccgactaagcttatatgctcctaattttgtgattttgatcacctgataggaaccttcccaattaggtccgagcacgcctacaacactgtcttcagtatttaagaataatcttctgagtaccatatcccctacaaaaaacttcctcatttttacttatttattgaagcaccaagctactttttgttggtgagcttgtagctttaagattgctaagtctctccattcttcaacttcatcaaatgattctgccaggagggtgtggttggcttcttggtcatacattagccttctgtgtgacggtggttccaattccatagggcaacattgattcgtagccataggtcatctcttgctcacatagtagatcgggtctaaaggcgtttactgcaaattcggtcactgtgaggtagacccctagttcttctccgtccaaagactttgataagataggaggttgtgtgagttgctttttagtccttgaaaagctttcacactctgtccattcaaacttcttgcttcctcgaacgatattgaagaaaggaacacatttatcagtagattttgacacgaatctgcttagtgcggctatcggaccagtgagattttgtaattcctttacctttgttggagattcatatccagaaggacttgaatttctctggattgacttctatcccctgagcatt

SEQ ID NO: 195730 - DNA, 750 bp, Cannabis indica
tttttttaaaaaaaaaagaatcaattttggacaattttaaataggattgggtattcgatccaatccaatcttatacttcgaattcaatccgatccaattcaattaaaccacaaaatcattacaaatctaattttaaatactaacttaaaaatattaaaagtagctttgtttttaaagtttttaaaattttgattctcaataataaattaaaatgtaaaaatagtattataaaacatattttttagaaatatattagcaaaggcacctataactatggaaaacacttcaaatttatcaagcacttatgtagatgggtagatgttaaaaaaggtaatgtataataaaatatgtatatatatttgttaatataaagcatctcagaaagaatattatgcgcttgagatttggatgttttatttttattaatccatcttaaaagtattatcatcttctctgttaactttgaataagagagagcagtgaaaatctgtatgacttatgtatagtttttatatggacgagtatgaaatccactatagatcatatctatatataacatttgatttttatttctttttaaatattgctatataaattgattgttattagaataagaaatgttccattttcaagatttagaagttgcaattatattctaaattcttatgcttttaggtgtcaaacatgaaaacaaaggggttagtttttatgccatagcagctattttgctttttcatcgaatgagatacg

SEQ ID NO: 195731 - DNA, 1155 bp, Cannabis indica
ctctccaccatttctcttgtgtagaatcaaaacctatgaaatgaaccattcacagtgaacaattaaactcaacaacaaaacaaagcagtatgcatagatagatattagagttctcttgtatatgtacacaagtaaaagtgaatcaaacattataaattagtttataataggtatacaaccagtcacatacttgctctttgaagttttctttctttctctcttcatgaatatatcaatacatatttgacagcaaacagtgcccaataacttcaacggaagtcttcccagagttttaaaaactacaaacaaacattgtataagaaatcccatatacagtaaataaaattcactgttaaaatgaaaaagaaaaatccctttaatgtaataagaatttgaggattgcagaacacaatttaatattaagaattaggaaaaataataataaacaaagagaagatgatgataccatttgaagagacatgccattatgcaaatcagtgtcttctgaccatctcggacaaagttgttccaacacaaagttccaatcttcaaacaacagaggtgaggatgagaaagccatatccatattcatatattgttctacatgtatacaatattattatatgacatccattggtgttcaagttcacctgtaatttaattgatgtcaaaaatacagtagtggatgctatatataatatatacaaatttaccctttttagtgttggttcacaattaatgcaataatatatgttgatcaattatcaacttccatccatgtatgtaagcaagaaagaaactagtttgtaaataaaaaatgaacactcttaatttcaaagtcttcccaaagttttttctcctcttaatttgatccaatgttctcattaaaaccacaaacatatatagcaaatccacatgtaaaataaataaaatgcaaaaattaaagtggaaaagaaaagcacaaatgaaaaaacaaacttataaataaaattaaaatgtggttagcaggccccccattggttcagaaggatgaataatacaaattgacatatttctgttttccaaattaatgcatgcattatgcttcataaacacgttaatctaatcaaaccctaacaattagagggagaaagacataaactcacatagaaactt

SEQ ID NO: 195732 - DNA, 646 bp, Cannabis indica
tttttttactgtgtattttcttcacttttttttccctaagcttttgtagcgagtgaagatgtgggccccttcatatcatgaaatggttactctcttacatgtcagtacttggtttaatcatagggactcggttttaggcctaaatattttagtattttgatacggtaatgatatttgatcatctgtcgttgattttgaattagacaaactaatcatgcgcctcttttaaccgacacgtgtctctctctctttatttttttttggttcaactaacattaatgttgcctttgatgcttatttttattttttattgatagtagaaattaattatcatggtttaaagagagtgcaaattgggttttggtaaataaatttttcgttgactactttttgtacgtagccaatgaggtcgtcgcacgagtccaagcaagtcattcctttatggttagaatttttattttaaactaaataatagacaatattaaatcttatccgacgtggcaatgggagggtgggtttggtttggttttaaagtggtcctctcggctgattgaatgggtcatttgtcatttggttttctcgtgagtcagcagtctagctactcggaaaaggtgcttaagtaaatttttattttggaaaaagaaaa

SEQ ID NO: 195733 - DNA, 2455 bp, Cannabis indica
cacttttactaaaatttcaaactaaatttaaacttgcagggagaagttgacgatgaacaaaataattctggatcactacatcgataactacattcgttttcttctttggatcaaacctcatgaattttcaggtgcaccacccccaaccattgtttgtgactctttgggacaattatcaacattagatttcaacgcggagactgacaaactcattaaccaagtccatgtcctgcagaacatacttgtacgtatcaatcaaccttctttgtcaggattttctttgatgcttgagtttgacgttacatttattctccgagggcttacctttatttgagttctacactgccaccgagttctctaacaagtaaatttctttcttcgaacttctcaaatctcgatgcatgtccgagactggtattttgattgagaatttcatgtgcattatatgttgttgaagagtataatttaagcatgagaatgaaactgattgacttgcagaaatagggtattttaagttctatattgagaaggttctaagtcttataaaaattagactattatttgacttcttaataaaatagccaaattggattagtaatgctagcaaaatttacttcctctatccagaatccttatggttccgaatgatatttagtctttccttcgattttctttccatgttcctgatctaatcgtctaggattaatattccctaagagctaatttcagacataagatccgttgggaacctctccaagcagttatagaggagaaaactctcatgtccctgccatcttccttactatggatatttaactgctttatgattttttctttcttattctttccagaatgtactatggcaaaaattgaccatcacgaagaaatcaaagttgaggaggaggaaattgttgcaaaagaggttgtagctttaaaaatagtacaattcatcttaatgggagatggatcagtaccaaaataagttctgagactatgaaaacctttgaaaatatgagaacaattggggtcttcagagtattccaagatttatttggaacaggctctccgtttagggagagttacccagtaaatgcgtggatggaagctttggcatttggagacgaggctatgtagagatgggcgcacatcttctacttaggagcttttttgtgggattctatgtaatagttgggatagctcctttgcactttatctcccaaatatataaactatttgcgggatggtacgttttgtgcaaaactaaaaatgtggaggtccctactccagaggaaattctctatttctaccaagttaagcctcaagctatgaggaaataataagagcaaggtaggcttctatcaacttgatagatattctaaatccatggcctacccagtcagctccgtgaagcacactcatgaattctgagattacttgttctacaccatgggtttcttattgagaagggttcccacccttactttggaattcaacattgcgagtaagtggggccaacttctatattttaattttcctctcttttctttatcttccatatttagtttcttactagcatccttcctttatcttttttatctttcaatacaataactcatctggtagatgctcctttcttggaggttagatgaattttatattagagtttttcacctgaagacttgaggtgggaaaactcaccacctcaatcaagcttaggaaggttggtttactttctcctcatcaaagcatatattccttccatgttaaagacttactccaagatctccttcatggatatcctccaaaacttaagaaaacaattgcagagattctcactgacaaggaacagaaggcctttaagaaagatcaggaatggctggctgactagaattggcttcatccagagcctttgcatgagaaagaagagttagggatccagttatccccaatggagttactttgggagcgattacaactggaatatgtaatccatcctttcgtttaattcgttctacgtgtttaaaaaatttgaatcgttttgactatggggattcgacccatatgtttttcttccacctactcaaagtgttagagtatatatgttccttaaaatgaattaccctagcttcttcaagtatgatagatttttagtctgggaagatattttcatatttgcttgtggaagatatttcatattttcatattcttaggctgggaagatattttcatattattaatggtctgaaccaaaacttgagcttttccttttttattgttgtatgtattttttgtttgatttttttacaagaataatttttcatgtctttcttgtagaatatccacaaacttttcaaatgggccttctcaaaaaataggccctcaggctagtataggcgccctggttgacgtagttcaacctgggacactctgacacatctttccagagaagctttca

SEQ ID NO: 195734 - DNA, 626 bp, Cannabis indica
aaaatctgattcaataagatctaaactcttattaagtttaaacaaatggagcctaaaacttacttattagttgaatgaaactctgattctattttttatgtatcttttattctttagtcctaattcttctcaaataattattagttaacatttgtaatatgggaactatttttttttttctttctaattaagattctatcaaaatctaagataatactagtgattattattaagagacatgtccatttcatcaaataactaactatttaactaataaccatttatatatttagctaccccaaatttttcttcttcttcttcttcttattttatttttgttttaatgtataatcactttcatataataatatataatatctatcaaaaagtaaaaaaaaaaatgttaaatacactatctagtaatttctcactctaattaagtagatctatggcacaatataattaagtatataaataaattaacacacatcaaaacttgattcattatcactccaaggagattattttgctatacatgaatccatctataataaatacatgaatatatatatatatatatatatatatatataataagtagaagttaagagtaacttaaagagaag

SEQ ID NO: 195735 - DNA, 1618 bp, Cannabis indica
ccaaccccaacactcaaagctgacagcaaaacatgcttctgttccattataatcttccactgatctcaaataactactaaaaagaaaaacagagcacttgcagttgttctgtataagctaccaaaagaacatgaatgaaggagagacaaacaaagaaaagaaagaaagacccaaagtttattgtgaataaatggagctaaataatgaggttggagagaatcaagtaaatgggttggtgggatttttgtgttctttctttttgtgaaatgaaagtaaaagaaaacaaagaagaaagaaaaaaaaatgaattgtaaggatgttgtgttataaggttggtgttttgttgagaggtatgtatgagtataatgtgtatgagttaccacttaccaataccattgtaagactatatatagagaaagacagagaaagagagagagagcaagtgcaatagcaaaatgcttcttctatgcgtatttttttattattattattattatttattattggacgttagaaaaaatactcataaaactaaataaatgactagactttgtttatttgttttgacagagagtaaactgactgctgctatctcaagacttttgttccattcgttttttttttttttttatttatatattattacttttgtctctgagttgtctttttcttctacaaagagaaaacccggaaatgaagtatgcaataatggtagagtaataatatttgcatacacaattcaaacataaactctatagtggcaagtaattttcattcctcttttttattttagatcaaaaataatttaccacataaagacacgtttaggaagctatattataatcggagataattatgtttttgtctgaatatgaatatgtagttacactctccaattctaataccaattgaatctaattactattaaatattaattattgaaaaatatgatacatggtattttattttggactcacaataaattacaaaaaattcttttatgtctcattttttagaccagacttacaaccgatcacaagagaatattttaacaatcgaataaaatttcatctcaaaactaattgagtaactcatttatcttatatataatattttatttccacacattaacaatattaattttaataaattcactataattactatctcgtatctaagtacatcttgtattttaaaatgtagtgtaattattagactatgtaattaccaccttagtaattacacaacctaataattatatatatagttatttctaaacacacctaaatctatatcatatttgattaaaagtgatttactatataaatgtatgtcatgtttatgtgtaatttatgtgtgtcatataattggttataataatatttagtgaataataacttaaggattaaggtcttgtaatgtcaataatatttctccttttcagtaggcaaggttcatggggttgtctggaaaattatataatatagattctgaatgacctaacatgaacacactttctatattcacaataatgatttttttaaaaaattattctaaaaaaaattatataaacaaaatacatcttataaaacctctaattaaaatttgaatttgtttc

SEQ ID NO: 195736 - DNA, 1109 bp, Cannabis indica
cattcattctaattgtttctgctgtcccagtaaagcagagcaaagttcagctcaatccttattattgttattatcttaatattgtgatcattattattattattactattactattttccttcttcagagtaagcacagccatgtttgacaagctaaataaaatcagagacccaacagtccttttctccttctttccagaatccccatctccatctaagtcgaggcaaatctgttctaatcctggatgcaaatttgcttgctatacgagacgcaacttcaccatgaataagcacacccatatttgacaaactggggcatctattcaacatagaagatatgaaggaaatggtggcattcatttcatcaattaacaaataagcagtaatctctttcaagccattcatttctaccctaccctccaaacctccagagctaaatgatgcctccatttctgaccaggctcgaggacccaatgtgagagaactgagattaggaaaagaatcatacagtgttccgaagcttaactttggagtaacatcttgattgtgttttggtatatcaagtgacagaattttgatggttctacttgatccaaacttgcccatgagactgaaaagattccaagactctagctgaagactgttcaaacaattgaattctttcacttttaaatgatctgcgttctcaatgattagatggagatcagacaacgatggggtttcaaggacaagagatctaggtctaatacactccagtttgagttcaacaaggctgggagccaatattgttatagatagtggagcatttgagattgtccagtaacataatttcaggttcttgagatcaacctttggttctttaagtcctccaaccccaaccaaattaagaacttgtaaacccggaaaacattcattaactttattcaggtcttcatcatctagtcttagaaattcaagggtcaaacttgtgagattgggcatacagttcaacccatcaactgacaaccatgtgtttttcagttctagtttgagaagattagggcctgaaacaaaataaaacagatgtctcaatcttatgtttgagttctaagaaactcgataccaaacac

SEQ ID NO: 195737 - DNA, 1509 bp, Cannabis indica
aaggattttgttggttgatctgaaggcgcagaaatcgaacatcgaaccacatgacggcgtatgcataatcatgaaggctggcatttgtctttagcagctaaagctgctgctctgtaccaagacgctgcagccattgcacctggatctggtaccgacgcaagtatctccccagacacatatgtcgaccggccagcctacaccaacaatgcatttgctaaggaaagctttcttcaagtttgacaattttctagactagaagtattgacagattcatcacaacaagacaactatttcactttcttagttacctttcatgaccaaaaaaaattgaaatacaaacagaaaatgcaataatgaagaatcaggaggataaaatatatgttttttactcaattttctgagctctccatttctcattgctaaaaattcaacaaggaaatgtcttcccccttattattgctagtaaacgatgctaatgcaacagaggaacacataaatggtaaagagcaaaaggatcagaaatagtttcacctgtgcctgcatgtgcatggttgactcagcccccgccaaagctgcttctgatgaaaggagaaaagcagtaacagagtcttccccagcatttaacttctgtatgtggaaagggttataagtaccaaagccatagaatgagtccagaattaaataacaataataatgacctcctggagaactgttgaagctggaataaaggcatctaacaatgtgcgatagccagcactggctcccccatatttactaactgcagcaatagcagcttcgagtgcttcagcccctggaataagaaaataggttaaattaactcgagctaaggttagttactattgcagtatgcaatgatctcacatttccttgctgtggcatctgactgggtgctagttttgaattgtgcgtaggccgccttacaaaatatattatatctggtcaaaataaaaacacaagtcttaatagttattttatttaactgaacgtaatcatattaagaaaggaaagcttaatcaagatcaaaattaggagaagtaagcacatgatcccgcttgttccgcccataactcttccaatcgatgatccaatttcattcaccgtttcagcagcatcattcagaggatagctatagataaaaaccataaagtaattagttatccactaccatttagtaagatctttttccttttctataattgggttacgccaaaaaactgcctaagcaggcttagtgcaaaactaaaacctatagcaaaaattgcatattttacccagccaaatccctacactttgatattcttttatataagttagaatcaactcctttttcaacacaaacaatttataagttagaagccaagcaagaacctgaataacacggccttccagatatattcagtggaagaaaaacgagaaaccaaagaattatcattcaagaaaataacatgggattcacaaaggaaattcccgtaaatatccacttctaaa

SEQ ID NO: 195738 - DNA, 904 bp, Cannabis indica
gtaaaattgtcatccctaataccaaatcgatatattatcttttttgaaccatattattactatcagatttattgtttgaaattagagagtgtaatttggtggtaattacaattcaattaataatgaaaataggggacacaattaactatacaatgacttaataataaatttttatgtgcaggctattcaagaagagtagttgttgtactccaaacacagtgctaaaatgggtacctgatttctgtaatgtgtacataatctccagacaaggaaagttgagcggcgtaagaaacgcgcgttgtcctcttccaattattccgagacataatcaaggccatcatcgtcaaactcatcatccttgtctcggtcatcttcctcatgacatgtaagccctatcttcttctattttaataatgtccaacattatatatcgttattagtataaataattaatatcgaatcacatgtattaaatttaaaaattttaaattgagatatatgggacttgttactactcccaccaataccttgcctgagttggtgtgattttttaattggtcatttgtatagtctataaatactgtatttaacttattttatatgtttactattatttattaaaaaatataattattttctaaaaagaaatatttattttatttattgaaatattatatttgatattttattaagaaaaaaagttcaattatatttttaaattttttcatgtatataaaaaaaattatattttttgcccaatacctctcaattggcttgcgacgggcttgtaacccgtataggcgtgcacaggcctgtacctaagacccccacttaatgaacccgacccatacaaaaatgactcctaattttccaaaattaacattttatatacaatgtatgtagg

SEQ ID NO: 195739 - DNA, 760 bp, Cannabis indica
gttatagtttgtgcacgaaatggtgatgatggcaatcaactagaggcatgtagttactagttcagctcaatatatattttttgtcctgatctttctattgcattcgcattgaattactttttctgtttaaataggtttgggtatgtgaggaacctggtgatggtgaattcaacacttatgttcaccatgaaatcatgatctttgaatttcctctgtgcacagcatggatggattgtccgcttaaaggtggagatagaggtgtgtattatatgcatttgctttcatgttgtacttgtagtttgtcagaaccaaggaaagattatttgctttcttattatagttaggtggtcataatatctttcttaagttataattcttcttattattaagagaaagcttatattatcaatcagtttttagttgattattgcaccccccatcttgtcctgttggaagttgatagtttattttttcgttatttttttattagactatggcttttctagttgtttgtttacctttaaatgttttctttgtgctggcagggaattttctagctgtcggatcaatggaaccttccattgaaatatgggaccttgatattgtatgttcaatatttttcttcatagagctaagagtgctggttgttagtacttgtggaaatgttattttatttccttagtaatgtttgctattttcttcagatcgatgaggtacaaccatgtatggtattgggtggcattgccgagaagaagaagaa

SEQ ID NO: 195740 - DNA, 2048 bp, Cannabis indica
ggtcaaatttccatgcattcattgccaggaatatcacagtatctcaaaagtgatcccagaaaaatacaagcacgtcaaaattacaaatctaaggatattaattcttcttagtgataaaaaacatgaagatctatttacgctaaagaattgtgatatcaagtgtagatcagtacagaaaaagggcttctcctgtcgtttcctactttgttgagtatttatcttgttatacttataggtgactcgcgtaggactgtcaaaaacgcatccctggaacacaaggaatttattgacaataaattgttttaattgttttatttactaatttttattgacaataaattattatacttaaacaaactgatacgttattttctaactaactaacctattttaaagctagaaatgaggggaaaattttaggttgaagatgaagataaaagaaatttggtgaaaaatgggagaagagggtcggatggggtatttatagacacattagcggcgaatgctccgccggtaatgtatataatatatatatattttattttcgccggtaataattttgaactcaaagggcggaattttttccgcccacttattaacggcgggatattagcggggggcaatagcgacgagcaattcgccgctaatactatttaaaaaaaaattccccctattagcggcgaaattaggggcccgctgctaatactggcattattagtggcgtaatatgtcccccgctaatgagtccgccgccaatagatttaattcttgtagtggaatttaagagaaaattattaaaactaaaaaaaacaataaaaacaggaagcaagtaaattaacgatgattaaaagttaaggttttcaatttcaattgtatctatcgaatatggtttaacatgataaaatttctattactaattaaataattcaatgcaatagcaggtttactcaagtaatttatagtcttctcagatatatcaatctcaattacatgtaaattttctactttcgtgataaattaaatatgtaaaagacattaaacacagaattcctataagttatccaaactatataggtattctcgtcctatatcgaaatttagttctatttcactatagcataattgacacacacttttcagatttcgcatcaaaatcataaatatttaattagtgatcaaacaattaaaagtaattaaatacgaatgaaatagaatacataaaaattaggagaaaattaaatcacattaaatcataaatcaatgccaaacaatatctatctaaaccctaatgaattgtttagccactcatattcatcgtagcaaattcacacatattaattcagaatagaagaagaaaacaaagaagaaagaatgttgaaaaccccattgaaaaagccttcgcgattgaatttgctctctcattttcgttctcctgaactgcttcctaattaagagtttttgagttttttgagctttgaaaatgtactaaaaacactaataataatatatttatatatgctaacaaagttacctagaagatactaaaaagatttaaaatttaaacttaaaaaaataaataaaaattgcaactctacttaaaaggctatttttttatcttttattttctagaaattttcttgcttgcaacgactgatagtattttggctataactctctcgatattgcttggaattggacaattcaagatgttccggaaagctgaaagagagatctagaatttttatattttaactttttctaaaatctattctgatcatagtcgaatttaagctttattttctcgcacaacctattttataaatcatctttttctgaaatttgataaatttataaattccaaatgtcgaaacttgaaattaaagaaaacaggcataattctattccgaaaaatgacaatatagaagaaaattaactctaaaaataatataaataataggctaaaaaatcataacagcataatttttagcatatgctaaatttggcatacttttacaacagtaatggagtaattaatttttttttttttg

SEQ ID NO: 195741 - DNA, 3173 bp, Cannabis indica
aaacctatgacctcgtttatgatgatgtaagacaataaaatcagtactatacatgtatatatacatagaggtacttaatactttctacacttattatttttataattaacatgtatacgagactcgacacttaattaaatcaataatgatattaacacgtaaaggggtgttgtgcaccagtgccttttagtatatctgatatatatcatagagaaatgctataaaacactagtagtgcctagcactctccttggtgttacatcgctatcgttgcaattaagtatatcaagtcctatatataatttaatataataaatttaagtgaattttattaactaatcacaaagagatgcgtctagaaaatgttaggtaccattgattgtcctttttaactctaaggtgtttaatataaatgtgactccctaaattagttagtaattttttattttatttattaaatcaatttatatatatatatatatgatctaatattaaaatacactaataataatttggagttaaaccaaaattagatagtacgtacgccaaatagcaaacaatacaaaagatttgatatctaagtagtatatgtattttggtgacctagttccttttttttttttgatggtgttgactattcatgatctaatgtaactcttctagatttaatttaataattttgtaaatatttttataaaatccaatataatataagagtaatcaatttttaaatctctatttactagaaaaattctcattatttcaatgtggtactataaaaaaatttatttttagtcactaagtaaatataaaatagttgtaactaattataaatcatcattcttatgttgtgactagaaggttcatgactaaaaatattagtcacaaaaattacaatttattgtgactaaatgtgtttctagtcacaatatttgttgtgactaaaactaaattagtgacaacttgtatctaaatataatattttagtcacaagtaactttttgttgtagctaaaaatcttatttagttacaaaaaaatttatgttgtgattaaaaatatcactaaaggtaactattttttgtagtgtcggttgtcaataaaacctctattgacaaactaatcaaatattttaaataattaatacacatgattgaagataaatgttattgagctctagtggtgcctaacatcttctgcagatggcgcctcacaattagttagtgatcatattttctgaaagttattttattacgttatatgagactcgatacttaattaaaccaatatcggtattacaccgaggaagatatcacaccaataatactttttagcaattcttaataatgtgtatgtaataatatgaatttccaatattatatttgggtttcacataatttaattcaataattattatgaaatatagtaatttgcggcatacatacttaagtttaactcttacttacaaataaatatctaagtttaatttttagcggcaataatacttaagttataattctggaacttctataagtacctgactgttaagtaagtaaattgccatgtggcaatccttaattggtgaagtcattaaatttttatttttatttttatattctttatatacatacttttatagataatgtgcactggcaaaagtgacatttgattggacaacccactcacaaaagtgagtacattttaatgaaataatataaaaatattttttattaataagtacaaaattatcaatttttttcctaccaaaatcagtacataatatattcaacaatataacttttatttcacataatattttcaaacaatacaagagcatacatatatattcgactttcttggataaaattaaacacacaaacataagtactcttttattctagttgattagacacacaaacacatatttttaaaaacactaagagtacatataatataatataataatatgaatatttattttgttttctgatgttgttgtatatgttctagttttttaagttttctagcacaataagcctcaacagcagtttttgctaaattttcaacactgataggtttgttagccaaacttttgtaaacaaccttagctgttgtttgaaccgacgaagcttgttcacttgatcgtttcccagtcatgcaataagttgcaaaggactcacaattgttcttcataagatcatattgtccaaacttattattattattctcttctgtggctctttggatgaccacattgggcgggtcacgtggcgcgacgctgcacgtgccactccttttcgcgaagaaatgggctggtgacacttggtattcgaatcgaaacactctatggtgaccattgaggaagcaatctaagcatgttttgatcactcctcgatgttttttctgttgaaaccacacacttcgcaacaatcatcatcatcatcatcatcatcatcatcatcattatcatcatatgtttgttgatagtggattaccatattatctcctacatatattcctgcatttatcaacaaaatataattgttattaataatgtaataactaaattagatgataacatataaggaagttttgtgttaataatcatgtattttttttttggtgtttatcatagttatattaagtttacaacaaatttataataaaaaaaaattcattaatttatatattagagttcaaattattaatttttttcttgtattttaaagtattctataaaacaaaaaaaaaaattcaaacaacattaaaataacaacatgaaaataatatttaaataacaacacattaatgagagtacaataaaatacatcaaaaattatatttttctaaataaaattataaaaatatttaaaaattcatacaactataatttttattttttttatattttttttattatattttttttgttatttgttgaaataattccaagaaaaaataatctctaattatttctaagttttgatcatagaatttggtgtgacaaataaaaaaaaagatttagtaatggtaaaaatttactaaataatatctctatatatatataaatacaaaccgtgatgggagtaaaggtgcaaagtcctataacagtaaatatggtctcctggtttgagctttctcttattaatactgttagaaccaaccccatctctct

SEQ ID NO: 195742 - DNA, 690 bp, Cannabis indica
aatataaaaaaataaactttttttttaagaaaaaagacaaatatataacattgttttattattcaaattgaacttcattaatttaattttaattggagatagttgatgaaagtacataaattatacttaagtattcaagctttttttttcttcaacaaaataattaactattaagtttgtagcagataagtatttatttaactattgagagtgtgtggtgtagttagttaaatgactttatgctaagtctcttatttggttgtttttcggagatcaattccccatgatagcacttatttggggttttaaaagtgacactgatcctcaagaattcttgggagtaacaaatgtgtgtgtgacttattgggtaggtcgtggtatccctgagtgggaaggctttagctaacaaccatcttaagaacaatgtataagtcccaattaactccacggtggcctctcgaattgttgttaagcaaagaattggaaatagaatgtgcaccacttaatcccctttttagttattaaaaaaaagtatctaagtaattttttttagcaaaagtatccaaattataagaaaatttgataccacttagtacacaaagtactaaaaaataattgtggcacacaaagtagttttgcggtagaaaaataatttgtatactaaaattttacaagtgtgtaatagttaat

SEQ ID NO: 195743 - DNA, 1040 bp, Cannabis indica
actgtgtcacttaactgaaatttttgaatggaaaggtaatgagcaaaatagaatctaggttcagtaggttttattttcaaaatttcattttttataattaagtattaaaaaagataaaatttaaataattttaccgtaaaaattttaaaatatatgtgtgcaccattattaatcttcattaaaaaaaattgtatttgttgtaatcatattatttaagaaataattgtaagctataataaaagttttccaattttttaaaaaatatatattgggtaagcaagtacgtgatgtgacaatgacatacatatttcaagggttataattaaaagtacaacccacttagcagcctaacacaatccactccaacaccaaaaagtttgttggtattgtaaatttgtaatatataataaataaggccaatcatgtttgaattgaaggatgtgaaatctcaatatcatttagccattagatggatatagaatgtgcacttttggtatcttagggttatatgtgtgccatgaaataaggatatgaaatttgataaaatttggtaaccggctcaattttatcctattattatactatcttatattaacataatattttaaattggtatagtaaattgtacttttaatattattattactttttgttttgtttctattactagtacttttacttgtttactagatgtgaatgtgatgttatattttatttgtcataacctaagttacattgagattattatttaatgttgatcatatgttaatctattacagaaattattatataacatgtgatttaggatttaaaagaatctaaaaaaaaattaagttaatttttataatatgtcattcacattaagaaagagaatagtaattataattaacagttgggtaagtaaatcaacagaatccgcttctctaatttcccatccttaaataaatatattttcattacttaattttattttctggttactctttgttttgatcttcagcaaaaattattgtttaccaaatagaaatataagtctaatt

SEQ ID NO: 195744 - DNA, 502 bp, Cannabis indica
tcatttggtggttatttttacttgtgctaatttatggtttgataatatgcaaatgcaatcttagtctgcttcattcatcaatggtatgatgaagaggtgtaaggccaagtatctccaagtaccagtgaatgagagcatttctgccttgtcctgaaaacaattgcattctgctgttttagaccattagtattgtttattgtaagagatatgtgaagacattagtatcatcatgtgttggaatgtggaggtgcctcttgttaatgatgtcttatgtcatattgacttttttctttggcagggaaacatgcaggtcaacatcccagcagtggcaatttttgttagcaacgctctggtcactgtaccttttaaagctttagcagaaacatgtgaggctgataattctatgtccaacatgcctgtgctgctcgctgtagctcttattggggctactgttggaggtaatgggttggtgcttttctagtctagtatagacttagaaatt

SEQ ID NO: 195745 - DNA, 924 bp, Cannabis indica
gagaatcccctcaagtttgatccagaaagattcttgaacaacagtaaatgggactttagtggaagtgactttaactacatcccatttggttctggtagaagaatatgtgcagggatagccatggctgagaggatggtgatgtattcactagctactcttttgcattcttttaactgggaattgcctcgtggagagaaaatggatcttgcagagaagtttggaattgttcttaagaaaaagattccactagttgccattcctactccaaggttattggatcgctcactatatgagtaaactactttaatagtcagttccttgaaacactactgagttctatatagttctgtcttttaaggttcaatacttgtgaactcgttaattctgaaattgtaactttaatgagctctaaatgctgtctgtttgtgtttaaagtactagtcattcgttttcttattgttttaaactttggctgtggctaattcaatgacgagaatgagaataaattaggtgtatgttgtttatgttaatatgataccatttagttcctgtgttgtcttttggcctggcttgacacctgtgatactgttgtaattgtttacaaaatcaaaggcattcacttttacgatggaatctatatatctcggacggctcacaaacaaaaaggtacgtataaacagtaattgttttttaatattatacctaaaattaattttatttacaaaaatacttttaataaaattatttataaaaatactgatatccaccttagcaaaaataccgaaattcaaaataattattgaaaatgaaaaagaattaaaaaatctcgctttaaaaaatttcaatgttatgcaaatattaaaaaaagtaaccttttaatttctgttgatgtaaataatatattaattagttactttttattat

SEQ ID NO: 195746 - DNA, 1919 bp, Cannabis indica
tttttgttttttttttttcttcaaatagggttttggaaatccttctactattctttttcgacgtggtgatcagagtcactaatgattaacaatgcatcaattcataattagtagtggaatctctttgaatcagaatagctcattgtttaactgatcaatgacattttttatcgaaccataagctgcataattcttatcacaagccacatgagacaaaattgtgtcttaaaaaatttagacaataaaattataagggttcgtttagaacgccgtattaagttatattgtattgtattgtattatattgaattgtattttatacaatatttttatgtaaaattatatgtggtatcaatttttatggatacttaaatatatactattttagtataaattaaagtttaacataatattatatataatctaattcaatacaatacaatacaatacaatatacaacataatacgactctccaaacaaggcctaacattcttaaataacacatccaatctcattaaaaaactcactttctttgttgaaaaaaaataaactctttacaattacctgaaaaaaggaaaaaaaaacaactctagctgaaatgaagtttggttactctctctatcttatcgttatctcattacactatatatctacaaattgaaaataacgttcaatgagagaacaaatgaataatatattgacacaccacgctgatgataaagatataatttataaataataataataataataaaaaaataaatgttaaaaggtactagtagtacctaacacctttatacgtgtcaatatcgttattagtctaactaagtatcaagtctaatatagtttaaagtaataatttttacgcgtatcactagctaatcactaaacgacacgtttagaaggtgctagaatattactagtacttaatagcaatgctcaataataataataataataataataataataagaagaacattgctattggataccagtggtgtcccactttttatagatgacacttgattaacgatatttcttaaaagtttttttttttaagttatataaaatctaatacttaactatactaataaaaatataacactaaaaaaaaaccaaacactaataatactttttaaccgacctctaataataatacatccaaaatctaacaagttttatccaaaatatgtagttagtcaatttttttgaataatgaaagtcattcttgaccttttgtagccccacctacgtacgaatagccaaacacaattaatttatatatatatttttgctttatttaatttatatctacaatatttgttttttactttatttgttttgatagaacacatactaccgcttctttgtattgtataaatattatattaaattacattttatattaaatttttataaatataatttaataaataaactttattaaaaagcatttatttaggaattttagtaattagttttaaaaaatataataatttattttaaatattttaaaacaactcgattataatattttctagaaatttaaatttgtcataaatttcttaaaaaaattgttaaaatgctctacaattataattgtaacttattgatcatagttaaaaatgccaaaataaattattttaaaatttaattttaaagtacaataaattatttaaaaattaataaaaatatataactgtaatataaactatcaggtaaaaaaaaattatagtgtaataaaattaaacccagagtaatttgaaatagtattataaattataatactctcttttgtttaaaggcatgcagtgggagacatagaaatgaaaatcttatagtatgaattgatgtgtcccttccatgctcctctttcaaatttttggacgaagaaacaaaattattattattatta

SEQ ID NO: 195747 - DNA, 783 bp, Cannabis indica
aaacaaaataatgtcatattttagtgcaaattttgtgtttaattaaaattagaaaaatatatataatccattaaatgaaaagtagtatatagtcacaataattgtaattaattatatataactaataaatatatttatttattaataaatgttaacttgtatttttttattgaacaaaggatgataacttataattaaatttgattattattattcaaaaaaattattgaaattttattctttcattcaaaaaaaaaaaaataattctcgaggagtgatgactaataaaaaaaattaaaaatctattctatattacacacttattgtcgttttagtttagaacatgttcctactaacttgttacctcttgcggtaactgattaataaaatgctgatttttcattaaaaaaaaattaaaggaaggtttacctaaatatatatagattagtatctaaattaattaagcttaatgatctctctatagagatctgaaagtaaaaaaatattattattaatagcaaaattactgaattcaaaataattacatagctagccttcaaataatgcacaatttgatagtaagttgtaataaattcgattaatgaagttcattaaaaatatagttggatttcctaccttaccaagtactatataataaaatcaaacttaattatgacgcgtatggaccaacaactctaattaacaatacttctccaaaacaaagtttaatataatgccttcttttcattttttttttatcttttttttttaataaaaagtttg

SEQ ID NO: 195748 - DNA, 820 bp, Cannabis indica
ctaataattccaagtttaaatttttggcagaggacagatacatatgtcatttatgtttttctttgcttccaattagctagattgattcttggtatgcgttatttggttaatttgttcataaatgctaaaaggtactacaggagtgtttagtagcctacaatgtgttaatatcgctatatattagtctaaataagtatgaggtcccatataatttaatataataacttttaagaagtattgctagccaatcgcaagatgacatatctaaaggtgctagacaccattattgcccaataacaatgctctaatttattcttaatgcattggggtgatgacataaaatttattacaaattccttgtgttgtgcatttttgctaaatggatgaactacggttttgaagtactaccaatttacacatcagattaatttttcatatagtatcttacattattcattgtaaagaatatgtaagtttcgtaaatttatttacgggattgtttggtaagtcgtataaagattgtattatattaaataataaataacactatgtttgaataaagaaatatattgtattaattattacacgtaagttgtattgtttaatgcatcacaaatagtttgtataattagcttgtattataatatttacaaaagatacggggtcaatcccaatctttgacccggatctaggaacccagacccgaaccttgaccccggacccaggactcgaacatggacctagacccagacacggactcgaacttgggatccaaacacggacccgcatccggaattggacccgacccagacccaaactc

SEQ ID NO: 195749 - DNA, 2025 bp, Cannabis indica
aataattttatgaagtggaaagctttgagaaactaaaattaaagaaagacaaattaccagttttggggaaaagtttatttggattagggtttgggcaacttatttcaaactcttatcccaagtttaaaaataatgttattaattatgaatatgaaaatgaggatggcacatgacattatatgaccttttttttctaatgactcaaaaaagggaatatatgtcttttgaataatttgcattatattaatcccacaattcaacattaattgcttgcttcatgttctatgcctttggttttttttcttgtatctccctccaacactctctccacttagtcattaatcaagacaaattatctttactaattaatttttgatccttaagctttaacatgtactaaattatgtctcctaaatttttaggtggttaaaaattattcttgaactattgagattgtcaaattcaataacttttttaaatttcgtttaattttactaacacaacaaatgtccatgtactaatcatgcccctgaactttgatatctaccaaatcgtggtccctaaactttgacatatgtgcgaaatcatgcccttaaattttcatccacatcagactttcgttagtaaaattgaacaaaattcattgaatccaacaatctcaatagttcgagaaaaattttcaagaacctgaaaagttgaaggaacatgatttggtgcatgtcaaagttccagggtgcataattagcctttatttaaaaaccaaaactttaagattgtgtttggctgaaaagaatgaaaacacaaaaataagagtagaatgaaataaaatttaataaatgcataaaaaaaattataataaaaaattcatcttgcattggaatgatctttccttttatttcaaaatggaataatgttccatcaaaatggtaaaaaaaaaagtcattccattagaatgaaattttaatactttaaaatacaactagacaaagaaatgtaatagaatctgattcatttttcattccattatatttcattaactccatctaaatgcaacttgagtaattactttcataaactcgtcatattagagttttaacatcaattcaaacaatggaagaaattgtagagaaatactataagagttgtgtatagatgacgagttattaagagagctggaataatttaaacaaaggtgtctaccattattatgagagaggtgtctagcattattatgagaggtgtcaaaaacagttagacaattagttaattgttagaagtttgttatactttgtgtattgttacacttgttttctgttttggtcagttagctttagttagctctttgagctgtgtatatatactattccagctctcttaatacaataatgaatctttctcttcagtattcttctcttctttctttccttctattctcttttgtctttgctttgtttttccttttcttggttcttgatgctctgtaataatggtaagaaaagtttccaacactaataagaagtgacgttttataattaattaacaaatttttatagtctttatcaaattaaaataaaataaataagacatgatattaaattgtaccaataataatattacatctcacagtaatattaaattattagagttagtcccacattattaattactaatgtgtggagataaattattatatataagatgaatgagctatactttttaatcgcttttgagatggaacctcatttattttaactcaaattctaatatggtatcaaagtcacttatgatccgttgtgagctcaaatgccaccggtccaaaaaagtcgtttaaacgtgtacacccacaaattttcaaatgaactactcttctcattaccaattaattttgaaatagaaccttattcacttatcctaaatactaacataaatcataataccatttaacatttctaagtaaattcgtaaattagttttgcaagcaaagcctttcaagcgagcaagttgtccaataatgtcttttttttt

SEQ ID NO: 195750 - DNA, 666 bp, Cannabis indica
aatgcatatagtacgagtatttatattattcaattgtagataagatgaaagaggtactattgtttagcagcaattaattaattttggagactaaagcgtggccatcttctgttcctatggagacgacctttttgactagaaagtcttctttaactttaatgggtagtaagtaaaacaagaaagtgattattgtctgtctacttggccactcttccttgagaagaagaccatgctttgcctgccattttggtcgactcagtactcagttctataatttgtttagaaaaccccctgttcaatttggtcatttagtatttcactactttttctttattatttccttccttaaaagggttaatttctaattgacaaaatcaactttctacccaaaactaaattagtcacactacacaatattacttgtaggagattttagtctaaatatgtaccataaataaataagcaagagtgataatgacataaattaactgattaaccatatttgaaagacatcccgccaactgatgaggattttggagtcaatattttttattttcatgtctctgtctaaaaagattggaagtcaaaacagtttggtgaaaccttttaaagaattttataagaggaggtccattattttcaacacttgaacataaaaatctcaac

SEQ ID NO: 195751 - DNA, 807 bp, Cannabis indica
aaaaaaaataaagaagaattagttgaaattttgatacttacataattagtgcacatgcccccgaagaaatgaagatgctaatttgcattgtggctcgggcaacataaattgttttcaaagaaattatatttgtatataatgtacatattatttttttcttcaattccttcttttcctagtaatggcaaggaagtgtctttttctgcaggtacaatttaatcttcagctgtcagagaaggagcaaattgatagggctaatgttgtacttccctttgaacatcaaggtgaaaggccaacactcatctatgtctattgttttgtcttttcattgttgaataatttttagtttttttaatgatgggtagtttacccgtggtctcatattatgcccactcatgtaatatcctattctcgatgttttttgaattgcaggaaatggtaaaccaattcaaatctacgacggtcggcgatctcttgcagatatgaatatcgaggaaacagctgtctcaaccaagaaatcagaagtaaatgagtctagcatgggtgagataatatatttccgcgattcagaagatgagatgccagattctgatgaggaccctgatgatgatttggatatctaactgtgtttacctcttgtcagcaccggaaactggtaaatcattttttctttacctgtaatcttttgggaaattatagtgagagttgtttcagttttccattttaacaagtgttaatgtaagctgtaacaaatttatgaggctgattaatttaatatcccgaatacaaatattttaagaaacagta

SEQ ID NO: 195752 - DNA, 1602 bp, Cannabis indica
ggaccatttaaaactgattaaaaagttcaagggcataatcatgcataggtcataatcgacaactttcatgagtgcagctccatcaaaaatagaaaaagaaaaatgaaagtgaaaaatgagggagagagagagaggcaaatctaggttttaggggccgaggatttcgattttgtggtttgtttcaataatcggtcaccgaatttttggttggctctgggcaatagatcccattgagagagaaaaatagaaaagagagtgagaaggcaaaagaaaaagagggtaacaagggaaaaaatagaaataattaatttttttaatatattttttaaatgagtttagttttatttttatttttttaaatatttatttatgtggaccaataatattgtattatgtgtatactatgttcttgtgtccttgtggacaatacgctatacacatgaaacaaccagccaacttataatttaactaccaaaaatagatagaaaatgttaattaaatattacagaacttaaatttaaaaaattttatcgttaaaaattaaattttgagagttaactactagcgaggaaatactattggaagttacgcacaatttaatcactgtgttgtcatgtcaccgcaaatagagactattagtggggtttgttacaaaaactgcagttttatgtttttctttttgaacaattgtttgaatttatttcttattttttataatttaaagttgtagtttgatcataaagatatattgagaaaaaccattataataattataagaatagtgagggtcaccttcaaattagcttaaagtaaattcaattttttttttccaaaatcattaaacataatatgaatcaaaactaggtaattttatacgtaattggttgttttattttcaatttttcattttttttttctacgtgatccgtttacaagtgtatatatatgaattatctcataaaactattaaattaattttcatttcatttcctttctttttatccttttatttttaatacttggtaaaagtatactactcatcataaataaaataaaaaacgatgtttttcttatattgagttgcccctcgtcccatgacgaagtgcagagatcctttctttgtcggacgagaaatcgattcgactcgttcgactactttttcttctccttattcttgggatctgttagagcttccttcaccttcgtcttcgccttcttttaatcctttcaaataatatttagtcatgagtttcatgtcctatacttgactttgggtaattcatctagtggagtgccctggcagttataattaaaatttaatctttgcttcctttaatctagtattttgacctattctctctatggcgcgctaacaatgttttcaattaatatatagatttatgggaaaaaataaatattgttttatattgggtataaataactagttgaacagaaagatcattagaggaaggaaaaaaaatatataattattacaatgaaagattatatgtgagtttcattttttaaaaaaattggtaaatattttgtagagcttaacaaacccaccgaccaaaaaatttcatgtatggttgcctgcactcc

SEQ ID NO: 195753 - DNA, 875 bp, Cannabis indica
aaagaatatatatataaattaaatagagagccaataaaactgtaaatcgaatcgatcgatggagctagttgttgacgtcattggttcgacggctgggtccggagggcggaactactacacctttgggtagcatactcagaacaacctggctacgtttcccgcacaatctcagcgcttcaaatcccattactccaacctttctattccccgaatcacacggaaggtaacgtcctccgccgccctgagagccttcctccgccgctataattcccggaagaatcagattccgagccggttcagcggcaacatttttgatgatgagaagcctggcggcgactacgacggagaaggaggaggaagaagctagaagaaggaaagcaaagatgatgagaggtatggtactggcggagttcgattgcgatttcgccattgttgaagaaaagttcactagatttggggggttttgaattgaggaaaattaattgggcctttttttttttttgtgttatgaattgtgaagagtgaagatgaagaaaggtttaagaattgttttgaatatatatagggaaaatttgaaagcttggagagcaggaaaggagtgtgatgaagggagttgacaaagtcgtaaggcggcaaagtcgtattgagatacacaattaagccgtggacttacgcgctgctcatacgcgatgtcaatattatagacagtttttttaataaaatttacacgagactttgcttggaagctggtccttaatttttgttttaacttaaaaaatgttttgtcttgattcgattcaaggaataataccaaaaactttctacatatatagattagattgtttacatgcgtacgtaccattagttattatttc

SEQ ID NO: 195754 - DNA, 1206 bp, Cannabis indica
tacgtaccattagttattatttctttttaaattacgatgtaatctttccactagatatacttctaagctacaaaatagagtgaaaaagaggttattgatctataaataattctaaagtacaaaaaattaagaacttagtaacattattaaatataaatatattataataacaaaatttattaaattaatttatgtatattatgttatttatttttttgataaatatatttaaactaattaagagagattttgaacatatagcttaaattcttagccggatttttatgctctcttaggaattaataagataatttgtataatttttaatgttacgtatatacacaaataatgtaaaatccaattttagctgaaatacgtacacattaattttttttttatttacaattatatatatgtctttgaattggagaactcgaaaatgcatgatggaaataaaacaatttgcattctatatatcattttaatatatagaatgattttttaaaatgactattttattttgaaataaatcaactaaaagctacatcaagtcttatattaatgaagtaagtaaaatacttatattcaagacaatttttatttattcttaggacttagattgatatccaataaattttaagtctagctaaaactaatacacatttatgatacaaattaaatctggcctattgggatttgggaagggataaattgttggtctatatataaatgaacattagaaatccatcaaataaaaagaaaatgagaatggaagattaaataaaaggtgatatatatatatccccctataacgcaattatattattagattattatatctgtacgggtcagaattatactatgaacaatgttttttgttacttaattaataagcacattaaataacaattaaaacaacaataataaatactaaccaacatatgtattgttgctgtagacgtttaaagattctattaataatgatgatataatatataaatattttatatatacatgtgtgtacgcaatacgcatagtttgaatgtcgacgtttctttcaacaacgacgttgttattaaaatattcttaattaatattagtttaactttttatttagaaaataaaaagctgcaaaaaaaattataaagagagggatgagtatttcttcaaccactttgaaagataatacactaataatgatggtat

SEQ ID NO: 195755 - DNA, 1623 bp, Cannabis indica
tacactttcgacacccttgtccacacacacacacacccatgcaaaatggaaagttcgagaggaaacaccaacacatcatcgaaatgggtctcaccttgctatctcaagcctccatgcccttgagatattggtgggatgcattcagcacaaccacttatctgataaaccacctatccacaccaactttagcacataaatctcccatagaaaaattgttcaaagtcactccaaatctgaaatttctcaaggtcttcggaagtgcttgcttccctcatctacgtgcttataacaatcacaagttagactttagatctaccaagtgtgtcttccttggatatagtccaaaccataaaggatagaagtgccttcatccaagtggtcgtttatacatagcacatagtgtctcgttcaatgagctagagttcccattttctactggttttggacagcccacagatcaccccactccctcacctccaatcatccaatacagtcattggcttcctttcatttcttcccccaattttcaggatgatgatgttgatgaggccactgatttttcaattgatatggctccttgtgttgcaggtcccacggcacctcgacttccccattgtccgaatgtgcttccacaaaatcttagcatgaaagttcttccatatctaaatcatattcgaccattccacttgccatacatctccccattcaaccattgacaccagcatcatctagcaacccccttccagtaccacaccaaaaaacacctcagacaccagaaaacacatcactgccctgtcccattcccgaacttacacttccttcacatcccatggttacacgctctaaagccggcatcatcaaaccccgaacctttctcacctcccttctacacaatcctcacctcccagccctttccttctccacatcggccacacttgaaattgccttaactattcctgcttggaaacacgccatgtatgatgagtattttgcactcaaaaagaacaagatttggtaccttgttcccaggttaccccatatgcatgttgtcgattttcgtcacaaattcaactccgatggctctcattaacgctgtaaagcgtatcttgtggccaagggctttcaacaacaacaaggtgtggacttctttcatacttttagtcccattgttaagccatccaccattcgtgtcatcttctctcttgatgtgaccaatgactgagatgtccaacaaattgacatcaacaatgccttcctcaatggcactttggaagaagaagtctacatgtcacaaccggctgactatgttgatcctgagtttcctatagctgtgtgcaagctcaaccgagccatttacgaccttaaacaagccccgagggcctgtttcgacacacttcgaacaactcttttatgccttggcttgaaaaactcaatcttggaaacttcacttttctatttagctgaaggtgatgctcgactctatgttctcgtgtatgttgacgatattttactcactggcaacagctgcaccagtgtcctacgtatcatctctcagctgcaccatcaattttctctcaagactcttggctatgtaacttactttcttggttttgagacaagtag

SEQ ID NO: 195756 - DNA, 1631 bp, Cannabis indica
catatatatgaacataactaatcatgatttcatcaaaacaacataactaatgatctctggaatttaattcttaaactaacataaaaattaatatacaaaacaacaaaataattgatctctagtaaataacaaataatatgtacattactccaaaatcgtatcatcatttttattttactaaaacaactttaactttattaataaaagtacattactaactttaattgattagcattaattaagtgcaaacttattaactcatacatggacagttttattacaagacctaaatacatgcaataattaaggtttggaaagttaatttgaagtaactaggtggactttgtggtatagttcttcaaaataaaaaggtctccataagtttattttaaaaatggaaagttatctgtctcccgaaagtatgttctcgaacagctaacctgtccatctagaagaagtctcgtatgtgaaatgatagttgccattcgggagggagttcctggatgactatcatgtctactccaagtgtagtcttcaaaaaagctagtcctcctcaagaagggaattccgaatggctagctgttcctcctggaagggagtcccgaatagttgactccaaccagttctatgctatctgaaagctcctttagtgagtacctttggtccgtgtttctggaattctcatgcacatttccggaagcacctatacgtatgttgatgtagagatctcgctcaaaggagagttggttattgcctagctaacttaacaacctcgctttttgcagccaccaatacttatcattttgatacataacgatcaaattgagtttcgaaatagaaaaaaaagattgagaatagagagagaaatgtacagagaaaagagagagattgagtttgtgttttgtacgaagaatcttagataaaaaagatttttgggtaagtgtgtgagagttgaaacactttgagagaactcattacagaatcgatcttgactgtattgtactttgttctttctcaatcaatagagaatatttagtagtgttctaaaattggagtaaaaccatagattatatcgatctttcagacttgaatcagtatattttctgtgttaatttaattatttcttgctttattttcatttctggttttatactctattcatacttatttttctctattattaatcgtaatttattatttttatcattactaattatttgattatttaaaatttaattattttaattctacatcattagttataattttctaacaattgcgtacgtagttgtggcatcattggacagtcaaagatgtttcttcatttcttctatattgaaatctttatatttatatcattccgttttttttttttgattgcagtcacaaattagtcatattcaatcataattataacaaagacaactcaactgccattgattgcatctctaaggataaaggacccatataactatattatatatatatatatctattaaattcacaaatgtgttttttctttcatcaatatgaattagttaaacaaaaactacttttatttatatttacctgtttatcaatcaacacaaacaaaacagtcataaggtttgaactagtaccataaaaagaaa

SEQ ID NO: 195757 - DNA, 1529 bp, Cannabis indica
tctattttttatttaaaatgtctaactctgacagggtggccctgtgttttctctttattttgaaacattaatggtccttattcctatcgtgtactagggttggaaggccatttcagtctggtcatgcttgtcatgataagcttcaacaattaaaaatttattcaaaaagacaaattatgattgtgtcattatcatatttgttgctttattggtatggagttccttttcttttgtccttcacttgaactttctttgtgctagctgtaatacaaatttatttctgtatgatcatgaagaaaataacataacatcatatatgttgtgcatggaagtaaactctacgcaaccgattgatgggacgagttccaaagtagttattcatattaattcaggatacttttcttcatccaatttcatatgtattattcgatgatgattgaatagcctcattcgctggaaaaagattattatactttccaattaaagatggccgagttatatacttcatagttcatatggaatttgtttggtactctgtataaggatcgtattgtatttaataataaataacgttatatttggataaaacaatgtattgtattaattattacgaccaaatttttaatacaatgtatgttgtattatttaatacataataaatagtctgtattagcttgtattataatatttacaaaaaatttgggtcaacaccaatctccgacccggacccggacccgggtgacccagactcggactcggacccgaaactgggactcggaacccagacccaaacccggacccggacccgtagttggtgctgggatcaagtgtattaaaaatatattataactttacacaatcaattaatacaagttaataccaaacattgtattgtattaaataatactaatataatacaatacaacacaatcaaccacaatacaatataatacattacaatacagcgtaccaaacaagccgatgatgttttgattaaggaatctaactaacctatgattttataagaacacaaatatgggtaccttttgaatgttacttattcatcttataatttactatgatggttacattattacaatatatcattattagataaatatatatagaattgaattaatcatagttaaccatgtacttaaaataaagtatttttaaatagaatatttaacgaaaactaattaacaattataattaaatttatttttaaaataaaattaatcttaattattattttataagaaaagaaaatatattaatataaatgaaaccaaatgatcatatgttagtaggtaatacgttattaattagttttagttagttaaaatttagttgcaacctaataattatgatccaatgacatgactaaaacttatgtaatcattataattatatatattttctataatatattatgattacatatttaatgtgacaatttttttaaagaaattagaatttagaactcaatatctttttatccctaagatgtctttatttcattattttta

SEQ ID NO: 195758 - DNA, 2921 bp, Cannabis indica
tactcctaatgtttgtgttcttgactgcaaatgaaatgtgttatacatttggtttcttcattgttaggcaatgcacgctgctccaatgtacattgctgaaacagctccatgtcagatacggggtcaactaatctctcttaaggagttctttatagtactcggaatggttgtaagttcttcaactttgaatctggttaccaagaatttgtttccacgctcctttatgcaatttaaatacaagaacaaagagcttttgggtatttgaattcacattaagtaaattcctttaattataggcaggttatggaattggaagccttcttgttgatgtgttttctggttggcgctacatttactctgccagtattccattggcgatcgtgatgggaattggaatgtgctggctatccgaatcaccgaggtggattcttctgcgtgccatacaagggaaaggaaatatgcaggatttaaaagagaatgcaatactttgtttgcgccggcttagaggtccagtctatcaagactgtgctcccgcggaagtggatgagatgttggctgaactttcttttgttggagaagagaaagaaggttcaataagcgaactttttagaggaaaatgcttgaaagcccttataattggtacaggattagtcttgttccaacaggtatttttaactaattttagctataccttcaaaagttattaattaggaaaattttggcttacatgagagacaaattccatgacagatcacagggcaacccagtgttctatactatgctgcatctatatttcaggtattacactaatattttatttacaacacttgattgggcattgatgaagaacctaattacttgagcagctttagatgataagttttaggcttattattctgtaatcctaatcaacataatttattagagtgcagggttctctgcagcatctgatgcaacccgggtctcaattctacttggtgtgctgaaggtaaactttctttttttaattatgagatctgaatgttcttaactcatgctctcttctcagttgaaaaaatttcttgacttggtttttgtaattgtagctaataatgaccggactggctgttcttgtcattgatagacttgggaggagacccttactgctcggaggtgtttcgggaattgtgagttcttttttctctttttgtttttcatattggaattgaaaatgtagagagttttctatgaagccacaacaaaagaatgaaccttttttgtttgacaaatgacaggttgtctctttgttccttttgggatcatattacctattcttggataatttatggattgtggctgttattgcattgcttttgtacgttggcagttatcaggtaagtcgtgaaagtttattttgttctttgtagtttgtaccatctctgatatgataacaagtttcatttcacttgattttacaaattggtgactgaatacactgatgctgcttgcaggtatcctttggtcccatcggttggctaatgatatcggaggttttcccgttgcgactaagaggacggggactgagtatagcagtgcttgttaatttcggtgcaaatgcgttggtgacatttgcattctcccctttgaaggtgcttaaatatcagaacattcgaagttcgtaacacatttgctttcttttttagaattcttatgaacaccatacaatgtttcgttgtgtgattttcaggaattgctaggagctgcaatcttgttttatgtatttggagttatagctgtgatatctcttggtttcatattcttcgttgtgccggagacaaaggggcttactcttgaggaaattgaggctacttgcctttaggaattgatctgctgccttcaacttgaaagtttaaaattagttgaaaacagatatatctcacatgtgcctgtacttgtagagtttacctaaacttgggatttccagttgtctactattttcttgtagagtttaacaataataataaatatatgttttctatgatctgatagtggtactcctttgtgaaatgtggttcgaatttattttggaatatttttcacctatagtcatgatgaatttgtactactaagacgagaatatgaagattggtttcatgttaaagttaaatttggttaaaaatgacccctaattcaaaagtttaaaaatactcttcttctcagggtaaaatttaataagttttttccttattcttatactcgtcagtgttatctcaaaatctaacctaacaaatctcgaagaatcgtgaaatttcacaggaacgaagccaagactgttgtgcatcacttttttattgactacgttgagagaaaaaatagttttcaagcattgacaatcagctcaattaaaatagttaaaatctcacatttttaatagcggtatccctttgtgaaatgtggtccggacctatctcgaaatatttttcaccactagtcacaatgaattagtactactaagacgtgaacatgaagattagtttcttgttatatttagttaaaatgactctctaatttaaaaattgaaaatattcttatttttagggtaaattttaacaatatttttccttactcttacactcgttagtgttctcttaaaatcacaccctacacatcttgaaaaatcgtgatatttcacagggacaaagccaaaaccgttgtgaatcacttttctactggacatgttaagagaaatagtagtttttcaaacacttaacaatcaatttaatcgaaaaagtaaaaaatctcacatttctaagtgaggtatacctttgtaaaatgtggcccgaaccaatctcgaaatatttttctccactagtcacaatgaatcaatactactaagacgtgaacatgaagattgatttcgcgttatatttagttaaaaaaaa

SEQ ID NO: 195759 - DNA, 1914 bp, Cannabis indica
attggaagaataaagtccagctatataaccagtgagtagtcacccatctaaatatatatgtacagatacatattcgaaacgattatgtattctcaatggaataaatctctcacaaatttaattccacacaaaattatgtatatatgtgctataattaagattgaatcagagaaatgaaaaattcccaacagcaaacacatatatatacacaataatcaatgattacattcaaagcaaatacatatatattcagcatgaatgtttaaccaaatatttcaaaagcaaataaaatgtaatgaaagatcaatatattctccacaactaatttagggatgttctttaagaacactgtaaaatttaatttagccctaatgaattcatgagaattaaacaatagcattattaattagcggaagcgtactggtatccatagaatcgacctttgattggtatgatcttccagtttgcatcaaaacctttctctaaaaaattttctcttggtgatggggatacaagagtgaaaacgatgcaaatagggaccattacctgttatattaccaacagacaaaattgttggtaacatttatttactatgtctatttggcccctcatcaaaataaaaattgtccttatggtatctacatattaaaatcatgacaatcatgcccttaagtcataaactttattccaaaatagaccacataaatttgacttatttatttgatgacccaacacacattttatatttataattgtgacctcaataaatttctaatatgtatctcttctcattaacttttaaattcctttttttagctatttgtaatcaataagacactatatttttggttcctgtacaattttagctgttgtactcgagaaattgttgaagatgcaattgttcctattgcttcataacattgtatatcatggctgccattatcgaaacatgtatcatgtgcttctttttcttgttgttttgtaacagccagtgtttccagctgtgaaaactagttggccaagtcctaagcccaagccatttacacacctgctcaatgacctgctgagagagacaacagtcgaaaaacaaatgagagttactctctactgctacatcacacaccgtacagaagatgttatcaagggtaacctaaaactgagcaaacttgtcccgagttaaaagctgggaattgattacttgccagaaaatgaatttatgcttcggcatgtttaaggagctccaaacacacttgctgaattcaaattgagtttggggaagactgttgttgtataacaaattagctttgaagtgtttctcaccagcccctaccttaacaatatcagcccgagtgaacttgtcccttaaatgacaaagttttctccaataccaactagtatcattctttaggttacaggtccaaactgaattattcttgagatagatatcattgacccataacacccaaagtaagtcacttttggaagaaatagcccaaatatatttagcaggaatggcttgattctatttaaccccatctttgaaacttaaaccaccataagtctttaggaggcacactttttcccaagaagccatatgaagtttacttctactcccatttcagccccaaaggaaccctttacaaagcttctcaacctcctttgtgatgttgtgaggcaatatgaagatgctcatccaatagtttcgaagcccaagtaaaacagagtaaatgagttgagcccttccagcaaacgagagatgcctggtagcccaagtatggagtctttgtttgattttcttgataatcacaccacaatctttagctttccattttgttggtcttagggggacccccaggtttttgagaggaaatattccttcaaggagaaccatttctgtcaacatagcctgtttgt

SEQ ID NO: 195760 - DNA, 1303 bp, Cannabis indica
agaacactactcaacaatagcatttgcaagaaaatagggaatggggccaagacatctatatggtttgatccatgggttccgtatggtaacacacgcccgacaccattaaagaatgcaactctgggtgtggcatgggtgaaacaattcataggcgcaaacaatcaatggaatgttcacatggtgcgggagtggtttgataagaacgatgctaatgcaattctcaacatcgatcttcctgaagatgatatgaatgacaattggttatggataggggaagcaagtgaaaacttttccataaaattggcttgccgattaatcacaaggagtacagagacaagtgggcttactccaacctagaaaacaatttggaactccaactcacatcaacgtttgaagttcctatggtggcaactcgctcgagactcctttctaacgaggggtgagctgtcatcctttatgaatcttccctctaactttttccctgtgtgtgatcaacaacaggagactaccttacacttattttggaagtgcaacttagacaaagcaatctggttccataccagatgaggaataaggactgagtgtgttacgttggataattggaatgattgggcactctggtttctaatggatgggaatagaccacctttttgatgaattcatgacaacaactctatgtatagtggaaactgtttggagggaaagaaataaaaaggtgcatggagctcctacaacaccactagtgtagctcattgagcagacccgtagaagagtggtggatcatactatggttgccaccaactgtctaaaggagctgaccccttggaaaccttcccttattggctgggtatgctgcaattcggatgtagcagtcactcatgatagctccatcttagcggctgtgatccgaaacgataagggataagggtgaggtttgtgccattaaaatacgcagaagttattggccctgaaattggagaagccttggctctttgtatggcggtagaacttgtggactcaatgggatatgaccaggccttattgcactgcgataacttgattgtcattaatgagttgaaaccacaggcgaaagcaagatctctcttcaaattggatgcagcaaggaatcgattcctcaagcgttgcagcaagctcaggagctgggatctcattcacactccaagaacctacaatttcattgctcataatattgctaaatgggcaaaattcacaaacattgttgggaacatcaatcgtctgaacttggggacaaaaattctagacgactatgtggagtggagcc

SEQ ID NO: 195761 - DNA, 1791 bp, Cannabis indica
ttggtgggggtatcagcggaggagcggcggcgagataactcgtagtcttcttccagacggcggcgctcggctctaacagcggctttgattccgtacctttccccaacgagtaactcccagcgaaaaatatgttggacactgttcatcatatcatcgagctcttcgtccctcatattagccagtgtcctaactgtgaaccctagctctgctattttagccaccgtgtagtacctgattccgtacgcgtggaacagttcttccaagccaccaagctcccttaccggcctagaagccgccgctgcgtaagccgccgccgccggcaccaactgcggtacccctaccgatgaaggagacactgctacccctcgtgggtcccacttgaaaaagctcgccgtgaaagtatcaggatccattctcacttgctattttgagcttgttctcttctcttccttttttttttcactattgggaacgttcttgtataaatataaataaaattattaagtttgtaacgatatttttctgggttaccgaaattacccccctaatttttttgattttggttgtaataaaaagaacaagaaaaaacaaataattattattataaagttctggagacagggttgtgctgaagcctgaaagcagctgctggtgatgttgctttgacagtggtggaaagtactccaactataacaataaaaacaaaacaatctaataattgtgggtcgggtcgtgattcgtgggtcccattacccaagagaggttttaatgccacgtcaccatcttcttagagtgttaattcttggttttgttttgttttgttcttactataaattttcgtcgctatcaatagttctatttggtgaaagagagaatatataagatgattaaagcaatgttgataaatggttttaggaatggagtgataccaatatcgtgaaatcacggtaagaatcaaaatgaggtaattttgaccgaaaattaaatgatgttataaaaagagagtgaaatagacattgatagttgaaaaattattattatatatgttggaatttgggattgtcaactcggggcttccccattcgacgattaacttagttgacgtagagactagtctacaagagatagcaagctatatagtgtgtattatgtattaaatagtaattaacaaaagtgactagctttcacctcaaatcttttcacgctgaaatgatactaccaaatgtttctattattaatattgttttcaattatgtgaaattttagaaagaaagggaaaaaaaaaaaaaataagtgttgtcatgagcattatcacggtgaaaataacatagaaattgccttttcaattgttaagtttctgtatgtatatgatactaaaatgagctaatcaaatatgtaaacaagcttgaagtagaaactagaaaacgacagttcaaatattataaattcgagcatatatattcaactatgtatgtgttgcgcgcagtgttccataaaataaaataaaaaactatattgcaatgcaattaactttttctagttttgaaaaagaaaaaaattactccttttttttaatttgtttcatattaggacaacattataatcccaactgtatttctacatatttagttagtctttaaattaatttctaagttttgtgccctctaatatttaagaaattttatgcatgataattaaataatatatttatctagctaatatggaattaatgaggattttgaagatatatgaagaccaatcatgtatataatttggttcaagggatcataa

SEQ ID NO: 195762 - DNA, 724 bp, Cannabis indica
agaagagaccccttaaatgtcgatgacatccaacttagcagcctcgcccactgtggaggatttggcattgagacagtcctgtgctgggcttagggtaaaagagtcacagtacttgtcatttcccacacaatataatgccttttggttcgtctgtgcatcatgcctaatcatgaacaaagagtcatctgtctcacctagcgcatcgtctaccataataaagttatggttattacgatcgagcctcgcgaatacatttttctctacgttttttatgcgtacattattctcgtggccaacaacatccatgagataaaaatatgcaagatttttattctcagggagtttatcgaatttcaaatacgccttattattctcaggattaacgtgtacgctgagataactattatctacaacttgaatgattttcactaatcttttggctcctgacattgttttgattgtttaatttttcaaaagactaaagggaattatatatatatatatttataattcaatttactcgatgaatattaatgagttctcatgtttactttcctacctatttatacactaattattgcacctagctaatttattttaatatacatatatacaaagactataaagacctatatataaaaatacacaccaaccaaccttgctattaatacattattaattcatatataaagactatatatgtatctatctcaagctagtcttt

SEQ ID NO: 195763 - DNA, 501 bp, Cannabis indica
caaaaaaaaaaaataagtattatctaaacaataatatttttatatagtagaagaggataagattgttctgataagagttttttttaaccaaatggaagaagatggcagaataatataatacagtttgagtaactatatataaatataatgagtggcctggcatagtcaataagtaattatggtgtggattattattattaataataattgttatgagattaacgtgatatatttattagaataattttatacaaaagggttaacaactattactttactttctttgattgcgacccacattttttttttctttaaaaaattaaataaaataaatataattattacggtttaaaagtgactagaaagaaggcatgttttaattttcaattggcctgtctttgtattttttttttttaaaaaaaagcttttataaataaaattgaaattagaccttatggtcgttacaaaaaatattaacagtagatatctctaccatgctcg

SEQ ID NO: 195764 - DNA, 677 bp, Cannabis indica
cactatacaagtgtataattaactttgagatatatataccctaattgatttattcctattatttttgtgggtctctggaatttgttggtatgatatgatcaatattcctcataatcgtacaatctaaatttggttctttttttatttttccttaaaaataattataaaatcattctttgtcttacatatatatcgttttccatttaacacaatatgctattgtttttttttttcataattatgtgctagtttttcttgggtaaagaataaattccaacttttcatttgtagttcatattttaaagaatctatatatctacattttcctttttgtcatttccttatcttcggacgtggaacatatataatttgcaaagagtgagttcagttccattccatgtgcttttcccaaaacgaaaagagttatagttgttttatattctctttccactttccaaattgtggaatttactccaaagattaatacataaataagaatcactaaagtccttaaaaaaacttcagtaatcagttattaattattaatagagaaacttataaaaataccattttagaaatttacaaatattgagacacgtaattttactatttatttattaatttacaaatatgtgttaattaaattacaaatactatattctagtaataaaaaaaaa

SEQ ID NO: 195765 - DNA, 1032 bp, Cannabis indica
tttttgtacgtatactttgcctggtagttgtgttgtagattctcgtttttgtactttccagatctcttattaatataatgtaataatttataatatatacatgcataaattaacattattagtgaaagagttattgcctacctttgaaagtattttatatatttagttctcattcaaattttcaagttaattatttcaaatgtttgtaactaaattaattggttgaaatggagtcaatagttctttcaaataccacaaattacaaaggaagataagtctgtctcaatgacagcacagaaaaacacaactagtttcagtcattacagtttgatactatttttttttttcaaagtctcgctccaaatattctaaatattctgattttctgaatctaaatattgggtaataataaaaaaaatcaaattagttttttttttttgaataacaaagaaacaattctattaaaaaggtgcaaagctaaaagatcaatacaaaagttgatggcctagccaagaaaatatgctaaatttattccagtacaaatttcattactcaaaatagcttgcaccaaagggacatagacaatgagagaaaattatcagatttgtttgccccaagcaaagacctaaggaggagaccttgcaacatgcatggctgtggattcgttaatgtcaaaaaaaaaacgtaaaataactcaaaacaatgaaagacaggtctttatacaaaaaaaaaaaaacaaaaacaaacaaacaaacaaacacaatgaaatacagctttgttaattaaaaaaaaaaaaaaaaaaacaacaatgaaatacagcttttacttccttatttattgggagaaactaaattactaagttgcaagttacaaaagtaccttttaagtttacaattttatgcaattatataactttctataacattttgtcatttataattaatgggacaataaaaatagtattttcccatactcaattatcttattcattcttactcaataaatcatattacaacttacaagtatatatac

SEQ ID NO: 195766 - DNA, 1689 bp, Cannabis indica
agttggtgggatttccagtttccgtacaaatgaattttgaaatcgactcccgtactacctttgtccttgcacagtactgatcgttggtggtgcgctcatccacggtggtcccgcctcatggctcagggtagtggcctgctaccctcaggtaccgttcaaggtgctttagggttttatacccttttcaggatagattttatccctatcaatatcattcttctgtcgtcatctttaacttggtgctctggtttttgctattttgctaagaaactgtctgctgggaaggttttttttctactaatggctaatcaagaacacagctcgattgatgatctggtggaggagactgagaacttcagtcttgatgactttgcgatccaggtggtccctgattctgctacggctcaggagacggcagcccgaacggtggtgggccgatttgtggctaagcggtgcgtttcgatcggaacgttgaggagggcgctttcgggtatgtggcgtgtttctcctgggtggcgtctgcaagaaccaaccccgagaacattcatatgtcgtttgaacagtcccaaagaagcaaagtttgtgctggaacatggtccttggaatccttgtgggggcttcctgctggtggcggctctccctgaagatggtgactggaaatccgcagatttgtcctcgctcgacatttgggtgaaagcttcgggggtccctatgccatttatgacagaggagtgtgtggccaacatggctaagcggatgggatctctgcttcaggctaataaggtgagccgtaatggcatgattttgaatcattatttacgttttcaagttcgaattaatattgcagtccccctcttggcgggagtgtctctaactgatgagaggaagaagagatggtggtgccactttaagtatgaacgtcttcccctgttttgtttcaaatgtggggtgattggtcatgaggaggaagcttgttccggtaggaagagaactgttacggttcatgatggtcgtaccattcctctttatggtccgtggcttagggaaggttcaaaactggaaaatggttttgctctgttagaggttgatgatattcatgacattaataggttggagaaggaagacccggttggtgtgggtgttgggggtgggtcggctagtgatgttggtactaatgttaacccgccggaggtggcgaatgtctcggttggaaccactagagtagagagggaaggtatggaaggtgttgtatcccagaagtcagaccaagcttttgctgtggcttacaatgattatgtggatgtgtctaaattccctacccctcatgtgatgcatgtggcaaacattttcaaagaaaagttgggctcggttagatttggggtagaccgtgaggatgggccggtgttggctaagttgggaggtgcccatgcccttagtaaacccaagttggttggtcctaaaggagtgcctcggccaccggtgttcggtcggagtttcgacaagttgagtgggtccaagaggaagcatggtaccgggaagacaactcggaaaaatgagtttgttggagaaagtcaaggacaaacttgtatccttgtggtggataaaacaggggtcccgaatgtctttggcgcagctagtggagtcaatcaaagtgaaaattcagtaggaggggaagagggtgaagactct

SEQ ID NO: 195767 - DNA, 671 bp, Cannabis indica
tcgataactattatatgaagatcattaaaaaatatgttttgtgagtaaattaaagtccttttggcagaagctacaaaaaaaccgaaagagtttaaggactcatgttaaaatggaagattgtttgttactatagatgattgatgttgtttgttgtgttgtgttgtgtttgtttaggaatgaaaacaataaaaggagcattggcaatgccattgatgatagaaggattcaagaagggtgtcatcaaattctccatcatcacatgtcgcaaacctcctctttcctcatcatcctaatctctatcaaaaagaaaaaattattattatttagggaatgggataactacagaactatcactatgatttttatgactattcagatgaattattatcattgttattctaaaattacatatttttgaaatggagaaaacaaaacccaaccaaggtttcccacaccacactcaacactcccacacaatacacatgcaatgcaatgcaccattttcttttccttttctttttccttttccttttgaaagtagaataatttagaagtgtactagactttcatttcatttgtccaatgatagtaatagttgagaattgttagaggcttagagcacaccaatagtgcttaatatctaagatagcgtttggttggaggtgatgaaa

SEQ ID NO: 195768 - DNA, 586 bp, Cannabis indica
actttggcttttgtgaagaaaggttaaactcgtactaaaattcaggtgatgatttcacgttaaaagatcatagggtgtgaaacatcacaaggtttttcaaagacttcaagcagtccttctcttctatgaaggagtgttgaagacgtatcaaacccccagtgatctttcacgcacaaaaaaaccacgtgactcgcacgaattatgatgaattttatgtggcgaactttggttttcaagaagaaaggctaaagtcacattaaaattgaagctatgaattcatgttaaaagaccaaagggtgtgaaacattagtgggcgtgtggcagacttcaatcagtccatctctactgggtaggagggttgaagacgtatagaacccccaatgatctttcacgcacagaaaaacaacatgcctgtgagaatcatgttgaattttatgtcgcggactttggtttcatgaagaaatggtaaactagcactaaaattcaatcgatgatttcgcgttaaatgaccaaagggtatgaaacatcattgggcgtgtcagaaacttcaactagtccttctgttccagaaaagagggttgaagac

SEQ ID NO: 195769 - DNA, 1863 bp, Cannabis indica
atttcttcttgagcgttaatctagttttttatagtaactgagagctatgaagtcaaaaaatttctatacttaaaataaaaaaatatacaaaaaatatatcttcttacactacatcaaaaaaaatatattttaataaaaaaattataggttaaactctaactttttttttttttccgaaacaactcttatttttaatttttttttctagcaaaataaaacaacgtaatgtaataacaatttttcttttacttagaataaaaaaaataagtaataaaaatttaatttttttaattaatacttttgtcaagtaccaattaagattgtaaatttttttattttttttaattttaaaaaataaatagtgtgctcttgcacactttctagtacatattttcttttacaagatcacattcacaaccatgttattattgtcacatatattcgatgtcaatcaatgttattatgattgtcaatatattattattattatccttaatactatttaagtttggtgagaaaagagtgtctgcatctagaaagacaaagaaagaacattctcttttgctctggcaagaaacaaatattcttgattgatcgaaattctaaagcatggaggagatgccccaaatctatatcccaaaagtcaaattgggtagccatggattagaggtaatacttatttttctccttaattaacccatttcatttatctaataaggcttagcgggatattattaattttggtcaacgaccatcatcaacaaacaatatcagttcatattcttaaaaacataaatatcagattatcagtatctgttctactcccacttttatgtaggttatatattcacttatgcagcttttggttgccactctacattggaaaaatttggttaattctttcttggatctatcattgaaactaataggaactgaatcattgtgacaaaatctttatccttaatacactgtttagtctaatagatttaggaagtgggcaatagaaaaaaaaaaaaatgatcttaatgggttctttattttgaggcttttcaggtatctagactaggttttggatgtggtggactatctggaatatacaacactcctctctctcatgaagctggttgttctgttattaagcaagcattcgacatgggtatcacattctttgatacttcagatatttatggtcaaaaccatgataatgaattcatggttgggaaggtaacatttcattttcattttatgctctataatcacttgaaagattaacacagcagatattgctatccatcattgaaactatagtttgagacatgtttgcttttaagagaaacattccacatccaaatgagaatattattacattcaaaattcaaataagatcccttactcaactttttaattagttttgaaatggaattccatgaatcttatgatagtatcaagctccaataactcaaaagagcatccgtttaaaacaatagtgagctaaagatttatgcttgagatttaaagtacactataatatcatttgaaagagtaaatattggagccgatcatgtttgccatttcatttgaaatgaaatatttagtgtacggtctaactttatatcaacctttcttgtatctccaggctttaaaacagcttcctcgggaaaaagttcaattggctactaaatttggtatcatgatgtcagagggatttcaatttggtgtaaaagggaccccagaatatgtgagaaaatgctgtgaagcaagtcttcagcgccttggtgttgattacattgatctgtattatcagcaccgtgtcgatacttcggtgccaattgaggatactgtaagctgaagaggagaccattc

SEQ ID NO: 195770 - DNA, 1593 bp, Cannabis indica
aaacacattaaaatctcgagtcaaagcgtgaaaagtttcaatttaaataacccttttgacgaagaagtgtctgttataattgaatcagctccaaacttagcatcactttgttatataggtaatatcaaattgaaagtatcaatggcgtcgtctaatttgttgaatggaacattcgtaattcttgagaggcatgagaagtatgacggagattggtttatcaatttgataaattttcttttgaatcttaattgttcatggaatagggtaagcctgcatgttgactcagttgaggtatgttgttaattgtcttatttaagtataagggtgtttcaaacagattactttattagtgtattttatatttaacttgttttcttaattttatacttgtaggctcttatcatgccagaaaatttcaagaagatatgtcgttctcatttgcttaattgggagcatcttagagtttttactgaacgccaaccagagagacattcagacttgcgagatgccctgcagtggatttctccttctttaaagacattatcaatagagaaagggaaatcttttaaaaactttgaatttaattataggtgactgactaccttctatatgttttccgttctaatagtactcattttgagatttgtatgtagttaagactaatgaatttgcatcagaatgggatttaattttcttatatttggttgtgaatgagtagcttgaatacttgaacttgaaaaatgtagattttgtttctatatttcactgcagtttttgccaaggaaacttgacctttaaaatttgttcttggaatattctgatatctgcttaggaaaaccaataaaagtgtatgttgtgatactttctatgcctatgttgttacaatgggttcttggcaatttgaagtcactgttttcttactttagcaaatttgaagattgatttggatatcccatattgtaatagagagatccaaaaaaaaatgaataggagaaaaacatgagaataaacaaggtacatgactacatgttatgttagtgtggttagattaagagccattgagtcaacactttaagtatagattctcattaactcgactttgtttatatcctgtataactctgtttatacaaacaggaattaattcattggaataaaagtgtgatattcaatctctctataactaatcctctcttttgaatgaaaccctcctcacttagccaagtcctcaccccttcaagagattttccctatgtttttgttgaaccaagagaaatttgcatctacatgtaaggatgatgacttactattgtctttttcttttcttttttttaagaaatttatttctggattctatttgttactcttgtacactgattcttggaaaattcaaaatctttgtcatatgaatccaaggaaaatattatgactttttttttggaccctttttgagatatgacccaattgtaactgacttttagatttagattattatgaagaggagaacatgcaaaattggtaaagaaacaattagtgggtttctatgtatataataagtaaaattctattgagaggcaaaatatgtttggaagtg

SEQ ID NO: 195771 - DNA, 2439 bp, Cannabis indica
ttacattaatatatataccttacagcttacaccgagatagtttatcttctcactaaaattagtgtctaacaaagaaaatttattataaaattgtgttccttctaaactccaatcattataatcatctaatgagagagaaaatattttaacttcatcaattaaaatcaccaaacaaacaaagtctgtcaccaagtttttttattcgttattttttgataaaaattctgacaccaaaatctctaaaaaaaaaatatctataatacttctccttattatggtaatttttttggcagttattattattttgtttttttgaatcctttttagagttaatagggatatatgtaccatatatttaataaataattttccttagaacaagtaattttctttatattaatatcatgaaattattaaaaaaaataatataaaaggaattaattaattattgatattaaatataagagtgacatataatgaaaaaaaatatctatatgtacagacatttttcatgactctacttaagtattttttaatatgttattatatgaattatgtcaaattattgataatagtgagaatttagtggtttggcgaaaggtcccagttgattagagttttagtgggtgtcgtaccgcgttataattgatgagtagtcaggaaatttttactctactattaaatttatttttgtttaaaccaaaagtactcctgatgacgtaaaacatcaatatttaatatgtggcaagaaagataacatcctggaattgagtagtctcgagtcatagcaagtcgacctgggaagggtccataaccttatgcccaggttgactttgagaactctggaatggaagtttggacttcgataaccttttttcaactcactgtcttttagtgttttgtactgtgaagacatggagcaaccaaatccttatgcctcgggagctgaaattacatgaacatgcaccctagaattcaacctgggcacctagggtttcactcaaagtttagattgacatcataactaaggtttcaattttcagaatcgtcttagtgcaaatgggtcaaactttgcattgaaacatgaacaaggcataccatggacatatttgaggcatcagattcgaagaaagtttattttgagtacccggagcacccagtgcccagagacctagagccaaggttgacaatttgtcaatttgggcaactttcaagtataagatcaaaaatctgactcgtgcatcgattcttcgtcttcatcaaaaacggggaaacaagtacttttggggaagtaacaacacttcctaggtgccagaagtaaggcccaatgccaagcttgacacctggggctagcctagcgtctaggttgacattttgtcaacctgggccgattccaaggatgtttaccgagaacatttttgggcttgttctctgttttaacacaaattaagattcaactatttttggagaccaaacaaaattttaaggaggccaaaagtgggacccagcggccaggttaacacatggcactgggctagttctaattagtttctcgaaaaagtgtttcaggcttttttctgtcatcagaaataataaagatgtaagcaaactcaaggagaaaaccacaaactcgagggtctcaaagctgagcctaacgcccaggttgacaatcaacctagtgcatcagtttcgatcattcaaatgccaaatctaatctgagtattctatttaaaatggtaaaaaatagggtaggagacctcgtcttaaagttaaagaaccttggaagtatcaaaactacatccatgaagctccgaaataatgagtacccaaggcctaggttgacaaatggcctggtgcactgggttccacttatccgtatatgatttcattttgaccgttcatctagttatttagaataactaagatctaagtcagagaattcaaatttacaacttcgcatctcgcatttctaacataggaaaaactacttggaaatgaagagtttcgagtctctcatttttatagaacaacaacatctccgagaataggtgactagcttcgccaaaatacagaaacagactaagtgatgtcaaaatatcacttaagcatcaaaaagtacatccctaggacaatttcccactcacccagcgtccaggttgacgtcatatgtcgacctgggtactgggatgtcaacttgggcgcggatgttaacctggacgctgggttataaactgtcttcattaaaacgtccataattcactcaatatttatctgattgacacaattcaatttacatttcgaagatatttcaatgctttatcaagtcatgtctcatacttcaattgcaattatgaagttatcgatctcaaattttatcccaaggaagttacgaaaataagttccgacttacctgaagcaagtttcgccgccgcgatgcgg

SEQ ID NO: 195772 - DNA, 3852 bp, Cannabis indica
agagaaagtcaatgatcctcatatttttttgttcccttatcttctaatttgcaagttgataatcacaaacaattgtcattgaaaaaagtcataatgacaagacttaaccctcgtttagaggccacagatggtttggaacacaaaccaaatattaattattcaacaaacactgacagttgaaaacacatacgttggttgggaggaaaaaaaattgataaaaaaattattaaatttttttcataattcattggaatggtctttccttccatttcaaaatgtaattatcattctaccaaaatggtagaaaggccattccattggaatgacattccaacattttaatatgcaaccaaataaaggaatggaatagagattgtttccttttctttccattctatttcattacctccaactaaacgccacctaaatgttgatgtgatttgctctcaatctgcacaatgtattcattcatagcaaatatttgaatatatctatgcaaagatgtcttcttcaatttgaaaattactagtgcatctgatcatgtaataaatttgaatatttttatgcaaagttactatgcatctttctttcttttgctgttttttcaatggttatattattaaaaactgaatattttaatgcaaagttacttcataatcattgtcatgaaagatgtcaactctttattggatcttctcgtttatattcctcaaatcaattaaatacaaaaagttgtaaatgtagacatgaaaaagtgttcacatagaaattgtctttttttgatagtaacacaagtttccatggattcagaatgatcatctaattccatggagttcacatcttgaaaaagtaccacattaaggtatgaatttcacttcctttgtgatgatgaatttattaactctctttgcattgcacatccagtgtttgataaatacattttcttatattttctcaacattttcttataccatcaagtcaatactagactgattgcataacaaagttgttttcaaatattgatggataattatacaaaaagaaaaactgaaactagctaccacattatatgaattgagaacatgaactattgcataaaattttgaatctatattgagcttataaatgaggatgggtctggaggaactgagacttcaatagtcccttcaagcatgagaataactttcttcattgtgggtctaagtgatggatcctcttggatacaccataatgcaaccatcacatatttctccacccttttcatgtcttgtgatgcttcatcatcattctcaactagaaaatcgagtttcccacctgcatagcaatcatatgcccagtcacccaatatcatctagggcatcatcctctacatgttcttcaacattctttctgcagcaaatgagctctaacaacaaaattccatagctgtatacatccaccttgactgtgacaggcatatttctaaaccattcgggagctacatatcctttggttcctcttataccagtagtggttcgagtctggtcggtcttcaacatcttggctagtccgaaatcagaaatccttgcagtgtaagagtcatctagtaagatgttttgaggcttgatgtcacaatgtaggatttgggtgctgcattcttcatgcaagtaaaatagccctcttgcaatccccaatgcaatgttcattctttggtaccactttggcttatttgatggtccaaaaagaaagcttgctagtgatccattactcatatattcgtagataagaagccggtgctgcccctcattacagaacccaattagctgcaccaaattcttatgattcgtacgaccaatagcagttacttccgccttgaattcttgctcattttctttcaccatgtgctccaacttcttgacagcaaccaaacattggatgtcatcaaatgaaagaacccctttgaagacactagcaaaagcaccctttcctagtagctccttgaaaccattggtggccttttctagtttcgcataagtgaaaatttgcaaatttatttctggtatgaaagtattttgcttattcacctttgatttttgataaagcgaaaaagaacaaaaaggaatgctgcaagttgaaggacattaataaaagctgagctgcttaaaagtattgatccaatgagtactagtgtagattgatctttcgtatttgaatttgcgcctcctgtcattgaagtagaattgcgaattcttacttttataagagctttccctgcaaaagtgggatctatcctcccatttgagaaaggacttcttttcttgtaacattcaattcctctaaaaatggcaataagacaaaagcaatcatctaggcaagacttcctgcaccagtcttcagtcaccccttcaaaatactcgaattcttgagataaagaccagtctgtgttttccatgctaataattttaaaattatcaacatctcccgagtcttcatcacaactttgagcttcaaatgtctgtatgcagcctttcatcttatcatttggatcaatgaaagtgtaaccagttgggcaatggcaatttggtttctgatcaattcctatcacacagtagctattgtacccacaagctccacttcctaatagtcctagcatactttgacatatattggaaggtatggaggttgatgattgagtccatgccatgctccacccactagagtttccatcattctttttcgggtacacatattgcctaaaaacaccatcatattcaagaattgccctttggtagaaatcttgtgctgcattaccaattgatgataacatgtttagtatggtaccattctttgcttcaaggtatatatagcctgattgattgaagatgagttgaaagccttcgttttcagttttgatatcccaataagcgaaatatggagtgtcacgtgggaaacttcttgtgtaaagctttagatctccatctgactgtagtatgaaatggaatcttccacttgaataatttgtttccgaatagcgagcaacaagcttcttgttttgactcagagtttgtcccaccaacaatgtgtctgttggttcattgaaactctcccacaaattggttttgttgttgtttgctaggacaagattacctgtgtctaacacagccccataagcaacatcagccacagcaggactccaaacctcgttgcctttgtgatcattgagaacaagcccaagttttgtcaactcaactttggatccttcctgcacaagattaccatcattggctgaccagacaatagttttctcaggtattttattgaaccaaatggctagtaggaagccaccttttccaatctgctgaaaaccgaaagcaaaatcaccagatgacgattcccataacaagtttttgtttttggatgcaatgagagatgatcctacagatatgtttctttgagtttgagcagtggaggagcatagcaacatcactagaagaagaaagaagcatatagtaacatatggtgatgataaagccatggttttacagtaagtttcttaagtattatgatatgtatatatcatatgacttattatatcatgtattatcatctcaacaaaacctctgaaatcataatttaatgagaagatttgaatagtatgagctaacatgatttgtttagacatagtaaatgatttgattaatattctgccaaatgtcattttaatacaaaatcttcaatataatgaatttatattatattggggaaagtcaaaattcaatggtaatataattattctttttaaaaacaatatattgacttttaagtccccatatcatttttttgctgttgatttttttttgtttctactatgtt

SEQ ID NO: 195773 - DNA, 1600 bp, Cannabis indica
gggtccatttcttcatttttcgtaaacactggctaaggctttaggaaatattattagggagtttatagaagtgtttgaagactctttttttgagggttggggtccatttcttcatttttcgtgttcgaatggacataaggaagcctttgctttgtgtcggcatgattacttttccaaaaatcaaggatgaattttgttatgaacgtctacaagattattgtatggaatatggtaaaattgggcatgtctttaacaaatgtcaagtgcatcttgaaaatatggataatggtattgaatcttaattggcttatcgacctagtctcaaaagatttgttctaccaacttctagttatgattgcgatagaacagacttgtccaaaggaaatgtgtggcctctcttgacttgcttggtaagaacttcgctatctgctaccattccgcaactacagtcaaggcctttttctcatcctaggcccctattacatggtgaatcttctaaccaacagcaagaagttcaacagtcgacaatggatacagggactgtttctcttccgaatttcactccatcatctcttggacaatcatccttctcgacaataaattcaccaacagtaacaacatcaaatgttactactgttatttctccacaaagtgagatggaaaatgaaccaaatgatactatagtagctaatttatctggtgttttcattcaagatattgggaacttcaatatgtcagtggacacttcaatatcattgtcggagggaaccttcgacttaaaaatttccccttaccctaaaaaattttaaaaacaaacttatatcaacaataaaacaactgtagaaagcataaaaaatcaagtatataataccaaacactaaataataagtactaaacaacaaaataataaaattattaaaaattcgagagtgattaacaaaatcaaaaattaaaaactgttagggacaatctacgaacaaaaaccctaaaacaaaaataaaacaacaaatttcacaaatgcaaaaactagattgaaaacacacacaacaaaatacataaacaacatcatgatgattaaaaaagttccattacctacccacccgcataaaaagtcgagataaatacctttataaccttctttaactcaaaatttcatcttcttgctcaaaatcagagtctgaaacttcaatgatagctttagaacatttggatttcctcatttccatagaatcacttactaactttattttgaaagaaataggggatgtagggctaaggggatcatcattataatttttcttcttagcaatacctttcttacccattgtcgacctcttaaaatttttttgaggagctttacgagatttttttacgattggggaagaagagcaagaacgagtcacacccattgataggtcggacaactatttataggggaacaatgatcaaataaagaggaaaaaaagagaggcaaaatgatttttggaaaggaaataactaaatcgaggtgaaatgcagtccaaaatttagcaaccttttctaatttcctttcaatcagggatgaaattttcaaacaaaaaaaggaaaagaaaaattgaaa

SEQ ID NO: 195774 - DNA, 1198 bp, Cannabis indica
acaaatattctagaaatgtgtaggacattttaacagtaattgatattttcttatctgagacaacttttttgaaacactttgacggtaaaacaccatttgaggaattagaatcagtcgatttcaatcacggggtcaattgtaataatattgtaatctgttgtaaaagtggttttgtaaatatccttttgcgctttgaactcgaatcagagcaagtgcgcaaatttgcaagccctgaaaatggagaaagtcttcctcttatgcttattggggcctccaaaggcaatatccatgtattatgtgaatgtaaaaatattagtgaaaatacaaaatattgtgtttacgagatgaaaaaagattacttagaatgaattatcaaatacctatttgatttagatggagtggcaatcacttaccttgtgatgagacagctacccaactcacccatctgaatagttttacatatttaaagtactttccattgttgtagctaaaaaggatgaagactcattcttgatctcatataactgggaaacttattcgttatattttgaacgacaagtcatttaggacacttcatgtttttgatcccaatgtatattatacttatgtagacgcagaagaatctatgacaatgcttgagtgacgctgtgaaaagtttaacatgttaaattaaggagcattaatccaataagaagttatatcgatcattctaagtcatgtctggaatgaacattaatgaatatttttattaggaaattattgtaattttgtatttctattgtgtgattgtaataatatagctgttcaatttgtaaagatgtccacaactaaattaacaactaagtcaaacatgcaatcatcaaagaagaaaaccgtaatctaaaacattgtttagaatttccaaaacataaagattaattgatgaagatgaagaactttgggagggcgaaggatttggagaatggattcgaatttcgtgtgtcggtcgtaaaaaaatccttgccgaaaaaggtttctctaggtgcacaaccctgattcgaagggagcgagtttagtttatgagggcttcaatctcggcttgaagatctagtggttctaacggtgttgaggaatcaatggtgatagatggggatggtgctccctgggtattctcgtgtatgaatccaaagaagaagatgaagacactcgtcgaagtaat

SEQ ID NO: 195775 - DNA, 513 bp, Cannabis indica
aaagtccaggcttcatgaataaccaattaattcaaattaattaattatttgagttttaaaatcctggaggtaagtaacacttattaaaaaaattctaaaaaacggttgttaaaatttcaagattcaggtcgttggaaccgtgttccaaggaataaataaaaataatttgttaaaaataaaagtcaattctaagcattaatcaaaagtttgaaggttcagacttttggaaccagaaccttaggaagctaaaaataaaattaaaacttagtgaaaccaagattcaatagataaaactacaagtatttaaagagtaaaaagtatgaaaatgtcctaaataaatttacatacataaaagccccgcggcaaaggcataatattgtctctgcgttcgcgaaaagggagatccttatccacccaaagattagtaaagaaaagaagaatgatagcgtgagttttgttagagtttgatcatggcaaggttgaatcagtccgttgctgggtattctctggatg

SEQ ID NO: 195776 - DNA, 718 bp, Cannabis indica
tgattaatagaacaaaaaaaaagtattcttcaactttttcctgagtgaccaaaagcctgcaaaacaaaatgtggtttcactcaagtggtgtcacttgacttggactacatacaaatagcattatcactcattatttgaatgttttaattagaaaatttaatttttcatgcatatattaagctaaaattttgaacttaaaacttaaatttaacactataggtaatgtaggctaattttttatttttaatctaaaaatacccctcctatttcaagactcgcccaaaactcatgtccctcattttctgtcttgtctctttccctccttctcgtctccacccaaacttgtgtccccttccattatggcagcatcactgtcacccaccaaagaaaaagccactgagattgagacccataaaccgaagaaaccaccaagattctttttcgctattgttgtttagatgttcgatatgtgatttttttttttgttgtttttggcttattatttttaataaaaaaaccaagttttggtgaaatttgtgttttctgggttctctgtgtttttttttttgtatatggtacgatagggtatgatagggtatgatagggtacgatagtggtgtaatatggaggttagagatgaaggttcgatagagtacgatagtagatatagagtacgatatggtacaatagtgttctgatagttgcttaaaatttatgc

SEQ ID NO: 195777 - DNA, 1554 bp, Cannabis indica
ttctctgtttgcaaattcaaagtaactgacgtgaattgggacaaataatttaattatttcaataactttaaatatttaaaattacaaaaataaattgaaaaaaaataacaaaagcgtattatgagtgcagtcaacagactaattcataatttacttaccacttccacaacgattcttatataaatttcctatatatccaaagatgtgaatgtcctagagattaatttctattttctattttattttatagactgtaattaaggggcttccatattattttgcttctgatgaaattgagctggtacagtcatattaaacgttatttaggagtgaagagttgaggtggtctctcataagattaaggtgttaatatatatagtttagacgtattaattattatcacgtgtctataaatatatatatattcgtacgaagtctctcttccccattcaatcattttccctctcacatttctcccaaacctaataaattaatatctccaacgttgaatctcttgacctggggcgacatgaacaactccagctccaactccgaccacaacattattccgatgtttggtcccgatcaccacaatgatgagttctatgatcaagaatctcaagaacctccacagtcaacaactactcatcatcttcatcatcttcttcttgtactgcttctacagcaataattgacccgtttagccgtgggatcttctatgctgcattccgccatttctggtccaaacaaagacaagaaatacgtaacaaccccttcgagtttctccggtcgtatctccagcgctatgcatttgtctatgcattcaaactatattctataactattgaatttgagaaatacactcctgctgaagatcaaatattatctcttgttataggcaaattaaaatcattcatacaaaaatcaaagaggaaaccctcattcgaatcgaacgtggacaacctgacgagtaaggctgtggaggagaagacctcaaatatttgcagtgtgtgtttggaaaatttcaaaataggcgaggatatgaccaggttaatatgcggtcatgtgtaccataagagttgtgtactcgagtggtctcaccgctccggtcaatgccccatgtgtcggaaggagttgttgcagccagtgataaatgtcgcagttgaagttcacgtccgttgtgactgtgataatgatggtaatggcgatggttgtttcgactatcattcttttatgaaaattgaagatattagcccagaaaagattactattttggcacgatttgatgcagataagaaacttactgccactctttattttccccaatggaaacccaagagacacggaaatggtaattaatattaatttttgttattatattggaatattactaatttaattatatatatatgtttttgatatctcatgcatatatatgctgctacatccttattttattcttcaattgtgcttgctattaatcttgtagttagtattgttgtagttaagagatcaagtctatatatatagacttcatttgtgactccatgatat

SEQ ID NO: 195778 - DNA, 936 bp, Cannabis indica
attacaattagatatttgcatctcgacaactatattgggttaataaaaatatactgcaaccagatcaaatagaccgatgtacattcctactaaaatttctattttttcttattttactttcaaacttttatatcataccatatatcaggttctctatttttttttttatctacatcacttaaatattatatttttaagatatatgtttatcattttaaatattgaataataatttatacacatataaaataaataaaaacaataatagagtaactttagggcaataaatagtgttaccttatatatggagaagtattattcattgctttaaaaaataactatataaaaatatatatatatatatatttatatatatataaaatagctcacttgatgtatgttattatttttaactattttcttttttattttgaagaaaatctcatttcaaaagagctaatgtgagtctccaagagaggtagaaaaatccttctcaagaatgctccataaaataaaaaattatgtttttaatttaatttttttttttggatgctagaaattataacttgtaccgaaaaaatattgagaaactatatttaaaatttatccaaacactttcaaaagatttttttttattaaaatgtataacttttttataataattatataaacaaaaatataagttaaaaatatttttgagtaatgttgcatgtgaggattgaaatgggctcatgattcacatggtgaatgaagactggttgtcaaacctacttgtaggcctgataacgagtcttcaaccttatgaataaggaaccctcttttaatggagaatttttttgatgaataccctaaaattgctactattttagtgtttatgttctgtgtatattgagaaactatgaattatatgtatatataataatatgtattatattt

SEQ ID NO: 195779 - DNA, 1768 bp, Cannabis indica
gatatgaataaaattatctttatcaaatatattttttactataaagacctaatttatatcataacgattagtttgactgaaattttaagtaatcatgaactcgtgttcatgttattaatttctttgattcactcgttaaagtttcttagagaagatgattcatacaacttctgttttaggaatctaataatgtggatagttggaacatgatctacaattatgaaatcttgatttttataacggatcgaatgttggtttactttaattgttaattctgaaattgaaaagttgtgcataaatttagatgagatctaaattatactttcactagtaaattaacagtactaaaggataaagaagtaattagaagggtaaaatgatattttgaccaaaactacttacgaacgaacacaaggagggctaaacattggaattgattatattgatggacattgcagtaaaactcagtaaatataattctataattactaagagttcaattccatatttatagtggagtaatcttaaaattaataaataaagattatttgattgatgagactgaataaataacctagtttattggagtttagaattattagttgtataatattgttcgaaaaaatctattttgagatagtaattatttatttttttgaatatggaacatcataacaacgaaaaggaatgaaacggttagagcgcctgtatgagctgataggaagatcatagcggtcgctatcgcaggaggctctcttcggatctcttcctcgtaattaaataggtaaagacaaaaattgtcaagacaataattgttaagataaaagttgtcaggaaaaagacactattcttgtctcaattgagacatggtaggcacctaccttatagtagagtgttcctattgattttatctttttgggttaattaattcaattagaaaaatatttgaatttgaaaagtggttaaagatatttcaaattggttgagatatttcttcaaagttagttgagatattctctcaagagatccctgatatatcagtaactgaatttgattacagattttgaataataaaatatgatttaattaatggagaattaactactataaatgaagcctgattttagacactagaaaataatttttcacatgttattttcaaaataccaaggagaaaataaaaactgtttttctttgagaattaatcaagaacaaaattatacactttattctaatagcccacattattctttgtgtgtgctgcatcgatttggaagattgcgatgtgagtttttaatcaaccaaaaggattcaatttacgagaaattttgaggatatcctgatagtcatcaagaggtacatattattttcatgtaatttatgtttttatttaatgtttatacatctggagatatattaggctatggtacaatgataattaaatttacgaatatttcgctgcgtacttgatttagtaccataaaactaccataacatatatttgtcacattttaatctatattatattattgaataatataacactctctgtttaatctaagtctctaacgacccccattccccatttttttctcgacagtggttgttcatctcgatccttaggtgaaattgcttctccttgtcatgcaggttctaataacctaggccccaatattatttccttcaactgctctggtctgagaccaattacataaggactaggctcttcctttcagtccaatatatgtaatttaaatgtgtcacaatc

SEQ ID NO: 195780 - DNA, 525 bp, Cannabis indica
taattttcattaataaagaaaatggttgagaagagaatgtatgaaagtgagctacttacaacaccatcgctgaataaatgtttaaagagacgatttagaattaaggcatcagcaacatcagtcacctaaaaagagagcatagtaaagaaatgtgttaccaacaactgaataattttttcaaaaagtaaataaatattaggcggaaaaaaggacagaaaagtgttattttctggaataccatgaattcatccagacatagtaaaatagcttcatcagaaatctctgctgaaacaacttcaagtggatctgccacacctctgtgcttctgtgatgatgaaaaagttccacaataaactaagcatcagcatcataattgttcggcttatacaaaatattcaaactaagatgtactcaagatttagaatgttgtgcaaagtttaaaccattttgcttagcacagcctataaactattaacttatcaaaacatgtcaaccggtttattgaatgaaaacccacaactcaaa

SEQ ID NO: 195781 - DNA, 784 bp, Cannabis indica
ggcaatgtggaggatgatgaggattcttgaatggtcatatttaatggcaaagggagtgaaacctgagacaacttcggtatagcagcagtgaaggaatttttggcaagtctagtcattaatggccatgctccacctttgaaaaaatctgttctataacgatcatatccagagtcaggaagaggagagccaatcattgctggaccatattcaagagaagggtcatcgccattgtatacttgttcaagaaacttatgacatgaatcaaaaggatgtccaatggtaccacattcaaagcaaaactcgggtaatcgctcataacgaaattccaaccaaaattcatcaagtgaatccttgagtttcaccattttccctctgagtaatggcttagaaatgtcgagtatagcacgaaaccgaagaaaaggaccccatccctcgttcaaagagtcctcatggacatcaacataagtgccaaggagattacctgcccattcggccatggctttagtcttacttaaaaaaggtctatggagttgtatccaaaaaggggtaagaatcatagatgcaggtgtaggtgtttgaagggcagtgggggatgatagcacaatgagatgattttggaaatgccatggttccaacaggagtactttcttaagatcaccaaggcaaccaaaagtgacaaggaagagaccggagtgatgatcagtaatagtagccgagtattggcctttccaaaagccacccatcttgattctgaaggttttcctattgatatctctggaggaaa

SEQ ID NO: 195782 - DNA, 1560 bp, Cannabis indica
cccacctcatgataaacctatataaattatgatatgattatgtgctgatagaacacctttcaggttaagggaatcttccgtggaggtggtgcaacattgctgagggaatccattggaaatgcagcctttttcagtgtttacgagtatgttcgctatcacatgcattcacaactgaattctgcttcatctgataacagcaacttaattgacgtgggagttggaattatcagtggtggtcttggtggtatagcggtatgcatcttcatgacttagcctttttctaaaaataaaaagcaaaagatatcacatatttctatctgttttactagaactttcaagctaaagaatctctttgggtttcttcaccagttttggtctgctgtcttgcccttggatgtggctaaaaccataatccagacttccccagataagaacacaacacgaaatccctttcaaatcttgaattcagtaagtattttctgctggcatgataacacatccttttttcctgttctcttatactaagagttaatagactaataagcaagggtgggcattggtttatttgtgttagatttacagaagagatggaatcaaaggatgttatacaggtttaggtcccacaatatgccgtgcatttcctgctaacgcagcagctattgtcacctgggagctagccataaaacttctcggcctcaatcgtaattgataacaatattcgaccatatgccagttagttactctctctatatataaagctcatctaacctgttttttgattcttaaaaactctaaaacatttgttagttttccgcttagaatatatttgatccacaaattgttgagttaaaagggtttgttaagctgaagctagctcttttcttcatacattagatatacaatttttgaaaaaagattatttgtagtattttcatgaggagattaataagactatctggagttttctgacttgagcattgaaatggaagtttttagtcttagtgaagaggatttctcatactgacgatttttgcattgtataacactcaagtttttagtctctgcttctcgttgacgcttcttcctcttttgtatgaactaaaatgttagacattaataaataaagggctcgtttataacgttgtattaggtcgtattgtattgtattgtattttacaatataatacaatacaatacgacctatttaaaactatatgtggtactaatttttatggacacctaaatatataatattttagtataaattaaagtttaacatagtattatataaaaatatgatatatataatctaattcaatataatacaatacttcctactacgacgttccaaacgagtctaaaaaaatttaaaaatgatacaaaaaatgtccttatttatttggccgtgacaccccgtgcccttgtttggtttactatgatattgggctttattaaattttttgcgataatcaaggggcagatgtacacttaaggctatagtggccatggccccctagaaaatatacacttacattaattttttaacaaatttatattatg

SEQ ID NO: 195783 - DNA, 1250 bp, Cannabis indica
atacctcctggtacaacaactctcagccaaacacttcagctaccaaaagcacaatggagatagaacatctattggctacaaaatgttgtacaagaagggactgaacttgttaaatgaaggaccaagtgaatccgcatcaggtgccaaactatcatttgttactgctgttggaagcagtagcagagatggatttgaagaagcatcacttgaagccagtaaagctgagaaaccaaaaaggtcatctagtgaaaagagtgcaaacatttcaaaacgatttataccaacatgcaacttctacaatagaaggggtcacataagacatcgatgctatacgttgaagacatatttgaaaaatatgatacaacgacaaggttccttctcatagtcaaatcaaaatcaaagaaacttttctagagtgagttggagacctaagtttgaaaatatggccttggtggcacacatatccccattagctatgatgaaggatcaacaataccttaacaacgactttttatgacatatgactagaaatcttgaagtcttgatgaactacaaggaagcaaaggaaagaatggtgctttttggagatggaaacaaggacttatcatgggaaaaggtgaccttaagttaaatgacattccatagctaacagatgtactgtatgtacaaaggctcaaagtcaacctcctgagcattagttagttgtgtgatgctaactttgatgtaaatttttttaaaacccaatgcttagtttcatctaatgattgttctgtgcttataggtaacaaaacttttaaccattattatgctctttgtaataaagtggtttgtcattgaacattcttggacaaaccagatttgtggccttcttgagctttaagtatcaaaggatagggtgtgtgggcctggtaaatttgctgtcatcattcttgttgatttttcacacccataggcatcaaagttgtatctgataactctacaaatctagttggtttgagaagtttgatagggatcactttgttttcgtctgcattttttgttcaattgtgggtctctatttttattctcatgttaattctaatcatttccattttgtttgtgtggtacatatgagtttgggtcttgcttgtcttgtgtttgtcttatttcttagtttaagatagttgttgtactcaattgatttagttcaatgaaatatcgacaaattatgatttttcccaagtgtcatttttatatagctctagtgccat

SEQ ID NO: 195784 - DNA, 2323 bp, Cannabis indica
aaatagtcttgaatgtctctaccctctaagattgacaagggagtcaaagttggtcccaaactatttcctctgaaaaaaaatgaaaggacgctgtagcatgtctcctctatactactaaaaaaggtgagacttttcgagatatatgtacacacccactattctaaaatttcatttgccatacacgtaatgtggcgacttgttttgcatgaacttacctttggagatatatgtacacacccactactctgaaatttctctttttcataccgtaatctggtgacttgttctgcatgaatcacatcacaaaagataggtcacatcagctcgcctactatcccaagtgagctagcccaataagtcaaattatgcatattttccttcgcaaataattgaaacacctcattagaagagtatatttacaccacatacttaaatttgttaatttttttacttttttttactatggggttggaatttttttcaaaaatactgtgtactgtgttaaaattttactgctgttttttagttgttttcagttgttctattttgcgtttcattgttgttttataaaaacacagtatttttgaaaaaaaaattgtaggacagtatttttgtaaaagttaacttaaattccagtatttttgtaaattttcccattagaagactttaataataatcaattacttattgggcctagctaatctagcctaaatgtgtgactttttgcctataaatagagttgcacccctattgtaaaaggatcacattcgagtacttagccaaaacattgtcggaaagtctgaaacccactaatccattgttttaggcttcataacttaacaatgatttttagacctctttaatgcctcaaccatgtaagaatattaatcttccttaaagctctctaaaatatctattatctttttttacatagttgcgaaagatagtcaacaaatttattattatattttaaaaaatatataatattataaattttaaataaattattgggattaaactcacttaacctctcaagtcagtatttccatctatttgctcatcagataaatctgaagaaagctgctgcaagttataacagttggctttatataattccaacttaaaggagacccactagaaactatatataggggttcctctattctaaaaaggagttctgagttctaatctccaaagctcatactttagattaagtttagagagagagtccaagatcatagtgagtgtgtgtagagggatgtaaaagggagtatcactcttgaagtaatttccctcaatgtgaggcatttctttgtaattaattactatgttgagttgtaatcttggcctcattttattgtgtactactgactactcctattcaataaagatccatcattcattcattattaagctaagttctagttttagttttgtgattggttttaattttgaattgtgtttcttggacattgttactgctgtaacaacttgctttgagggtgagaattcaccacaaatggtatcagagctcaaggtttagagttcaagaatcacattcaaccgatcaagactcatctttaacatttcaagaatcaaactcgaactttcaagaaccagattcaagcaatcaagaactggtttaaatggcttcagcaaggtttgaggtggacaaggtcaatggttcgaataattttagcctatggagaatcaaaatgaaggcatttctagttcactaagggatctatgaggcacttgatgatgaagctgtgaaattaattgaagactaacaagaagaaacttgagattaaagtgaaagcacatagtgccattctcatcagtcttcataatgaggctttgagggaagtttcagatgaagacaaggcattgggtctttggaacaagttggcatcgatctacatgaagaaatctcttgtaaacaagttgtatcttaagaagaagttgtacacacgttgaatggatgagtcaaaggaattgagaagacatctagatgattataacagaatcattcttaatctgaataatattagggtcaaaattgatgatgaagaccaggctataatcctgttgagttcacttcccaagatgtatgagaactttgttgatacaatcttgtatggcaaggaaacgctgactatgacagaggttaaggctgcattgaattctaaagaaattaagaagaagggagatgagaaagatgagatcaatgggaaaggattactcattattaagggaaaattccctaagagggaatagaaggaaaatcagaacttaaatggctacaaaggtaaccattcaagat

SEQ ID NO: 195785 - DNA, 785 bp, Cannabis indica
agaaagtgatccatggtatagaggccatatgtagaaactatctttggaaaggtcataccatgtatcaagggccaggtcctgtgtcctgggaggttctttgccactcaaaatcggctgggggcattggctttaaagaggtctcagcttggaataaagttgcaatgggaaagtatgtgtgagctttggctaacaaggaagatagcttgtggttgagatggattaatagtgtgtatttacacaatgaggactggtggagctatgcggttccaactcaagctagctggtattggacatgcatagtgaggctcaaagagcagttcaaagctgccacgaatgacaggatgatacaaggcaaatacacagttgcacaagggtacaagctgttctatcaagaaccaattaaagtgcattggagtaaccaaatttgggggagactcaacacctcaaaacacggttttgtaagctggctagccatccagcagaggcaaaagacaagagactgattggctatgaaatggggattactacagatcaggtgtgtatgctctataattcactacccgaaacacattctcatcttttcttcgagtgtccaatcactcatctttggttacaaaacattaagagctagctacaatggagaactcaaggcaagacccttgctgtgttggttcgttggctagggaaggcaaaaaccagcaagtttcgtaagctggtttatgctgctgcacttaccagtctagtgtacgtaccacatatggaagtcgaggaacacttgctattgg

SEQ ID NO: 195786 - DNA, 719 bp, Cannabis indica
atgttgtgcttcaattatcctccctttctcattcacttctcttacaataataataataatttagtattaattattttttgtcccaatattaacttcccattcaactctaatttttcttatttattactagctagctatcataagttgataactaattacttgttttcaaacttccaaaattgattattgacatttaaggttttgtttatttaaggaaaacttaacaaaaaaaaaaaaaaaaactgtaaaatgagaaaaacttaacaaaatattgagacacaaagattttacatttttacaatatcaagtttacaaaaataccttgcgagtaagtgcaccaattcaaacctataagcctatgtaatgtcatctataaaattatagctaaatgccttgcgagtagactaaaagcttctctaacaggagttatcttagagaaccagagtgcctttgtcggaggtcgtttgcttcaagacaatgctatcataggacttgaagggatccattgtatgaagaaaatatttttcgaaatggctcaaagtttgtgctcaaactagacatggccaaagcatacgacagagtcgaatggggattcatcgaaaaggttaatcgttataagttgtccaagttgccaagaatagtccttgataagcttgggtatgatagaagttgggttaataaaattttgatgtgcatcagttcagttttcgattcattgc

SEQ ID NO: 195787 - DNA, 1389 bp, Cannabis indica
agtccctaaaaacatagtttttgctcactccttgaaggggacagcgagaaaactctcagcacatcaatgcttgaaaaatcagtaaatcttttattcatatcctcatgcaacgtccttagatctttacctacctccatgtagaatggaaattctctggttctacaagacatcaaaatttactgttgaacacataaggaaacgtgctaacttgtcccctttcagctatagacaaagagtcgagatgactaaagaagcatcctgctcatcaaaacactctgtttttagaggaaaccgagcacaaaactagagcctcctagcaaacggacatttgaaaaacaaatgactcgggatttcgacgatcgtgaacacattctctctccccgtcacttgcaaacttatttctagtcaaagagtttcacaaaaaattttccaaagcatcagactcaatctctggtggatatttttaaaccaaatgaacttgtgatgcaatagagcaagatcaaatcgatgctcatgatccaatcaataggctgctttaacattgaattttccattatcagaccatttccacaccatcgtatcccttttcaactctttgacaatattgatcaagacaattctctcctcaagctcctctccaaataagtgtcaaacatatctaaaaattccacatttctatgagatttatccaaaaggtttgttacttttctcaaatgggggcccttgagtcgaatcaattccatgaatctccttgaaatcatcataattgagccatgggatctacgactgccaccaaatatcaacatcctttccattcgctaagatcatacacgagtcttccaggataagtttacgtccatatcctagaatcagactttttagcttgaacacttcaaaaggagtccaaagagcaatacttggtccagtggactctcacccacgacttatccatattaaaagccatttcccaagctaacttcgcaatcaatgcacagttaaaatcctcgaaccttttaaaccccaatccacctctctgcttcggttgacacaatttctcccaattcttagttgccaaaaaatgcattttctcgacactcccagtctaccaatatctacaaaccagggaatccagctcgttccaaaagggtagttaagatcttgaatgtagacatgtaataaatttgggtgttaagagccaccaaattaattaatacaagtctcaccgcatatgacaaagtcttcatcctccatccttgtaatcttttcttgagtttatcttttatgaaattaaaatcttgtattttcctcctttaaaacacaaaagggttatcgaagtacttcccaacttgagttgttgttttaatatccgacatgccttcaatctcaaac

SEQ ID NO: 195788 - DNA, 683 bp, Cannabis indica
attcctgaggtgacgaataagagtcggcttaagtaaattaagtctctcaatgttaacaacaccaaacatattcctaaaccccctaacgagcttagcatcattaggaacacgttgagtgtcttcgagcttagtgccataagtatcagtttattttaagaagaacatgatccccaaaaattgttaagtgtaatttttggagatctatagattaacgagagaaaaaattccaaaaatacactttaaataagtatttagatgaaaacaagatgccaactaccaagatgggacaccacccgagggggagagccaacattaggaaagaccaaggcgcgggttgagctccccgtgtgaggagctctccgctactctctctctctctctctctctctctctctctccatgttactccccctctctccctgctacttcctctctccccacgacactcactcttcatactccctagctctctttccccgcttcctcacttactctctccttgctccctcactcactctcccttgttctattactctcctaatcatcacctaacaccacttgctccacacaagagagcaatcacattcaaagtatatatgttacaatggattgaccaccaaacgagatgggggagggatttgctaccaaaattaaactacaagactcacctctcatagatccat

SEQ ID NO: 195789 - DNA, 2237 bp, Cannabis indica
aaaaaaaaaaaaaaagaaaccttttctcctgcgttggtctggagtaagaaacaaatctaactattcctttcacgacttcagcaacctcgatcacagatcttccaacagttttgataacaaattcgatgttgtggacaatgtccagacgagatataagcttttgccggagcttttatccacggactttttagtcacaacataggaatcgtgatttataattagtcacaattttttttacttttagtcataagttttgttgtgcctaaaagtaaaaattttttgtagtgtgaacgcagtttggaaaattaacttgggcataagtatgactgtggtttatctttgtgtttcctaattatttgattatataggtttcacttttatttatatggatgatgagaaagatgttgattatgctaaaaacttgacaaaactgaatttgggtagaaatggactgcctatggaatggactaaggtaagttaattatctttaatggtttgatttgaaaaattcaatagttaggcatgttgtttgccacttaaaaacttaaggtttgaattcctcttaggcatcagaatagtgccatgattttttggttcccaaataatgtagggccatttatttttttctcttcaccaaggaatggaatctaatgaaaaaacaaaattcacgagagatttggttttagtttatttttaaggatttttcacaagattcacagatttaaaattggtttcacaggttttaaaggtactataatgggtataataaccacatatgagaatatggattaataaagacaattagcagtaattattgatattttcataactatttgatgattttattttttgtgggtcctatttttagaaatgggcactggagttgtaatttctcaattttagagattttattaaactctaggagcaatatttatattaaatatgaattatgcaatttttgggaatttttgctcgaagacgacgcaaaatgcgatggatgaccgttcacatgggtaagtttagaatcttttcttaatgggacagacttatgagatacttagaatgtcgggtttaagcggggttatagcttttgaccattttacccctaagcttattaattacttaatattcaagacatgagcattttagtaacttgcattaggggattaggtggcagcttatttttgggatatctggccattaaataaaatttctactttcatctatgttttattgattattagaattaatcatttaagcaatatacaagaaatagctagaagactttatgttcatcctctccctctctcgaacctagcttgaacctgagggaatcaactcatttcccttcaattttttgagttgcggcaagggattaagtgtttccaagtagaggtaaaccctagagctcttacttctttgttgtttaagtttcaattgggtttgatagtgtattttgagaattagtggctgtttaggtttaatcttgctcttgtacgttctctgagtttatattgaataggaataacttgtttgtggctggtttagttgatttgtgaggtgaatgaccaagtttgagtttggaaactcaaacttgattcattaatggcactttttcttcctttgtgtgtttctggattttattgcttggaagatgttatttgaagttggtataggtttttcttgatgtttttgtatagttttgggatcgaattgaggtgttggtggtgtttttggtgtatcctgcactaaaccagttgaccggtttagtgggacctgtaggaatcagaattctggttagtccctaggaaactccatagaatcggtcttccggttggggaaccggtctgtcggttggggcagttttgagaatccttgtttttggctatttttgtgatatttaggatattgttataataaataccaatatcagaacctttagtagtgagtttgggtttcccggattagggttttggcgcattatttacccgtttatgtaaatgtgacttaggacatccatctagcatgagattttctattcaggtcggctaactcattcgaattcaaaaacgaggtaagattagcatagaacatattatatatgcatgctgtgtttatgttttgtgtcggttaggcagtatgggtaccgtattggttaaaaatgatattcaccccagaaagtattaattggcgctatcatagctgtacaagcattgcactactacaaatatcaaaat

SEQ ID NO: 195790 - DNA, 2456 bp, Cannabis indica
cttatttatcatgctttcacaaaagtacattgaattaaatgttcattttgtaagagaaaaagggattaacaaaacacttaaaattagatatgttccctcaagtgatcaaacaactgattgcttaacaaaaagcttgagacaacacaaatttcatttcttggtggaaaaactttgagttgttgaaacacccttaagtttgagatgggttgtgaaaaaataaaaatatcttattggttctagaagctatgagctgtcataaccgaacggtggtcccaatgcgtaacaaattcttgttagaatattccctgctgtaatgattattttgtaattgtgtaaaagggtgtaggtcattattttgtatagaggataagtcaataaaaatacagtcattcaaccaatcattcctttcttcttcatttcttttcctctccactttaatctggttttcaaactgttgcattaacgttgtttttcaacaattttatattagaattaatcaattctaatagcgacattaaactaaattaacattcatcttgtgtcattgatctgaccatataactttgatatttttgttgcaattgagttgttgtacatttgccttttagttttattgatgctcagagaattgatgtagcaatacttatacattgatcatgctacataatttttagtgttatttgaagatatttcataagacaattcaacacaggattcgcataaaaaaacaattctaatatggttagtttgttcatattttaacattggttgagttgatgttgatttacagtgttcttacagttgattcttcacaaaataatctcaaactacaagcatttgttcattagtctaataatagttggttaaatttttttcttaacaataccgaaacacatggtttatacatagttgctagaatgttgtttgcacgttgtcaaatagttttcttactaacatcttataatgaaaaaatcatggatcaaaattggcaatgcatggctcatatacatgaaacgatattgtggttagtttttttataataacaagcaaaagttatttgttgttttcaagttgtataatagtcaccttataacaaacgtattgtataaaatatcaatttttgtgcctgtattatgaatgccatgttgcattacagtttttttttttttatagatttctaataattgattatcaataattaaaattttaaaatttcaagaaatgaaactaattctatttctacaatttaatggacaatttaatcatgaaatgtagacaatttggtcaataggcatcttggtaaacactacaataatatgccaaagcaaagcaattagattttttttttttgataattaagcaattagaatttgaagatacaaaattacaatatcaatttttagataatgttgttgtaatatagttttcgtacaattttcttttcgttttatggatgatcaaacaattgataatgttgatcgaagctacactatttttaatatttttaataggtatttcatatagaaaatccaaaacattgctcatataaaatgcaattctaatacaataagttttttatatgataatgttggttgagttgatgttaatttaccatgttcttacagtggattcttaacctgaaactaaaagtcattgttgatcagtttaataatagttgattctacattttgttagtaatatctgattgcatgcttcgtaaagtagttgccaatacattatttacgcattgtcgaatagttgtcttaaaatttataagaaaaagtttagaaatcagaattggtgatacaagattagcataaaggaaaatctattatcgttagtttgtttatatgtacttttggttgagttgactttacaatgatttattaacaatacataattacatgcttcgtaaattaggtgaacatttacttttttctagatgtttaatagttgttttacaaaacatttaccatctaaattactattggacttgtattattagcgatctatgacattttagttgtttccagttgtttaatagtttctttatacttgtattgtcaaaattataggaaacgaaatcaatttcatttctactacagttcaatggacggtttgattaaggaataaattatgttaattaagaagaaaataaatccatgagtcataggacacatgaaaaaacaagaagataataactccatgttcttgttcatagcactaaaatagaataagtgcagataaatcatcgttgttgatgaaattttcctaaaagctacatttggaggcacattgttctcaaccagcacataagatgcaaatggctacagattcctcttatcattctctattgtagattttagaaaaattataaatacatggtagtggttttttggtaaaaattagggttgaaagtatatggggtcagagaaaaacaatgcttgatctcagac

SEQ ID NO: 195791 - DNA, 1717 bp, Cannabis indica
atatatatatattataattaaatttttatacaaatcttcaatttcataaaatcatattttaattttatccatattaaagttcctcattcataattttttttttaaagagaattcgaaatattacaaaaatgagaatctaataataaataaaaaaatacattaattagttaaataataacattaactaaatgttatatatcattagtattataataacaatttttttttcaaaaaaaaaaataataataataataacaattttaaaatatcataattactctataatttataatattttaaatatgttaataaatattattttacatgacatttactaaaaaaatgtcattaattatattcaataattcttgttaacgacattttgaaaagtatgtcatcttaattaatattcaataacataagaatgcgaatgtcataaataatttgtcgtgaaaagtactttctgttgtacctaccgaaggctagtcaacaagatgttcaaagactaaaatgaacgtaatatgaaagtatatgcggataacatgctcgtcaaattcagaaaggctagggggcacatagaagatctaggcaaatacttcaaaatcgtcacaaaatactacatcaaagacaatcccttaaagtgttcctttgggtcagctcgggtaagtttgttggtttcgttgttaatgctcgaggagtagaagcaaatttagaaaaattcaagtctttctggatatgaagtcgccaacaaaggtaaaataagttcaaagtcttactggtcagatagccacactaagcagattgtgtgaaagttgaaagaaaagtgtgttcctttcttcaacatccttcgaggtagcaagaaatttaagtggatagaggaatgcggaaatgcattccaatagctaaagaagtaactcacacaacctcctattttatcaaaacctctagagggagaagagctaggaatctaccaagcagtaactgaacatgtactaatacaaaagtcaaaatttacgacgctgctaaaaatgctttttttggggcaccgtcgacgctaaaaaaattaagtaactgtttaaaactatttggaaaaattgctattcttgacggtttataacaataattacaggaataggcaactgtttcaattggaattcgtaaaatttatttggcccttataggtgacggtttaaaatcgtctcctatagtataggcgacagtttaaaatcgttgcctatagtataggcaaaggttttaaaccgtcgggtataagaccccaataaaaaatcgttacctacttctcgcaacatttcccacgtgcccacctatttcttttctatttcccacatgcccacctatttcttctccatttcccacaccctaaaatgaaaatcttaactatccaaaaccccacccacgcatctacaccatcgccctcctctcatgttctccctttcttcttgtctctctttcttctcatctctctcatccatcgatctctacccacccctcctcccatcggtcttcctctcctccccgttgcatacgttatacaaccaccacctcccatcggtgtccctctcatctccgtcccatacgtcggaccaccaccacctcctgttcgtgtctctctctctctctctttctctctctccgagcttggtaataaatactatttattctatttatatttactttttttatttattatatattc

SEQ ID NO: 195792 - DNA, 1784 bp, Cannabis indica
gtaaggtatttttttcctaaactttaatttttaagatttaataatgagaatgatataatttagtttattataatcataaattaatataaaaattatgttatataaaattttatttttatatatttttaattatttttttataaatttatatataaaaattatttaaaataatataaattatagttttttttttaacttataatttataagaaactttaagttgatgtgatttgttaataataaaaataaaattataaatatgaaatactttttaaaataaaataaaaaaataagatatttaaatattatttattttaaatattttttcttcaaaaaatttattttattttttgaaatatattattaaagcaaatttttctaaaaattaggttgtacaagttttaacttttaacttcttcataaatttttattttttaagtgcttatcaaatatctttttatcacagtttttatactggccctaaattttttttcttaaaattgtacaaaagttcttaaatctaacaatctcaatagttcagtgataatttttaacagccagaaaaatttaagaggcataatttagtaactcgtcgacctttcttaaacataggtgcaacttgggtcggggtttaaattttttattgtaatttgtatttttgctattgtaatttgtatttttgctaatgcaattagttttgtctctgtaacatgagcattcaaatgagattttagtctattattttcataattctgtatgttgtagttatttaagatatcttataaaatttaacacgtcgaaaataatgttcaaataatttcttgcacgcatgcctactttattttataagcacataaaatataataatagaagaatattttattttacaaatagtttagagtattttaagtttattttcttatgttttttttgtttaatttttttttagttttactactaaatttgttattttggtatttttatatatatataaacttcacaaagaaaaataaaagctaaaactttaaatatgaattcaaccttttccgaatagattttagaaaaatgttacaacatagaagttttatatatctttctcaattttttaattgtatcttgaattagctcatttaaaatttatatgtaaaaattatgcacatttattaagagatgtcgaagtaaaaaaataatctgacatcagtgaatctgcatgcacatgtattttacactcaagtgcagctggaagtaggttaggccttttaattacgatctttagaattaattaaggttatttttaatgctttgaggccaagtaatcataatagagacccaatcaacactaaaagctcaaggaaaacacagaggatgagctttagtgatcaagcttggaactaaattgacacccaaatttaggtagaaattcaaacataggcaaaatgtatttgaatatgaatataaattgttggattaaacttgcttaggataagaatagtaagaattgtgttgataacatataataaagcgtagataaaattaaatgtcctaaatttaatccatttatataattcttctttaacttcagtttatttgcattttttttattattcatttagtttatcaatcaaaaatttgcttccaaacaaattagaaaattgttgattggtaattaaatgcaatctactttcattaaagcatcccaaatttaatgaataatatacattgtataaaaaaattaagaaaaccaccaaatgttagctcaaatggtgagagagagatgtaaaaaa

SEQ ID NO: 195793 - DNA, 2127 bp, Cannabis indica
aatttgtctttgtaattaagtataattgtagataataataatagttcaaattagtccattagaaaaattaaaatatatatatttcatgtgataacgatcttttcatgattttgatcatagatattcttcgaaaataattgcacgtcttttaatttactgaagtaattgaaattgataaatatgatgatatataacggggttacgggtccattatattataaatattaatatatatgtttatatcgatggaacgaatatttggtcaagacaaaagcttaattataaatattaaaaagatggaagacggccaggatccttcaacatgggaagatcgatcatttattatttttaaaaaatatatcaatatatatttgttgcatttttttttttttatatatgttcttggatcaaattgctgcagaaataaatattagttcttcaaataattaacgacattagttttaattaattactctaactgggaaaacattgctaaacatattttaaaagaatatacatctactttttaaaaaattatttaattcttttatttatataacattatgaatttaatatatagcattcttcaaagatggactcatagcgtgtgtgtaaccataccagagataaaacttaattaaatatttcatccttcagctgatctcgtagactcctcctcccactataaaaaaaaatcattttagtaaaaaaaaaaatcattttagtaataactttttaatcaaaacattaaattttttgtgattaaatatgactgtagccacaacaaaataaagtcacttgtaactaaaatttagtattttagatacaaagttgttactaatttagttttagtcataagttgtaatttttgtgactaatacatttagttacggactttttagtcataacaaaaaaatgatggttaattaactacaatttttttttttaatcaaaaattttgttgtgactaaaagtctaaaagtaagattttttgtagtgtactactatctaaatcaagattaattgtgatgtgaatgttggaatgaatttatgtgcagagttgtggctaggtaacaattgggagcgcttagttttcctgggtggctaccaagcagtttaagttttttgatgatctcttagaagcgaagcagatgcagtactacaatattttcaagctttaggggtgacaaatgtcgcctctaataatactaaaaatcgaccctaataacttttagggacaaattgtcccttataatttttccctaaaaatattattaagggtaataaaaatcatatagtgagataccaatgattttataatgatgcgtaaggtaattagacatattttgtataaattgcttacaaaaaatactatatttgctgtaaacttattagtggtttacttgattattacaggtcgaaacgaaaaatctgcttgtatacaaagtacacgttaacaccacttcttcattgttaacctaaataacaatgatgaaatgttttgctctcatataatagttgtagtgaccgacaccactgagtactctttggtgtttgttataaaccgatacttaataattaggttaatttttagtatcaatttttataattaattgatactagaaccaacaccaatagtgacttttgtagtagtacattctcttacgatctggataaagattaattgtaatgcgaaggtttggatggatttagcagctgtggctatgaaccatttgggagcgcttaatttcatgggtggctaccaagcgattctaattctctgatgatcctcttagaggcgaagtagaagcttgtctttttgctctagaaatggcggcttaattaaaaagggaatacttttgtgattttggagagcgactgattgagacactaccatacaagcccttagtagtcaaatttatagatggcatattgataattattgtaatcattgcaaaataatttctcatgtgtttttgggttgtaattttttagtttaattgaacttgtaactttgttacccatagtgcggtgaagtgagtttacaacttatatggtgtgcttgaattgtctaacatctcgaaaaatatagtctataatgatcgtgagatctagtttttttttttt

SEQ ID NO: 195794 - DNA, 2032 bp, Cannabis indica
ttcagatgccgaaacaaatagagatacatcggtatattcttttagaaagtgcattgtagaattttctaaaaatatttactaaaattaattttaattttagtttttaataacataaaaaattaatgttataaacaaatgattataataacaatatttttatttgtatttaaaatatataaatatatatatattatattaacccttttaaaagatacaaagaatggatttttttttcttaagaaacatagtttctttccaaaacaaaattagttttaaatttacaatttgagtactataaataatacttgagctaattttttactatatatatagtacatactttattactttgacaaatgcatgatttatttggatcaataattaaacaaatgaagtgctttgaatagttttgaattatttgtttgatatgttaaatattatactctagttgtaagtactttattacttaaatttattagtattctttttttttttgacaaaaaattgttttataaagaatagtcatcaggagtgtaaactattgctaaaaaaagagttgcagtccattacaatctaataatctacatttattatatatattttttttcaaaaggaatttttttgttgataaaaatgatgaaactggcacaaaatcaaactcatacaaagagataaaacactagggccacacgcaggaagacaggattgtcaacagtctagctctattaacaatgcaagttttgccaattagttatatattatcacagccaattatataagtgtttttaatccaaagagttctgtaactgtgtgagacgatgagtaataatcaagtaatgaagaactcataatgaattttgtgaggtgcactctatctatatataagattatgttcttagagatttatgtcaatatattatgtgtttggcttggcgcttgggggcttagcatttctttttttaggtattttacttatagaaatattttattatattatatatggtctcaagaagtatttttcattgtgtttttttttcttataactaattatttttcattgtgttgagttgatgaaaaaaaaacaacaatttgattttgaccaacatatattgttggaactatctcagacatgattttgttttgcttcttttttttttttaaaaaaaattttttttatttcacgtatttttaattttagtagtttgtatattcgttggaatttctttataaagtttagtaagaacaaaaatttacacggaagtacctagatcacttaagcaaacaaattaatttaggtggccaaaatattccaacttaccataaattttaactctactctaacttcatccttatcttaaaaaaatcctatatttcaacctacccaacataataaaaattattattttaacccttcaagatcacttcctaaagatttatttgataatcaaaggtgggtggacgagatatttagattttcctttgtggttaaataattaaaggcttgttttcaaataagtacatatactcatagatttaaactatgctccaaaatatttgtaggtcaatttcacctttgctgtgaccttatgagtgattacaaatttagccttaatgcgattgttcaccttcaccagacaaattggacggtaaagcataaattatgtgaatttaaagatataaatataaggtcattaattatatatggttccttgctctttataaactaaagaaataaataaacaaatatttattctatttatataactgatcatgttataacatggtatgtttttaggtataatgacagaaagtggcgaaaacactaaagcgacaacatcaaataaaatttaaaattcagaaatgagaggtaaaagtggaataaaattatagtttaggggagcaaagtgaaaattaagataaaagtggcacgtgcgttgttgaatgggacccacgacacgttgcgtgctcctctagaccccaacagaacagtgaaaggagtaatcaatctctttgattgagagtcttaggaaaa

SEQ ID NO: 195795 - DNA, 495 bp, Cannabis indica
gtggtattttgatggttctctattgtgtagtagagctctgatacaatattattttgactgagttgttttattttggggacgacgaagttgatagtctgtttgcacaattctgggcagtgccgcgaacgtcttaaagagagcgacctaattcacgactcaacccagattatattacaaacatgtattctaaacaacagtgttattgggtgtggtatttcgactgttttctatcatgcagtagagctatgatatagtgtttattttgactgggctaatttatcctgttgatgttgatggtctgcttgtacaattctgggcagtgctgcgaacgtcttaaagaagagacctaattcgcgactcaatcgagattttatttggtaaatttgttcttttttttttttttgcagtaactatttcaataattttaaggcgatgtgtttctaccatgattattgatgagaattatggtgtttttgatcatattacaaacatgca

SEQ ID NO: 195796 - DNA, 1248 bp, Cannabis indica
aattttgtctttctcctcttagctttgagggtgataaatacacttagcataatagttctgtgtgtgaacatcttgattaggctattggttctgacccctagaggactttatatcctaatgctatgctgtatcatctgtctttttatggttcggaccatcgagcccttaaggttgtccttcataataatagtgattctaataggattcctgtttttaaaaagcgttttcattttgaaaatatttggcttgaaaatcccagtttttatactactgttcaggattcttggctgaattcttcacatcattctgttgatgaggatgctcttggtcgttttctctttcgtcaaaattcttgtgtccctgctttgaaatcttggaataaatctgttaagcctgttttccattctcaaatccaggatctccaaaaagagatagttaggattcaatctttggcttctgattgtagagagtctagtattcatcttaagtatcttcaatctcagcttgatgctcttctttacaaagaagaagtttattggaggcaacgggctagagtaagttggcttaaggctggagataaaaataccaaatattttcataggttttcctcccataggaaaaagaataataccatcaaatatttaaaagatgatgttggtaataccaccagtgatcctaaggctatgtttgacataatcttctctttttttcaactcttttttgttctgaaggttgtgatgctgaggctactagtcaaattttaggctgcttagggcccccctagaggagcttgaaattgattttttggctcagcctttcacacctcaggaagtgaagaaggctatttttaacctttttggtaataaagctcctggtctggacggcctgaatgcttttttctaccagaagaattgggatacctttggtcaagatttcattcatgttattttagattgtttaaataatcaggttgatgtctctaatattaatactactctgattgttttcattcctaagaaacaacatgctaatactatgaaggattttaggcctattagtttgtgttccacaatatatataaagttatttctaaggtcattgccaatcatctggtttctgataaaattatctctccatttcaaagtacttttgtttctaagcgaattatttttgataatatccttattacccaagaacttgttcatgttattaactctcgaaaaactggcaagaggggtgggctgcttt

SEQ ID NO: 195797 - DNA, 1648 bp, Cannabis indica
atcttcttaggcattgttgctatgactctatatttaacattagttttattttcttttacaattgtatctatagtttgtactctttggttccaaaaagaatcatttcattccaccaaatattgtatatagttcctgccattgtcgaagctatcacatttttctaaaacttgctcaatttatctcgacgtattctttttatcaaattcgtcagtagaatactatctattgtccaccccaaccacatctttattactgtcaaacattattggctgagatgacattcaaagaataagtgggtgacaatttctatgtcatctccacataataagcatatgtcatctttacatattttatatctaaaaagtctcgatttcacctgcaatcttccaagaatggccaaccatatgataaatctatgtttcggcttacttagctgactccaaaccatatcattccagtgaattcgttctcttgagacaaaaaaacaagttcaatccatgctgtatgttatactttgtagttataaaagattggaggttagccatacctttaatttgattctttatctttacaatttgcctccaataccagctgctatttgtgggtgcattatactcccaccaataagcctatctcaagtaaacattatggatctatttgacccacaaattatcttgcttactagcaacaacccaaacatatttttcaagtgcagctttgttccaagttaccacattcctgaagcctaagccaccagtttttcgaggttaacacacatcctcccaagatacatatcctgttcaattaaaatcaacagctcccttccacaaaaaagtcctacaaattgagttaactttgtataaacctttcttaggaaggatcataatttgtccccaataggaatggatggccataagaacttaatttattagagtagcccaaccaacaaaggacagattcttagaactccaaatgtgaattctttgcaccattttgtcaatgagcccatcactttctacataggacagtttctgagcacatataagaactcctaagtacctaaagggtaaggagcttcttgaaaaaccagtgacatctataattcgttacaattcaacgtcttccatgccactgcaatatatgggagatttgctctcattttgccataatccagatgtttgagaaaacaacttaagcccttgtaacatgtagtagatggatttgaaatccctatgacaaaacatcaacacatcatcagtaaagcacatatggtttagttcgaacatgttttcttttattggattgtttgtaaggtttaaattattacaagttatgtttttattccattgtaatcaaagtttaaaatttcccgctcttatttttctagtagtccaggtttagcgggattaggttatattactagttgtcgtagcgtgcgtaattgttagggcgttacaaatatggtgcctaaaatctataagaaagagagcttgaatttcaaaattctatggtgaatagtcaatttcaaaaatagcaaaagaaagaggaaaaaaagagtgaaccattaggattttgtatcttccatcactttttttatagtcattctattaggtttatgttaaattatttattggctaattaggatttt

SEQ ID NO: 195798 - DNA, 530 bp, Cannabis indica
aacataatccaatgaaaatgtcttctttcaaagtcacatgaaaaaattaggcacactatttgagaacttacacaaacaggctaaatagtaactaggattactattgaactcttttcttagaaagaaagaaaaaaaaagaattaagacaatttttaaggtgatttagtcatctctttctttcacataacctaaatttttgttaataatggaataattttttctccaaattagagttttaattccgaattattatatttttcttaagaataaatctctcacaatataaaaatcatcataaatgtgttatttcaattattttacaatctacaagtataattaaaatacgtattggatgatctataacttaggctaatcgaaatcttgattagcatctaaaagcactccaaccgtttctcttttctattctttgaaatatatcactaaaattttatttcatttttatattagagtaaatttttacattacacaattcatgaacttctctattgatttatttataatctgttttt

SEQ ID NO: 195799 - DNA, 552 bp, Cannabis indica
tttaaatgctcacatctagtttaatcatctaatctttattatgttcggttatgttagctcatacttatttttttcccgttcaagcttaagtacttttaatattaatatttttcaatggttagttttgcctgaatttccttacaaggaaaaactaaatttcttcccaattttaagaagcgagtttgttaattttgacattggtttgtagttggagattttatgctatttttgtatttaaaagtttatgacttgtgatcaattttattaatcgatttttatgtttatttttactctttagaaaatttataacatgctttcgatttcattgatataaaggtaacaagataatcatgtcatattaaattaaaattaataatataaaatatatatattgagtttatatctattttgttagacaattgttcttttttaataaaatgaaatatttccattcaaataataataataatgtttcattttatgttagcttttgtttcattcatcattacaattgagttaattttactcactttttttaaaaaatataatata

SEQ ID NO: 195800 - DNA, 1251 bp, Cannabis indica
gtgtagaaatatatggttgtaaatggagtatattttttatttgtaaagattaaggtctttctctattcacattcacatgaagagaaacgagtttggtggcaaaagagtaataaatagtaaaaagagcacttcaaacaatttctcacttttcttttaacaaaaaaacaaacaatttctcattttatcttttaaaatatatatatttttgttttatctcaaatttttttacattataatatgcatgtatcaactttctttaattttttttttcaacattatctaaatattatatttaaccatttttagtattattattttcttatgaatttcaatcacacatatatggaaatttaagcaaaaaaaaatgttgaaattacaattatagaattttgtaataatatttgaaaaatatgacgtatttttgttttgtccacttttcatatcattttatgtgtttagaatttttttttttatggtattgagtttattatatttttataacacttattcaaagagaacatattttatatttgggtactaaattcatttaattaaggatatatatattttttatttctacgtttacaatttaataaaatatgtcgcttaaattattttatctttatgtttcaaaaaataaaaaattagctttactttattttattttttgttactcatcattttatcttttagcaatagaatcttgtagttaaaatataatggagtatttatctttattaatattaattaattcaaaataaataaaattgaaagaccattttatatatacactatcataaaaggctattgtgttaatattggtagaaagaaatagatttatactctaacaacttcaacattatttaaaactcagcgtaattgtcattgacaaacaaatatataagcatattttgtatacaaaatttgtatataatatagaatattagataataattagataaatataattaagaatatatacttgattgatgcataataattataacaatttgatagtgcaatactattaactaagtcttcttttctaaatctctaaattagaaacagttttaatttctatttgattatcaaaagtatataattgtgatgagataatatgtatttatagagttagggagggaacttagctacataaccctagttaggctgggcctgctcatcaaaagttttaattaactagaaaaactcacacttatacttcacatatactttacacacacagatgctaag

SEQ ID NO: 195801 - DNA, 599 bp, Cannabis indica
agttaaaaaaattgtaatatactaatatgtataggtagtaatagcaatatttttggttaaggtttagttgcatttgctattatatttctattaattaatatatatgtttttttttaaaataaaaaagaagaaaaaacactcttaaaataagagattactttacaaaacatatctcatgtctctctatctcttctttttccaaaatatgatctttttctcactaaaaaattgattttttttttctctcaaatctcaattattgataaatttctatatataaatttatacattgtctaagggaaatatttctattattttgaatgatttttttccatctaattgtgccaaatggaaataattaatagtgatatgcaagcacatgcatgcagcataaaaaatattgttttgtttgcaatattgtattgtgattttagtgtgtatttattaagttttttttcttcttcttctccaaaatgtgttttttccctaaaacaatctcattcattatgtatgattgagactaaacatacaaagggttttgaaattgcatctgagttaattaatgggaagatcactatggcataatatatgttgttata

SEQ ID NO: 195802 - DNA, 763 bp, Cannabis indica
agtgtggatcacaaagcaagatcaactcttcttcaagcgaaaataagtttaaatattccagggcactgacttttcccaaggaaaaaacagttaagcccaatactgaagaagtatccttgtgtgacgaacaccaaagcaacttatgagcatatatatatatatatatgatttgatggtctgagcaactcagggggaaaagatctcaagaatataattgtataggtttaggactccctaatataatattatttttattttattcaggaaatggaaagagaaagttgggagtttgaaaatttcagagggtgagttctctgtaaactcagtccggacccctatgtcatgtgaggtatcataaagtagtttaaagaaaaaaaaaaaaatcaataaatataggtgccgtttggtaatacttttgtttttaatttttaatcacaaaatgaaagtaaaacttttgtttttaaaaaaattatttttgaaaaacaaaaatgcgttctgtaaccacttttgtttttcaattttaaaaacagaaaacaaaaatgtgttctgtaaagttcatttttatttttattttttgattttatttaagtcgggtctaggtccggggtcggattcgggttcaagtcaaaagccgggttcaacgccagggccgttgggagggatttgggtccgggtctggtcgtaatccaaaagattgattaagaaaaaaaactgtttaaaaaaatattgaaagtgattttttttgtttttaaaattttgattt

SEQ ID NO: 195803 - DNA, 802 bp, Cannabis indica
gtttgcaaactctttttggtaccaaaatagttgattacatgattattgtatttactggtggagatgactttgaagacgatgtgacttttgaatttgagcattacttaggccgtgaatgtcctcatcccctgaaggtacttatatatttctcaagagatatatcatgtgtttagtaatcatatattaatatttatatgatatgtataggttatggtcggaagatgtgaaaatcgagtgttgctctttgataataagactcgtgataaaataaagaaggctgaccaagttgaacagcttctgtctcttgtaaacaatgtggtggagaaaaatggtggtcgtccatatactaatgatttattctctgagctaaaggtatatatattatgaaataaaggattatttattactatttttgataaattgcacaaactaaaacaacaacaacaatggttttaggttgctcatgcaaccaattcttggttattttattgatataatttaaattatttacaggaaggggctatgaaaattcatgatcgggaagatttgctattatttgatcaagaagggcctatgaagaaaattgttgaaatggtatttttttctttctttcttcattcattgcccttttcttttatgggtgggctaagtcttatatttatattttatgtaattttttaaaaatattaatatatagattgaggcgaggttaaaagagacagttcaaaattcttgaaaaacaattggagaaagagaaaaaagccagacaaaaggcaggaaagagggctttgcaagaacaaaa

SEQ ID NO: 195804 - DNA, 1225 bp, Cannabis indica
cttggtgcagggaaagctcctgtcaggcaacagtggaacaagtgtggaaggaaaacactcagctgggggtaactaattgcattcgcaatctaactcggaccaggagagatttacagcaatggaaaaagaaagactttggggttagtgaacaagatatcaagaatctagaggctcgaataaattcgatacaacaaaaaaatatttccaatgacttgtgtcaggaagaatgtagattgcaagcaagacttgcagaggaatactgtcgactcgagagtcagtggcttcagaaatcaagggaagtttggctcaaattgggtgatagaaactcaaaattcttccatctgtcaaccatgattagaagaagaagaaaccatgtttggacaatcaaagaaaatcaaggaaacagttgggaggatacgagacgtatatcaggtatctttaatgaatattttattgatcttttcaaatttgatgagctgattatccctatgagcctggatactttgttcgacaaaaaagtagatgagggtgataatctcaaattcagtgctattccaacggaggaggaggttagaaatacagtcttcatgatgcaccccctaaaagcaccagtgccagatgggttttctggctgcttttttcgacattactgggatgttgttggaggctcggtctgctctgcgatccaagatttctttgtcactggggagatgaataaaatcttaaactatacctttatttgtctcatccccaagagagaacttcctgataaagtggatcaatttaggcctatcattctttgcaattttatctacaaaataattgcaaagattctagcaaaccgtctctcccctctcatggatgggctgattactccattacaatcagcttttatcctggggaggtggatagcggaatcttcggttctcactcaggaattggtgcacaagatcaaaaggaagaagggtaatggatgtctgatggcgttaaaattggatatgcacaaagcttatgatcgaatggagtgggctcttcttttaagagttcttattgcaaatggttttaatgaaaaaaattgtaaactccttatggcttgtgtcacttcagtctcttactccattcttcttaatgggagtcctcagaagaaattttatccgggaagggggttgaggcaaggggatcccgtatctcctttcctcttataatggagacattcacgggatcc

SEQ ID NO: 195805 - DNA, 1989 bp, Cannabis indica
agtgtaaattgtgtgtagattcatctctctgatacatatgactgacttttgcagtgtttattgctatgtttttcagattttaacagagaatttgaatggctatgtgtgaattttcattttaaaatattccaccaaatagaaggtccaattccctgaacagcaccgcttaagaaaaattggagaaagtataatgagattggtgcaggcatggttcgtgctagtaacacttgttttagttttgattccattgaatgctgtttctggatctttgcatccaacaaccgatgaggcttatgtcacactcctgtacggagatgagtttttgttgggggttcgagtccttgggaaatcgattaaggataccagatcaaccaaggatatggtggttctggtctcagatggtgtttccgattatgccatgacacttctcaaggtaattgaattggtgactttactcttgtctttcaataaaaaacacttctatctagtatgataagctaattttgattttcaatatttgtaagtaaaattcatttgaagccaaaagggttacctcaaattgtcaggcatgtggttagctaccacaacgtttgaagttggagtagtccctactgggtacctacatagcaattgctatagttttcttcctctcgtaatattgtagtgttaggagggaacctagtttcaaaagaagtaaaattaatttgaggaatatgtgactggtattttgattttgatattattttatttgtacaggcggatgggtggatagtgaaaaagattagtttgttggaaaatccaaatcaagtgaggccaacaaggttttggggtgtctacacaaagttaaaaatatttaacatgactgactacaagaaaggcaagttttcagttatttaaacagaagaagtttgaacttatgttaatggcagaaaaatagtatcacaataagttgaatcaatgttttttctaaaatatttaataataacccctaatttgattgcagttgtatatcttgatgcggatactattgtggtaaaaagtattgaggatctttttaaaatgccggaaattctgtgctaacttgaagcattctgagagattgaactctggtgtaatggtagtagaaccatcacaaaaagtttttgatgatatgatgagcaaagtgaacactctacaatcttatactggaggtacagtaattccttctgtgatagttgttgacacttcacgacattgctattgctaatatgccaatcaagaccatatgtttgtggcgtttattctcttttagagtattctagcattggaatagatcctactgtcatcaatcttcctatctatgttgtcataacgtttttgtacatgactctttttcaggagatcaagggtttctgaattcatattactctgactttcccaatgcccatctctttgagccaaatttatcacaagaggtattgaagtctagaccagtacctgaaatggagcgactttccactctatataatgcagatgtgggtctttacatgctcgctaacaaggtattcattaaatttatatatatatatatatattactaactagtttgtaacatgtgcatgtctctcctgttaaattctctgatgcttatgcataattcatgcagtggatggtaaatgaaagtgaacttcgtgttatccactacactcttggtcctcttaaaccttgggactggtggacgtcttggcttttaaaacctgttgatgtttggcaggtattgcttttaacttgaactaaatcttgtttgctgtttctcctgtctatttttcttgtgggagaaagtgtgctgtgcattttgtttacatgcatgcatgtggctctacaaatatgtgatataactaggcattggtgtgacggtgttaatgggttgatagtatgcaaaagttatttattatgttatgtgactccaccaatgcgctacttagtaacacttcttactctctctctctc

SEQ ID NO: 195806 - DNA, 1848 bp, Cannabis indica
acactgccaaggccaggcagagtttgggttaatgttgactttgcttgtggaaacggtgttggtgcggttggggtggtggttagggatgagggtggcaacatccttgccttatttgctaccaaaactttctttgactcggtaattcaagggaaactttgggctgtctactgggggttatacgtgctatctaatttggagattacctcggcagaccttctgtcggactgccaattgttggttaatgctttcaaggggggaacctcgccccattggaatgtttctagacttttttctaagacttcgagtttcatgtttttgttatctgtttctttgttttggatcccctgttcctcctatgtggcagcaaatgtgcttgctcgttggggtcttgaacatgtttgtaagggattccttagtttttcggaggtgagttcccatgtactcaccaaaatcgttgatgccttttaatgaagtttgatgtttcttcagcaaaaaaaaacattaagaattgaaatatacacctcccgtttgaattttcactctcgacacattttaatccactttaaaagacctttaatttctggagccaataccaacccatgcatcaacaacttcactattctctgactgtaattgcacttgaagaagagatgctcatgagattcagtttcactataacaaatcatgtagtagttctctttgatacaaccaaatttcaataaccggtctctagttggaagtctttcccacatagcaagccaagctatcattctatgctttggagtactcattctactccaatctgttccacttcttttcatggctattttgatagagcttttggggtaaagctttgcaatagaaaaattctagtgcataaaatcagcaatatcaattctatctttaattaagttttttaccctcaccacttgtttctaataccaactacttccttatgggatctcatgatcccaccaatcatcattctttatatacactgagtgcaaccaacgaacccaaaggttgtatttctttaaggctatgttccaaacatatctgcctatagcagctcgattccatttttaatgcaataaaaatccattctacctgctgccttgcattggtacacctgttcccacgaaatacaactcggggccaaagaatcatagttccttttccacaaaaagctctacaaatgtttagttaaaatagacttgggagaatagaaatttgagcccaataagtatgaattaagatgagtaccaaatttataagtgcacacctacctgcttaagacatattttttgaactctaaattttgattcgcgcaaccattttctcaagaatactagcacaatcagcttttgaaagatttttgcacaaataggcatactataaaacccgaagctcagtatatattgaatatcaaagtttgtcatcagcaaagcatagacgagtaagtttcacatctttgcactgagggtgatagttgaaatctaaatgcttgaaaatctttgccaacaatcttcaaaagtattccaagcctataacaaagagaagagttgacatagaatttccttgtcgaagacctctcttggaagcaaaatagccattcatgaaaccattgaaaagaatgaagaatttaggagtataaatgcgaaccataactaatttaatgaacttttggggaaactgaagagtggtgagcaactcttctataaatctccaatcaagagtataataagcttcttttaagtccatatttaccatacaagatggagaggtatgcttccttcaataatgtctcacaatgtcttggcccactatgatattatgagcaataaacct

SEQ ID NO: 195807 - DNA, 510 bp, Cannabis indica
aaaaaatatatataacaaattttgttaaacaattaaaaaatttaaataaatttaaacattttaaataatataattgataaatttttataaagtatgatttatttattgaatgaacgtctaatttaaattaaaaatttgtataaaaaataattatctaattttgttgatacttttaaaataaatttaaatatttaaaattatttttttaagaaaaaaatataattaataacggtaattttaatcgataactttaataaaaaaaatcgattaaactagcaatatttgttagataacaacatttaatgtaagagggatgtttataatataatgtaattacttaacttttttttatcaactataaaaatatatattataaaatgaattacaaaaattttcctaaacattataggagcatttgatacacgttttatttttttatttttttaatcataaaatttaaagtagaatttttgttttggaaaacaaaaaatgttgttgtggacattgtcc

SEQ ID NO: 195808 - DNA, 1933 bp, Cannabis indica
atgggaacttagatgaatgggaaaaaataaactagataagctatccttttataaggactgtgattctattaaaataataattaaaaataacaaaaaaatgaaaaaattatttttgggttgatcttgatcattgatgatgatacaatggtgaaaattgtcaatttttggactttgaatctctcgtctgttggatcatttttgggttatttactggaagaattgcaactttgttgaggataaattttggacctgaaatattcagaattgagatgtgggtgtgatacacaacttgatagatctttaaaatagctttgaaactcaagttcagttgcatcaattagatcaatatcgagtgatttatgactattttaatgaaggttattcaccaccttacggctaggttgacaacctagcgcccaggttgacattctgacatcaacttggacgtcgggtgagtgccaaaacgtcctaaagttgcattttttgatgcctaagtgatgtgttggcaccacttagtcaaatttaatgttctggtgaagttgttcaccagttcttgaagatgtcgctgttttgtgaaatcgagaagactcaaaactcctcaattttgtcgatattccaccttgttgaaatgataaaatataaaaagtataaatttgacatgtcataagttgtagctctcgtttactacaaaaaaaatagttgaatgctcaaaacagaatcgaattctgataagtagttaccaacgcaccaagtcaggtgtcaacttgggagttggttgcttcccgagctccttcctgaggctcgttttgatacttttatggtattcgagattgcaacgaggtctcttaccccctttttgaccattttaagaaaaatttctagagcagaatttgtgtttaaggagcggagacatgcgaaccaagctgcatgtcaacctgggtgcagggcccaatgtcatgtcaacttgggcgttggggccttgtttaggctccctggaaatctcgttttctcctcgagattacttgtatattcgttattcctaatgatgaaaaaatgtccaaaacacttttttagaagattgactggaaataatcgaggttgacaaaatgtcaactgggcgctgggtccagttcctgggtactagatgactctgtttgattctcagaaatacttgtatcttaatctttgatgaaaatggagaatatgcccagaaaaattctcagaaaaacttcttggaaatgacccaagttgaaaaagtgccaacctgggcgttgagtctcagttctgacccccaaacaactccgtttgttcgcggaagcagtcaaatcttaattgtttacgaaaacagagaatattcctagaagaattcatctgaactgctgatggaagtggctcaagttgacgaagtgtcaacctaggtgttgggtcccgttttggcctccaggtgaaactgtttctcccttgaaagcacttgtttccttattttggatgaagacaaaaaaattctcaggatagttttgttagaaattattttgtcatgatctagatttactaacatgtatgttggattatgattccatgttggattatgattccataatctaacatactaaatatgaattttctaaaataataaaataaacacataagagttatagaaaactttacattgatggcagcagaattatatgactccctccgttcagatctctagacccttgatcctttatgctgcagagtatgatcaagagttgaacctggattatcctttagttgacagtatgaactacacaatcttcctcactatgatgagtattactttgaattgtgtgggaaatctctcaaaccaagaaccacgatttctctgaataaaaactctaagaatttcgaaattaataaatagaaaatattaggttttcttttttattcaatt

SEQ ID NO: 195809 - DNA, 1841 bp, Cannabis indica
agtaaaagagagagaggaggttggtttatggctgaggaaaagtaccaaaaaaaaaaaataatccttttttcttcaaaattttcttttattgaatatacattaaatggttgaaaagaccaaaatgccctaaggccatatataccacacatacatacactcaagggcaataatatcatttttatcacataccacattcaattaaatttagattattcatatatcaataacattctaatataaaattctaaaaatatatttcggccccgaacccagttcggcccaaatactcaattgtgactataccgcgccaacttgtcagtaaacacctcaaataggacaaaacaagtatacaatatatataataatatagtccataagcacacaattacattaaatttacagttttacccttctcgtgtcaaaattacaaaaaaaatgtccctggctcaccaacggggtcttaacatgtcctttatcaaattaattcacatataataaattatataataatataattccataataaatacacattacctagttagggttcgctaatctattttcttaatcttaggatattacaaaaaatatttttaggtttggcgacattggagactcgatcgagggccagaaatatcataacagatttaattaataggtttgacaggaatgttatgataagttaataatgtaggtattgggataattaggagtatgtgaaatttgacttagcgccctaaaaatataaatttttgagtggctaagaaatgataagataatcataaaaaataaagtttttattaacattattattaaagtttttataataaaacttataaaatcaataagttatatatatgatttaagtttgtaaactaaattgaacgaaatcttcttccttcttcgacaaaaatcttttttctttttttttttaatttttaacccgaaacctagcgatttaagcttcggcaatagcgggatagcaaatatttggaggaggaaagcttaaggtatggtttaattttattttaagctaaaaatgattagttttatataggagtttcgtgaattagaatagttatggagattctgaccttatagaattgttctcgggtagtcatgggactagttccgatattttcttgtggaatctaaggtgattttgagttagaaattgagtttgaaacttttaaaagcttaattctgaacattaatggtgttttccatttaagggcttgattttaatttctgttacataaggattgttgtatttatagtatatatgtgccctgtgaagtttggaatgatttggataggttttggggaagttttggttagtgcaaaatttgggatttgcatgccaaaaaatggtcggctgttttggtaaaaacggcttaccgtttctttaaattccaaggagaccaaaaattatatttttatcataactttttacacgggtgtccattttggacgttcgatatactatttcgaagcttccgacgagctttacaatatggtgtatgttttagagatagaatataagttttattttagtgtatttgtactatggggtttggtagaaaaccctaggttgtcctttgcaactgttaagtagtgttttgggataaacacttattggtttatcattgttatgacatagggctcgagatcatcgatctttctccaggcaggttggccaacatacctgaaccagaatttgaggtaagaaaagtataatgtaccacatggcatgataggttttgtaattatcgattgcctgattaggcaatgacgatgtgatgacaccatgaatgtgaaatacgggctcacctgattaggtg

SEQ ID NO: 195810 - DNA, 980 bp, Cannabis indica
attctcgttgaagttgaggacttccaagttggtgaggttgaagaccgaaagtcggggaaccgtccttaggaaaaggttgtaagacagattgagaatccttagagctttcatatggaaaagcttggcagatttccagtgaggtaaaggtaactcatgtctagctcttccagctgagtacagttggtgatggtagccggaaactcacctgagattcggttccgtccaagtcgaaggacccttaattttggcaaataataacaaatgtttgctgggaaggtccctgagattgaccaatcgtacacgtcgatttcgatgacatggctccttgtgtcgcaatttatgccagagaagttgcatattggttgtttagccccgaatccaacgtaccaattatctaaggtggcaccggagagtgatttcttcatgaggacgaaaaattctgtttggttggctttggtgatggtcgattcatatgaataaaactttgataagaagagtaagagagataagaagcatgttatagagttgggagccattttatttgatgaatagagagttttaatatttaagcttttgttgtgcaggagaggaagaagaagaagaagaagaaatacattggaagaagagaagaatgagtattgtcatgactacacttattatcaagcactacactatataaacgtacttaattattgccactatcaatttgctttatgtgtcaatatttcttttttcctctactaatgattatataatatttatatataatatgtgtatgtgtaatgataccctgtctttttcatggaagaactattccctttagaatgaaagattggtgcttttgttttatggagcttccaccatgtccaaaagagatgttttatgcccatgaatcttattcgtttcttagaggaccctacaaaccactcaacaaagttatgctacaaactacgtacttgttccaaatgtgtacatcgtat

SEQ ID NO: 195811 - DNA, 1181 bp, Cannabis indica
aaaagaacactacatctgaaaatgttataaagataaagaaattaatataaggagagaaagtgttctctcttggtcactgaatggagctggtgggtgtgggggccattacccatccaacagcacaaaaaagcttcaattccttttcgaataaaagaggataaacctttttttttaataaagaagaaatttaaaaaacaaaaatgaggtaatagctaagggtattattattattatagacagagatatttatataaaagaaccaatatatttacatattcacacatcaatcgtgctggccactaacaactatataagactaccacaccttttttatgagagattccccaaacacaccatctcaaaactcagtctcagtggccgtcctaagattctagataatgacccctttatttatttttgtaacttattaattagaatattagtttgcacgtagctattagctaattaattaattaataaattaaatatatattataagttatatgataaaataagctgctgctgatatcagctttacttaacacaccaaaatataccaaacctcatttggaccccattttgtataagtaatatacataataaagtcaaggaaactacacaagttaattataagtgtatggtttcaaaattgtaaagaaccaacaaaacaaaacataaataaacataatcatgacaatgactatttggctatcgatcttctcttttgtctagtttattatatatgttcaatagtgttaatttggaatcatctaatatataaattgaaaattgaaaaatatatttaacataaaaagacaaagaattaatgtatacataaatctaaagatatgtggatgatcaaaacccattacctatttatattttgtcgttcaataaatttagagagaaaaaaaaacatcacaaatttcacaatataaattataataaggactatcatgaagattaattaattaaatttccttcatttttcgatccaaattaaacaacaattaatattctcttctaaaactcgatcgatccactttttttttctttttcaccataattctttaaaacacaatcatatcacaaactccctaacgctcccatgcacgtgcttaaaataaaaaacatactacacgtgtgaatcactctcatcaagcatgagagataataataat

SEQ ID NO: 195812 - DNA, 3620 bp, Cannabis indica
tctcttaatgtctttggtcctacttactttgatagcttcctatccattgatgctggccccactttccacttcactgccttttatggtgcacctgcagcttccaacaaatcctcttcatggactctacttcaaaggttaaatgatattgctcctgctatgccatggcttcttattggtgacttcaataaaatcttatcccaaagtgataaatctggtggctctttacgcaatgagtcacaaattgaagctttccgtaaagccttggatcactgccatcttcatgatttgccttatgatggggatcgtttcacttgggtcaaaaacagaaatgccatctctaccacaaaggaaagattggattgggttttcgctaatcatttatggaattctctctttgacacgcctactgtctctcacttggatttcttctcttcggatcaccatgcagttgctgctgttgttactcctttgaatactgctgccacttcccatcgccaacgctcaagatttcgctttgaaaagctatggttggctgatcctgaaagtaaggatattattacagcttgctggtctcatggttctcatagtgatcccatctctaatatcattcaaaagcttgaaagttgtgcaacatcccttcagcaatggcacctccacaagtatggtcatatgaaaaaaaggatctctgaagctcaaaacaaagtaactgacctcaataacatcagttctcactcccctgagtcagcgacctctctcaaaacctcagaatctatccttgatgaccttttggaacaagaagaaatgtattggcaacagcgatcacgcattgattggcttcagctaggggaccgaaacactaagtttttccattcaaaggcttctgcaaggaaagctaataataaaattaaatttctccaaaatgcagcaggagttcgggttacatctaagcatgatatggctgctgcaattcaagactactttgaagaaatttttcacactcaatctgttgatgaagatgctttcacaaccaccataaactcgatccctacaaccattacatcagctatgaacagggagcttatcaaaccttttactccctctgaggttgaagctgctttattctctatgggttcggataaaagcctttgcattgatggtatatcggccatgttttaccaaaaacattgggatattatgggtgactccgtttgttctgctgttcttaatgtcttgaaccatggtgctgacccaacacccttaaattccacaattatcactttaatcccaaagatgaaaaagccacaaattgtcaaagattaccggccaattgctttatgtaatgttatctccaaactcatcacgaaggtcctggttagccgcttcaagcctgttttgccacttgttatctcggagacccaaagtgcttttttgccaaatcgtcttatcaccgacaacatattagtggcttttaaattaatccatggcattaagttgagaacatctggtcgcaaaggcgttgcagctatgaaacttgatatgtcaaaagcctttgatagggttgaatggcggtttattcagagggttatggaaaaaatggggttctgcgatcaatgggtaactctcatcatgaaatgcttgactacaacccacttcacctttctacttaatggtgaaactacaggctccctcacaccaacccgtggactgagaccaggctgtccactatcaccatacctcttcttaatttgttcagagggtttctctcggctgttgcaacatgaggaaatctctggtcatctccatggttacaaactcacaaggcgtgctgaaccaatttcacatttgctttttgccgacgacagcctactcttctgttatgccaatgaaagttcatgcctctctatcaagcgtgtccttgacatttaccatcgtgcttcagaccaaaccatcaatgctgaaaagtcaaatatgtcattctcaccaaacacaactctggctgcccaagttttttttccacagaacactttccatgccaattactgattgccatgaaacttaccttggactgccagcttactctaggcgtgacaagcaacatatgtttagtgatgtaaaggagaaagtttggaggttgatgaacacttggaatgaaaaaatcttctcatctgggggcaaagaaatccttcttaaggcagttgttcaatccatcccaactcatgctatgagttgcttttgcttacctactacggtatgtaataagttgtaatccatgatgtccaatttttggtggggccgaactgaaaatggctcacgcattcattggagaaattggaagttgatttgcaaaacaaaagccgatgggagaatggggttcagatcttttgagcaagtcaaccaagctctcctagctaaacaagcttggaggcttcttgatcacactacgtcaatacttagccgattgcttaagagccgatattttcctctaaactcctttcaagaagcctcacatggtcattctccctccatgtcttggcaggggatcctctatggtagagagttacttttagaaggattaaggtggaagtaggggaaggaatgcatatacaatgtggaacagatccttggatccctggaaacaactattttttgccttttctctacaaggggccagataatgctgtggtaggtaatctcattaccgatgatcaacattccagctgatgttgagcgcattctcaccattctgctaagctatttccctagcaatgactgtttgatttggcaccataccaacaacggcatctacacagtccagtcgggttaccatttggcctcatccttagctgaacaacctcactcctcaagctccaattcagattcaatttggtggaaatccttctggtccttacagctaccccccaaaaaggtaaaaatctttgcttggcgtgtcatccatgatgccttgccagtgtctacttctcttgttaaaagaaaagtcattactgataccacttgctcggtttgtcgccaagcttgggaatcaataggacatgtattttttggctgtcattatgcacggaatgtttggcgtttgacacatcattcttttgagtggaagaaagcaacaaccatgtacaaaggggattatctgaggtatttagcttcaattcactccaaagctgaattatttgcactctatggtgtctatggtctgagcgtaatcaagttcttcatggtaagaagtcacggttgccgtctgctcttgctgccttctccactcagtacctggataactaccgtgcggctcagctgaaatatagacaacctgcaacttcatctcaagtgccaccttcatcttctgctgctcacgcaccttggcagccgcctccaatgggatctcttaaattgaacatagatgatgccttggataagcattgcagtaaaattggtgtgggtgctgttgtacgaaattcagtgggacatgttgtggttgctctctctatgcctctaattggtatttttgcctctcacgagatggaagctaaggctatgtttcacggtcttaattgggttcttcagcaatagcttccagttacttttgttgaaactgatgccctctt

SEQ ID NO: 195813 - DNA, 1316 bp, Cannabis indica
cttaaacaaatgtgaatctcctcttgataataaaaatgtgttctagctctaatatttttataaaaggcaatgataaaaaatcacaatcatttacttttgtagtcataatcactacaaatagattatgatattggcctaattaattctataatttaaaattgtttagagatcattagatatacacatcttggtattaatttcaacactatcatatatttgatcataaagctatttaaaaaaataccacatcataaaaataatacaaaaatctcatttacttttgcatataaagattatgatgttggtctaatattccatgactaaaatttgctagataattatattattcttttattaagaaattacaccattatcacaacccacaagactacaacctagaaaataatgatgtcaaaagtgttgggttttggaaacatcacccaaggttttcagtgtttagtttgaaaaacaattcatggaaaattaagatcatatcaaataaataaattaaaaaattatgatgttggtctaatattccattattaaaatttgctagacaatacaatataattttaagattagacccaaaatctatggtatggtccaagtatgtatgcaaatcttggctgttcaaaatggtgggtgtaacaagtagtgaagaattattagtttatagtatgaaaagaaattcatggaaaattatggtgttgccaaatctaatttctgatgatattacctttaataataaggtatctgttgttgttaatggctctattcattggtcattctctcttgtctgtattcaacttattagacaaaaacgtgtatatgtaatagttgttatgatcttcgtagggaggagtttaagccccttcatctttaaaagataataaattttgcatttatggtatttcaaacttgtgtggttacctatctatggtcgcttcactattattagaaaatttatgaccgtcatcgtgtattgagatatgggtgaggaaggaatatggtgtgtgtgattcttggaccaaatatctttatttggacttgattaaccaacatctctacagacatgtgtatcacataatggtaacctcttattacttgaatcaaatcaaaataatagtgttgatggagatggagactgcttatttactctgtccatttatgatcccaagcccaagagccgcagggttcctaccttggtacttatgcagaggatatctttctgagttaaggcacaacatttttattcttagtttgctaattaattttcttcctcctacattctatagtagtgattttttaatatgtat

SEQ ID NO: 195814 - DNA, 1293 bp, Cannabis indica
cccacccctaatcgcctatggacattttccaatccctaaactgacgtgtaattatggtttaaacaaaaaagaaataatataacaataaccgattaggttgaacaactcactcccctaaatatcgatttctcaagtacacacctatctttcataaataataataatgataatagcaaatctgttatttattgtgcagggatggctgaatctgagattcaaagggttattcagctttctggtttcactagaagcacaattccttttaaatacctgggagtcccaatctgctcaaagagaatctcacagaatgaatgtaacattcttgtggacaagatgacagcccgcattaaaatttggagtaccagacacatttcatttgcagggagagcaatcctcattaattctgttctgctcactattcacacgtattggagtcacattctagtattgccaaagaaagtgattgttgagattgaaagaatatgtagaagctttctttggaaaggttccaacaatatgacaggagcaggagcagtggcatgggagaaagtctgtcattctaaagctgaagatggaatgggattcctaaacatcagcaattggaataaagcagctttgatgaagaatatatggacattagctacaaagaaagacaacttgttggtcaaatggatccatagtgtttatttgaacaatggagattgttggagccacaaggcttccatccatatcagctggtagtggaggaagcttgtggagataaaagatgagatgttgaggaattgtattcaaggcagattatggttgttgaatacaagatttcagagggctacaaaaagttacaacagcctctagaaagaattcactgatgtaaacaggtttggtctaagctcaatcatcccaaacatagctttattctctggatggttgtgttggacagactcaagacaagagacagactaaagaaaatgaaaatagcagctgatgaagactgttgtttttgcagcaaccaaactgaatgtattactcatctgtttttacaatgcagcataacaggggacatgttacaacagatgaaggattggttggttggaaggctcaatcaacagatctgttaacactaatcaggtgcattggcaaatcaaagaggagtaggttcaggaagcaggttttctctgctattattgttggtttggtgtacttcatatggcagcaaagaaatgataaaatatggcaggagaactcgagacagatgcacattcaggaactaaaatggcaaatcaaaacaagaat

SEQ ID NO: 195815 - DNA, 897 bp, Cannabis indica
atttactacctataaatactcgatatatatatatatattttgtgtatatatatataatgtagttaaagaagatctctcatgaattttgaagaaattaattttaaataatttaggatgctatgatttggattcaaactaattttttgttgaaatattgattttgactttctaaattatccattaggatttattttttgaaaatttgtgaaaagtctcctctaactatacgtacaccgtaatagaaaaaaaatgtagaattataatttattcataatatatattaaaattttgaaaatatgttataaataatcactctacctaattattatataatatgatagtaaatattattttaaaccgtttattttgtaaaatgataaattatattatatatgtatttttttttaaaatagtacaaaaatagttgcttgaacttaatttttattaaaataaacttaattataataatttgagcgtcaatgcaatgcaagggtggacctacatgtaggtgagacgaatatatatataatttagttagttacgtatatatatttataataaaaaataatatttataataaaaataatatttatagacataatattaactttagtataatagttaaactagattatatatagggtacctagattccataaaaaatatttatttttactactacctttaaaaaaaaatatgtctcgctcactttaaactctgagttcgcaattgtgtaaatgtatctataaccatattgattttttctttttttattttatgaaaactaagtttaatgtactattttaataaatatatttaatttgttatttaacacaacaaaaatgtgggtaatttttgtaaaatacattaattctataaaagagagagagagagaga

SEQ ID NO: 195816 - DNA, 1340 bp, Cannabis indica
taagagtggaaaaattaaaactgtgaaacataccttgccacctcagcactcgacagtcacgggcgaacaccagtgggggggcacaagcggacacggacagacacaggcggacatatattgaaaaaatagaagaggacagagaaagatttctgactttggatgttagggatgaggctcgctggattgagtcggccgctgggatgggaccccgctagagaagaagaagcagtcgccgctgtctttgggagtttcttaaattcttctagggtttttttggtcttagtctttgaatagtgactgtcgaaattgaatagtgaatatgaatagttactaaaagtgaaatgtgaataatagtgaatattattattttttaattttaattttaagttttaaatttttattattaatattattatttttaaatgtaatcaaaaaattaattctctttcactgtgtttttcgggttatgggttagaacccaactaaaaaacacccacttttaatacctgaacctgaaacccgtgtggggtattttcgggttggacccgactcgaccacacgagtttctcaattttggttttttggcagcgggtcggggcatgtggttgggttttttgggtttacaggtctaaatgttcagccctaccatttactatctctaccttctctttaacatgcatgatgcctgctttctcttgggcagtgaccacatcccgatcactgcatctcttaatgtagagattagcctctgccaccttcttaaaaacctcagcctcaattgcctcggggcccaaaggccaattgaaagcaaaggaagatttagctagaaggatagtgggaagctattgtggagtggctgagtgttgttggtttgttgtttttgttggtggtggtgttgtcgttgttgttggtgttgttgttgttggagttgttattattgttgttgttgttgttgctacagttggttaggagttacgggcagttagagccttgcttggaccttccaagtaggggttttggcccgccttaaatctccctcacctctgggagacttttgccttacattctacaacatggcctttttagcctctctcccaaagttagacagggggtcaggatgcttcaatgattgaaatttttttctaaagaaagacgtagccttccccactttcatctgccatcttgagaaggtacaaggacaaagcttccagaaaaaaccctattacgcatgagtggaacctgctagaggggttcgacttctaggacttcattgatggcaagagctccctaacccatagatgtcttctcaacacccgtagaagttttctcaacacctgcag

SEQ ID NO: 195817 - DNA, 1005 bp, Cannabis indica
ctaaaattagacaaaagtctttaaatctaacaatctcaatagttcaggtagaatttttaatgaccttaaaattcagggagcataatttagtacatgttaaagttcggaggaaaatttcctaattagcttaaaaaatatatatatatattaggattacttaagtcatccaatataagaattaggtcgtgatcaaattatgaacatatatattttcgcataaatcaacttgtattataaccatttattattgttgcataaatcaacgaaattgtgacattgattggaatattagctgatgttagaaagtgtatttataatactagtcgcttggatctttgattaaatatttttaaataactatcaaactcgtattatgtaaacaagtagattttttccgcttaattagagagcatattatcattagtcaccaataatgttcattgttcaacaccaccaagaggtagagctagagtccgttctaaactaagacagataccatttttaaaaattgcattgtatataaaaaagaaaacatatatacattttaaagggtagtccttcaaggtttgtatttccaaaaataaatttcaacacttttcccctttatagttcatcaaaaaaattaaaaaaaaaaaagtcgttttttaatgctgacgtttgaagttattgtcgtttatttcatgagattttcttgatattcgtagaagttattggtttttgaacaggttacgttgccttcttgaaaaaatgtgtttaattcgctgtaaacattccataagaaatcttgtcggtttgaaaatactactacaagagattttgtcgtttaattcaatacaaagtcgttgaatgtgtttgctttggcagttttcccatcccagtttaatttcttccttcccatctcatcaaagttaaattagagaaatgaaaacaaaaaaaaaaagtactaattaacactattgggcttggtttgagttaataaaatggaaaaaaaataattattattcc

SEQ ID NO: 195818 - DNA, 816 bp, Cannabis indica
aatgaagaaaactccttatccagcattgaactatacttttaccaacccaactgcaccaccaaaaacaaagatattaatagacctgaattctgaagcctttcataaatgtatatttctcacctattcacaaatccaaccgaatttgcaattgcaaaatgaattcatagctaactaacaaaccaaacaatgcaaatttgcaaaacacagtaaatcccttcagagcacacaaaaacccgccattaaaacccaatcaagcattcaaaatccactcctctacagcaacattctatacagcataaacaattgaacagagctctacttaaaaaattatgattctcaaattccctataatagtcccaaccaaagctcggatcaaacccgaaaaacacaattaaaccgacataaaaaataaataagaaaaagaaagcacaccttctgcagctttgaaccatgaatccattgaatgagagggattcggatctggaacaagtgtgagttaaatagaaataaatcaaattgagcaagcttccatcagtaaccaatgaggggaaaatccaaaacgacgtcgttgtaaagtggggtgaagccggagaaaatggaatgattgaatatcagaaaattaaaccgttgtatttgttgtgagttgcgatcagtcgttagttgagaacgaaggattgagcagagtaaaatcgaaggaaacttgtcacagaaaataattaaaaataaataaaatggttcggaattgcgggcctaatatttgggcttgggctgagttgggttactacatagttgggctgggataggatagaaatcggg

SEQ ID NO: 195819 - DNA, 714 bp, Cannabis indica
atgtaaacttcgatgacatttccaataccgatgacaactccgatggattttctgataaattttttgacgacgatgaaaaactctaacgaatgttctatcgaaggtgactgttccagtgaattttctatcaacgaagacttctctgatgacttttccgacaacgatgattgctccgacgaattttttggcaatattttttcttagaaatcttggtaactttatttatggtattttattggggttcctattttttaaaatatttttttctctaaaaataacatatgttgtgtgataagttttttggccataaaaaagtaaactaattttttttctcatatattgtaaactaggaaacaaaccgcggttcgcgtgtggttatattttatttaatgataattaagttaaacactacatcaaattttaaattttaatatttttatatatatatttttttttattaacatgagtaactattatagtgatttttactcttaataaaagaaacaaaataaattaatattatagaatcgtagtttttctagttataattaataaatgatagtttttaattaatttatttattataaatatatattattaaagagttaattttcaaatatatattttgtatacaaaaataaacttaattaggattaaaaaaataatataacaattgataaatttattaaatattcattatatgatttcaaaaat

SEQ ID NO: 195820 - DNA, 1440 bp, Cannabis indica
ttcaacatgctataaattaagcaatttttgtttagttagaatatttataatattttgataaagatacataattttttataatagtaaattatattaatagtggaatatatttatttccatatgttatataaaaaaaataaaataaaaaactaaatatttgaaatgtattggaatatactggagaatagattgtgagtgtagtggggtcaacttagtgaggtggagggattaattacttaaatatttgaaatgtatcgaaggagtcttttagaggcttcccaatgtacattggttggagcatggatgaattgagagagcttattgatgatgaaggcaacatctagtctagttaatgtcaagtattgaagtgctccaagagtgcttcgatatagtgttttatcttcaaagggtgttccttcagttagagctagctcatgagaactactagtggggcttgagcaagtcttagcaccatccaagtgcactttgacaaggagatctgtgatatctttactttgagacaaagacatgcctttagaatctctatgtatttccactccaagaaaataatgaacaactctcgtatctttgagtgaaaatgtagcattgagatcaccaataaactgttgtaaaagagttgaattaggtcctgtaactaaaatattatctacataaactagtagaatgatttgagtagaacctgatccataaacaaaaagagatgtatcagctcaagaagccttgaacccagctaaagagtgttattttaagcttgtcattccaagctctaggtgcctactttaaaccataaatgactttgttcaatttgcagacatgatgaggatgttaagggtctacaaagcttttttgttgagtcatgtatacagtcgcataaagatcaccatgaagaaaggcattagagacatccaattaccttacttcccaattaaaagttacagctaaagtgagaactaatctaactgtaactggttttactacaggactgaaggtgtccttaaaattaatgcatgactgttgaagataccctctggcgaccaatcgagatttgtacttatcaaggattccattagcatttaacttcactctaaacacccacttattgtctattagaaccatgtgaggcttataaggaactaatgtccaagtaccttgagaattaagagcataaaactcttttgctagtgaaccattccacactagatctttgagagcagatttcatagattttggttctcgaggtagcaaagattaagacagtctatgcttagttgccatataaactttaggcttgtaaatgcctttcaaagatctggtgatcatagaatgtgttcgaggaagtggaatagcaactgtagagccagatggaaccactggaacatcatgctgcaaagatgtgtttgcagtgttttcaacagtatt

SEQ ID NO: 195821 - DNA, 561 bp, Cannabis indica
ccaagaagtacattcaagttgaatacgggcatgagaatctcacaaaagggaagagtgatctaggtagattggcgaaccctcagatgcatgaggagcctcaaaagataagagaattctacgggggaaaaatgattgaaataagaagattatgagggaggaagaaccccagcgcagagtattcacttactacactagactcacatgttcgagggaccacatcttcttgacgaatgaaaatcgagtacctttcaaaaaaactgcctcctatgtggaaggacatgttgaagagagatcctagtaagttttgcaagttccatagagatattggtaaaaaaatagaagaattctcccatcttaagatggaaatcgaagacctaatacaatgggcatactaaggaggatattgtagggaggatcgatgccccaaagaatggaggcagcaaactcaaatgaagctccagacgtattgagagaagtacggtaagggaagggataagtatgcacgggaggtgagacaacctccaatggtcatgtgcttagaacaaaggccgtcaaagaatt

SEQ ID NO: 195822 - DNA, 1622 bp, Cannabis indica
tattgcaaatggggaaggtcaatcaatcattatgaataaatcttgggaaaacattataagctcagctgtaatgaacttgatgacaaccttagaaaccagatatgacaggctctcatggttctttccttttcttttttctttttttttttttttcaactcaacaaaaaacaatataatataacaacaacaacaacaactacaaaaacagtcaaagaaagatggtgggaatctgaatgaaataatgagagaagccggcttccatgtctgagagagctgaccttgtttaacaaaaaagagtgaaaaaccaaaaagtaaaactaaaaaataaaaacagcccacaatttatgaggatgggtcttatttatattgtaatgtaaataagtttgtagcttattattagtttttgcaggttgggttgatggaatttactctttgtggtcctgcaaatgataaaagaaggaaggtaaagattatttggaaattgattaatttgtggtataaatatttaagtttcatttctcgttctaaataaatatttaagtttaattttttaaagtaataatatttaaattatatttttagaattttgtaaattattacgtgagaatctctaatagatacaagtctgtagataatgacttaacatttaattaatagttacctacaaagtttcagaaaaataacttaagtattactgactgtaaaaattaaacttaaatatttattttcaattaagaattaaattattttaaatttatgaaaaaataaaatttgatgtgaatatctgaaatttaaaaaagagaaaaagaaagagtgtaatattaaattgagtgtggaaattgataaagtgagttggcctgtgattacggagaatttagcacatggaatcgtggagttgggtgactcatttgtgtaatctaagctgtaattgatgcaaaaatacaaagctttataaacaagtcgctttattgtgcccacaatataatttatacaaaattgcctcaccactcactctctcactaactaaattatttatagaagaaaaaaaaaataatctttacctaaaagatagagctcaaaaaggacgagaattagagattattgataaataatagtaaatataattttaagttttgttttttttttttggtaaaaattatttattgaattttttattttattaaatcataattaaattttatattttttaaagtagtataagatagactataaaatcaatttttaacaatttattgtttcaatataaccaatctaaagtagtatttggcacaaatagatggaagaaaaaaaaatgtaattgtaataataaataacactaggtcagattattattaagttttgatttaacaaaaattaagtttagaatctatttttgtacaattttaaaaaatatgagatatgaattgtcatttaacaaaataaaaattttaactaataattttcataaaacacaaaatttaaaatagtattatcagatctcgttataatatttcacatgtaactttttgaaaagaaaatttgtacataattattttcatactcaaattttacacttttttactattaattttttttaaattaagtgtacattatcatattta

SEQ ID NO: 195823 - DNA, 553 bp, Cannabis indica
tctcctaaaagtatgatgaactagaaatggtcaaagtacttgcacaatgtagggtatgtaatttgaagatttaactacttttttttataggttttaaactaattaaacagactaagaattgtgttagaaatagtattaatgcgacgcaggagataatatagtactcctggtactgttagatcaaatatcatgtatatgaaagcaaagcaaagccactcatatataaatatatatatatatatattaattagattaaattgaatgtcattgagtgtctttttgattgcacttggagacactttgacgacgctgctttctccaattttaccaagaatgggacaactctctcttaaaagtattaattataaccacaaatatgagggttttttttttttgttttttttttcaaacgtgtagctagtatacactataatgatgtatatgtggtcactagtgtttgtgacctggctcatatacatccttacgagacaataaattattattttcgaaatcatgagatttatataatttccttatcgtaaattattggaga

SEQ ID NO: 195824 - DNA, 1967 bp, Cannabis indica
aatacttagttgaaccaataacatattgacaagtaggagggtgctaggcaccactagtgccctttaacatttctcttctaaattataacttaagtatttaaatatttatttgcaacaagaaattaaattacgtatttatactttaaattaaggaaaattaccccaaatactattttttttaacttttttctttcaaatttacggtttggatttctagggtggttgtagcgctagttacaatttagctagttgcaataggagtttctgtgtagaattctgtaaaaataaaaaaaaaaaaaaaaactattttaaagtataaaaataaaaaaaccccttaaattaatgatatataataatagtaattaaaaacgtttcccttcataactaataatttattacaaaatatctataaatatatatatagtatttgaaaaaacagttagctctgacacaaagtcccttttgtttattacaaacaaatcttaattcacatctcaacacacaaaaatctttcttcagaatgaaacagagttcataacaataacaagaagaagattcttaacaatttgtttgtactgagtttgatcatcatggcggacgatttgactcggcagaacagtagtaaccggagtattagtaacagtttccggtcaaatactgtcaaggaaatgtggaacgcgccggacgcgtttcagcggagttcgaggcgagaggaggaggaggaggagttgcggtgggccgccatagagcggttaccgacttatgataggatgaggagagggatgttgactcaggtgatgagtaatgggaagatggtggttgaagaggttgatgttactaagcttggtagtcaagataagaagttgttgatggagagtattttgaaggttgttgaggatgataatgaaaagtttttggagagacttagagctagaaatgacaggtaattgattttgtatgtttgtttggttgatgagaaaatgatagaaaatttaaaaataggaagttggttttctttttgtgtgttggataagtgtttgtgttaatgtgttagttaattgtgaatcccagatcttcaaaattcataatttgatgtatttatttgtagagactcagagctggaaatgataattgattgtgttttgactgttttgttttgtttggtttatgagaaaatgaaagaaaatttattgaaaagggaaagttgtttttttgtgtttaataagtgtttgtggtaatgttagttatgtaaaatatgattaattgtgaatcccagatcttcaaaattcataacttcatgtatttatttgtagagactcagggctggaaatgataattgattgtgtttttgactgttttgttttgtttggtttatgagaaaataaaagaaaatttattgaaaaaggaaagttgtttttttttatttttttttgtgttgaataagaaaatatgattaattgtgaattccagatattcaaaattcataacttgatgtataaaaagggttgggattgaagtgacaggtaatgattcattgattatgtttttgactgtttgttttgtttggtttatgagaaaatgaaagaaaattactgaaaaaagggaagtagttgtgtttttattgtcggataagtgtttgtgttaatgtttgttttacaaaatatgattaattgtaaatcccagatcttcaaatttcataatttggtgcagggttgggattgaaattcctaaggttgaagttagatttgagaatttatcaattgaaggagacgcctatgtaggaactagagctcttccaactctgttgaattcaagtcttaacatgattgaggtgagtttcatataattcagctcataccaattactcttttttttttctttcacttctctaaactataaatcttatttaaatagggaatcattggaatgattggactcactccatcaaagaaaagagtggttaagat

SEQ ID NO: 195825 - DNA, 1214 bp, Cannabis indica
attttatacttaaaaaaaataataaatatagattgtccatctcaaaaaaataaaaagtaaatatatattgtcccagttcaaaataaataaataaatataattgtcggctttaactgccttcctagttcctaatattattttaggttaacgacaaagtcctcggacgaatagaatttgaatcattagcgaccatgcacggctaccaaaaaatttatatcaattagaaataaaaatcatatatagatccctaaaaaaaattaaataaatcataaagggttatccacaaggaacgaaatgatatcaagacaaaagtacgaaacttattggtataatatcattgatttttgtaagaaaaaaaaaattaattttctttgaaaaaagaatattaaactttaaactttaaattaatgtaatgccgtgatggcctgcaaatctttaataattaaatagtaataataaaattaaattaaggcacgtacttcatggacaatggaatttggctccgtaagttaagcagcgatgagtaggacacagccaaagaaaaagtcaaatattgcttattagggttgggaatttaaataattaaacaaactatataaagtaaggggtcttaatttaggaattaaaaaaagaacaaatcaattaaagttataagtaaacataaataggacatgaaccccagttttaggccacctctcggctcttcctttctcatttttatttgttgtttaatttaaatgttaaatcaatttattattctcaatcaacccactaaaaatgaaataaaatgagaattgtcgggtgttaagtgaaatccatttacttttttatatatatatataatatttggtagtttaataacaatgtagggtatcttactatcttatgaattctttaaaattggatatcgagttgtagaatctattttctttattcaatcgtgtcaaactacaatcgtctatgagggttagttattccattggaagtatatacgtacgtatatatttcaaagggaacttgaaagttttccaaggaacttaaaattaacttttgaaaatatttatatgtttggtacttggtaggccctccaaatttactctttttgagaaagtcttctgaaaataaaataaaagaaaaagaaagtagtatacaataaaattagaatcatacacatagcatataatgcatacatttaaaaaaaaaatagaattatt

SEQ ID NO: 195826 - DNA, 1222 bp, Cannabis indica
ttcgattctcagaagggttacggctttataatcccttccaatggcggccaagacttgttccttcaccgctccggaatccgatcccgccgccccgacggtcgtggtggtggttttcgaaccctcgctcatggtgagactgtagagtttctgattcgtccacataaaaaaaatcgtaccaaggccgtagatgttaccggacctaaccagggacctcttcagggacgaccttctcgtggcggcggtgatagaggaggacgacgatctcgcggccgttatggccaaggcggtagaggaagaggaggaggatatcgaggcggttatggcgaaggaagtagtggcggttgtattcattgcggtgatgttgattgtatggccttagattggtttcagagatgctatggtggtagaggaggaggaggaggtggaggaggatatcgcggcggttatgtaagtggtcgcatggctagagattggttcgagagaagtagcggttatggcggaggaaggtacggtggccgcggaaactgcttcaacaatggaggtgattatctcggatttgtttttttttggttattttcttgtctaatttttcgtatggaaactgataaattatgttactctttcgttaatttctctgaacctaggtcgtagcaaacgaagtaatcgtcgggaaatggcggcttcttcgtcatcgactaagccaactccgccgggagaaatacggaactggctggacttgccgcgagatgtgacggcgtcgattcttctcgtctttggagcgattgagataatgacgagtgctcagatggtttgtaagatgtggctttgatatctgtaaggatcctctcatgtggcgaaccattgatatgaggaacctcggcgatcctggctatgggttggactttataaagatgtgcagtaatgtcatcgaccgaagctgcggccaactcgttgatctcaacattgagtactttggaactgatggactgcttctccatgccgttactaggtatttttcttattcttctatatgtcatctcttggtataattaggggcagaaatgaaatgattaaactggctctaattgtgtttcaatttgataatttggaatgtttgttcttcattattatttaattattataaatattatcgaatttcaactgttgaatttgctatgagtttagtaattcatattggagagagtaaatccattcattactt

SEQ ID NO: 195827 - DNA, 2395 bp, Cannabis indica
tgagcacctgtagtgtctagcactttctaaacatgtcaccttgcgattggctagcgatactccttaaatattattatattaaactatatgagactcaatacttaattaaatcaatagctatatcataatttattcactggtccagaagctctcaagcttcagcatttacttgttagagaccaagctaacatgaaatccgctcaaagacctaccaatttaggtaaatatagaagttatttttgaaggaaaaaatatgcgtttttgggctcacccaaataacaattatatacaattttacataataatcacttaacaactatttaggtgtgtacttgaagaacctactacacctatgattgaaaatttatctccagcttgtcacatcacaaaggagttgaatcacgaacaatctcatataaggatatagcattttctacagtcaaaagaccaatgatacaccattccaagaaatctgactttctattttggatgacttcttggagaaaatgaatattatgctgcaaaataaaaaagaaaacacatcagtttcctttttgtatgggagtttcaccaaccaaggagcaaccaattctgttagttgctgttatgttgttaaattactgagtaaaaaaaatgttaataatcaagtttcagatttcagatttagaggggaagttttcaggactagtagaagagtggctatctcgaatgagctgttgttactgacttgtatgaatatttgtataatagaattgaaaaatatttgatacaaatatgccttgagtacgtgcacccaaattatgcaccaaaacattacaaataataacttccatctaaaattaatgtgattggttggttgaaagaaaccattgtcgtccgtcactgtaatatttgggtgcataagttggtcaacatatcattactcattttgttttgggcacttattttcctcctctttaaactaactgcatcctgttcatttatcttatacaaattataaaatgcataccacaacaaataaaagctaagaaagctccaacaattaaaaattcaaatacctcaataaattttaatttgaaatccaagtttccaaagcgttgtgtcacctcgtactcctcccaaaggtactcgtgtatttgagcgtattttgcatctctccaagcaatttccgatctgagggatgaattataaaacatcaaaaacaacaacaatatgtattcaaaatggttttgttgataaaataaataaataaaataaaataaagaagaagaaaacaaatgcactatggagagagatagtaaatccagagctttggttttgcgagtaacatgcttctcaaaattatcacatcatttgacttggaaaaatattcataaaccgtaaggcaagccagtctagatcggagtgtgtataatgtaaacattagaaaatctaatacccctcctgtttgcaagttaccattttaccattaccccttctgtttttttttgggaatgttttttaaaattaccacatagttagacttggaaacagaaacatagaccaataaggcaagccagtctagatcagaatttgtataaaatgtagaaattagaaattccaataccccacctgtttggtagtaaccattataaagtaattaagaaccaattacctctcaaaaataccaacttttagaatcacatcagctaagtttgaattagccttcccaacaagttgaagaagcttcttcttgtccatggtgaaagttcctgttttctccatcccccgatttatatcggcaaattcttgaaccataccatcaacctgagatagtgagatagtaagattcacaatgtcattacctgacattttgatcacatgaaagccattgcaaaaaattcaaccagttgaagaaataccaaaagtgttcctattggacttatattagtgttattcacacaaataatggttgtatcaaagcatttcagcaacctttacgtttttagtcacacaaaataacattaaaatactgataatatacctgtgaaacaaaataatctaaagcaatactctggccaagcacacttccgataatgcgaacaccatcagtgtctaatgttttgagagcaatgtagtctgcacctccttccatgtcctcaaccatttgtggcttctcttttactgtgtagtctgattcaggtaataaccaaaagaagtgaatgagcatgttgttaatgaaacagtattttgatacacagcaatatgcaaatcaaaccaacagtcatatcaccacatgcatacgtattcagttttacaatttaatcttgtaacttcaacaattcaaaaggagaagaaatttttagcatcatcactaatcatattattattagcacgaaccatctaggtgttatct

SEQ ID NO: 195828 - DNA, 2585 bp, Cannabis indica
gaatagatttgttgtagtacttttcatacaataatgttcagaaggcatcctaggtcatgttactcagttcatgaccctgagatacaattttccaccaaatgcgggtatcctcacgcaacatgtagatggcacatctaacccaatcattactctaaacccgcatgaagtcaaaaatggattatacttcctgaactgctcgtacaacagatccaaatgatttcccacatcatgtggcactactagaggtgtcggagggttaggataaggattaggagaaggtcgagcttgttgctccctctgctctcaaatcttctcacctagctggcagatggtctcttgcatcgtgacatacatctcttcccaattttgaggtagtggagggttcgcaccctcaccgccagccccaagcccagagagctcgcgattgaccttattagatcaccttgggtgcatattctaatacacctgcgaccataactttccatgattagaatctcccaaaccaaaattaatgctaataagcattaccgcacatgcataaacatattttacaatctttatcaaatcctatcatgcttctctaacagcttgcacattcaaataagcaggtaattcaagagattaaaaagtaatcttataatcaactaataattaacacttactgtaccatgagtcgaacgagtctttgcagccaatgtacatatgaagccagtcttcaggatgtttaaaccttggtcgcttagataccatgttgtaacgccctgatttgtagggacgccacatgtgtgttgtgcttttattaattagtttataataataaactaacagttttaaaaaaatgtagtttaattaaaacttttgatataataacttaatttcataactaatctttctttacaaaatgccactggttttagggatccccttttgtttacaaacatccaaaacgtgtggcaaaacagctgttacaaaacaaagctacattttcaaaatataaccaaaagatggatcccgtccatagagagccaagacatggcggctgatatgtacatcgctgggagatctctgactcatgatatgcaccacaaagtatctgtgagtcataaagactcaacaaagcaagtaaaatacaaatattgcataacggtagaaattataacaatgcataactaataatttcatcatccaatataaacatttattcgatatgtaaacaaacattacatgaacaattatttatctcataagacaacatgactttgatgcttcatcgagcatccttaccgctcgttaccaacgaactccatatgtcactaccgttgcccaatgaagcaatcgataagtaagaaacctattcgcagtttcaagtgagtaattactcattctaagtaactgtaattacggtatctttacctcaatcatcatcgagtcattaacgataataattgtatcttattagacatgctacacagtgcaattgacttttcttacctcaatccaataatcaggtgtgcgagccgacctaagtggaacaatgctcgatgatcccgggtcctatatcatgaccatgaaacttgataaacaacttgatcaaatcctggaataaaccttaattccacaaccagataaaccttaatctctagcaacttagaaaatagcttaaacatcactaaaataccctaaactaagttctagaaaacaccctgagaaaaaccatatttgagagaaaaacctagagttacccttgctagccaactagttgaccggttcactagtgacatatagaaccaatcgttcaattcttgcaaaaataagaaattctagtttttcacatcgagtccacaccaaaacctcttcaaacctgttcaaaccttccagaatagttccacaacataaaaacaacgtgatcaaacaataaaaactcaataattcctcaaaaacacaaattcaccattaaagattgaaaattgagttcttaaactaaattctccacattcagatcttaacatccaagaaatcatccaaaaacacttacacaacactgaattaaaacctagaatcaaacttgaactccaccaacaccacagaccgaagtcgacacaaaatcctcaacaaaactatcctagaaccttagaaatagaaagagaaaggatgaaaagcttaccttatggcttgaacaaccctaagccttgctaatttagctaagaatcggtagatttgatgaagaaatttcccttattttgctggtttctaggactgtcgaaataacgggaagagaaacagggttttactttgatttttgatttatttattttttttccttaattttcaaatttagtttataataactcactaagacaaaagttgatttcagcctagtaaactctacgtttttgcgaataaaaacaaaagctagattcttaacaactgactattttacccttcttaaagtacttacgttttttaatgacctaggagtaatttggccattctctaactatcctgaataaaccgccatccaaacaaattctaactaatctggtataaaacgtccaatacaactcatcttttattgtcgtgatatt

SEQ ID NO: 195829 - DNA, 725 bp, Cannabis indica
ctttaaaaattaatgtaacaatttatattgatgtataagatagtttgtggataacattgggatgagcattgtatgcttctcatgatatttattttttaaaaggaaaaaggctataaatagtggccaaattgaagagaacactcacaaatatcaaagcaatcgtactagtatatacatacaatattatttttgatcattctgaaaatgaagatgatgaatattgaagttgaaccaatatccaatgagcttatcaagccatcttatccaactcctaagaatcttgggagttacaaactatcattactcgaccaatcatctcccaaattctacgaccctttactgttttattacacaatgaaaagtactactaataatactactaccattattccggccatcattctaaaaaggtccttatcaaccatcttaacccattactaccctttagctggacgactcgaaaagcatggacaattcatcaattgcaacgacgagggtgttctcttcgtggaagctcaatcaaaagggcaactttctcaagttatgtccaatccaatagctcaagaactcaacatgttttgccctttaatttctcgccatgatgaaggtgacgatgttcatcaaattctatttggggttcaacttaacatgtttgagtgtggaggaatcgttgttggtattagcttttctgataaaattgctgacgctttgtcatggatgagatt

SEQ ID NO: 195830 - DNA, 688 bp, Cannabis indica
tagtattaaaaaaagctagtgtaagaagaaagaaagaggcaataaaaaaaaaacttcattaaaatttaaataaataaaaaataataaaaaaaagggtacaaatagtataaatataaaatcatttaccacaatataaatgtaaaatttgaaaaaaatacagtatcttatgtgagaattccaaaaatatttatctcatacgctaaacaatatacaataatttcaaccttgaattgaagagcaatacttgctaacttggttgaaactctttctttactagattcgtgtcgtgccacatcttggtctgttccttatagatttttgcattctcacatgcttcgtttcgaaaatctttcaactcattaagtttcaacattcttttctctctagcagccgccaaatttgcgttcaaagttttcatggcccaataagctcgatgctcgagctctaccggtaaatgacatgccttcccataaactaacttatatggcgacatgcaaatatgagtcttgaaggctgtactatgtgcccataacgcatcatctagtttcttagaccaatccttccttgaatgttgaactgttttctccagaataagcttgacctctcggtttaatttttctgcttgcccattgctttgagaatgataaggcaaagcagtcctatgtctcacttcataccttgcaagcaa

SEQ ID NO: 195831 - DNA, 1431 bp, Cannabis indica
tgaagtgtcttgttatttgatgttgctatacaacatataaaatttgcgaatcaatgctttttttgttgagcaaatccaaggatacctaagtagttcttagtcgtagaattcccgcatgtgtgtcacaatgttaacttctactagcaacatgacttccgagccgaatgctagcgaaaaaggagtatgttccgttgctacttttttctattatccgatgagcccagagtacttggggtagtttctctacccattttcccttagttgcgtcaagcttcttttcatagtgtctttcaaggttttattaacaatatcgacttgaccattggcttgtggccttgatactgaagagaagtttttaataatctttttccatttgcagaattcagtgaacaaatatccatcaaaccgagttttgttttctgacactatctttatgggtattccaaacctacaaatgatattcttaattacaaagtctaagactttttttgaggtgattgaaaatattcatcaaacctaccggtggtttgacttcaatccatttagtaaagaagtcgactgcgaccaccgcatactttgcacctcctcactcagctcgtaaagaaccaattaaagcaatctctcatattacaaatgggtaaggcaaagtggtggtatcctgagtaatgtgaaaatcgttggcacttgtcacattttttaacaaactcatgagtgtctttattgatggtaggctaaaaataaccttattagattatctttttagagaggctctgccatccaacatgagccccacaaaagctctcatgaatttctttaatgatactaccagcttctgctgggagtacacgtcgcaataagggcattgaatatcctatcctacaaagtttgccctcaataactgtatatctcgggatcacatacatgagcttctgtgcctcacttttatctgttggaagttcgtcgttgagcaagtactttataataggagtcatccatgtgggacttaaatcaattatttctatttcttgctcttcagcttcgcatatacttggctcgcataatacctctacttgaactaaattgaggttgtttgatttgaattacgatgccaactttgctaaagcgtcatcgttagagttttgttctcttggaacttgctcgattttataataatcgaacttcatcaagttcttccgaactttctctaagtatttggccatcctggtgccttttgccttgtattcacccaacacttgatttacgatcagttgtcaatcattgaagcattgaattgcttcggcctttaaggcttcaacaatctgtagtcctgctagcaaagcctcgtactttgccttgttatttgatgctttaacttgaaccttaatgcataatgaaatatgaagtttttaggagatattattatgatacctg

SEQ ID NO: 195832 - DNA, 3438 bp, Cannabis indica
tctctctctctctctctaagtattatcattttgatctaaaacctaaaacttgtttagattgaaaacccctctcaatataatcaaaaacctaactcaccctctttcttcagtatgactgtgaacgtaaccctaaaaatatcactctcacatgcgcttctctctccgaccaaatacaatgtccgacacctctctctcatcgtctttatctgcagtatctcaatctagtcgaaccactatctcatcgctaacggtgactatggtatgcgataacatccttctcgcgcgagttctatgtgcgactctagtgtcctcatatcttttccatgatctcgttttgagaatgccatggaccatgcgggtgagggtcgatggccgtaaacactgagaatgacatggataatggaacttgcgtggagggtcgatggctaagaactctatgaaccccgtctttggtatgtaacaactcttttcttgtattttttttcttttcaatcttgcatttatcttcttagatttagatctatatgtttcaagatataatttatttagaaacttatatttgtgtggacccaaagggatttattagtagaagattctgagtaggcatgttgtggagaatggagatggagctcgagctggtggtggggagttattacaggcggttaaatagtggtgctcacttttagtcaatgacaatgagtcaattaataagtaattaagaatgtaattaaaatagagtaaaaaccataaagtaataaaaagcatcataatttaaaaaaggttcggccgtgtgagtgtggtaattgcctactcctcttgaattgtattaacctgagagaaagaacgaagtatttttctctctaaaagctcttacaatgaatctctgagtaattctcttagatctctctctgaagcaattctttcgatccctctcacagtgaggctaagtcactatttatagggccttaatgcatgagggaaggttttccttttgcttacaatgtataaaataggaaattacatttattacataattatgatacacgaagtaggaaactaaaacaggttgccatatttctctaattcaatcccacgattgtagggattgccttcgtgtcttggcatcgcaggattactttgaagtaattaactctttggaagtagttcggcaagccagacttatacttgccttaatgatctatctttcatcctgctcgggtaatcaaaggttatacatgctgacgtacaatatagagtctattcaggacattcacctccgcccaggtacaagaaatgcaggacacaagtcacctgattcttttgccacgtcaatgtgtaaaaaattggattacatttgccccctagtctgtgcgggcccttcgtggtcgcacgtggacttcacctgggtgacgcgtgtctgtggtgttgattgatgatcttatgtgactctgatcaagagtctcttcaatttcggcttactaatgctgattgatagttttatctcgaaccatgcctcaaaatttgcacgtgacgacggttattctgcaagtaatcgagtacataatgtacacttttggggggaatttgagacatttaaaatttgaaatgattactcatcttctttgatctgcttatacataggactaaaaaccctaatcaacaacttttagtcatttttattcttgaaaaattagagcaaaaatccttttttctcttaatttcttcaaagaaattcttagaaacatctggccagtgtcgtccaagcagatcaaaagtttcaaatcagtgagcaagttcttcattttctccttttttatacattcacatgcttaattttctggatttctccctgtgaaacttgattgttcttgaacatgttgtaggagaatcatagaaattctaggtttaagacttagagatcttaattatgcctaatcacgtgcttgatcataactacattttaattttaaccacacgacactcattttcacttacccatttggggtttagtgagaatcagaccttaattcaaaattttgaacttctgggttgtaaacttcattattatacgaaatttctgtttttgatcctccaatcaaacctggtcagtataatcaacctattttcattcgttaccctgaccaaactctcatcttgtttcctcccttttatagatgaactctggtgagttttggggaggcaaacatcatatcgaccaggatctacttcaacttttatacaaagatcatccttgcctctatgctagtccgtcttcatccagtaacatcctttccaattctagctttgaagattgggaaataagtagtaagcacagaccttccccagaacctgaggtaccacaccacttttatcccggccatatcgaaggccaagggtacggacacttcatctaagagcttagaaaggggtggagatgctatcttccatccaactggacatatattgttcgtctagatatcgttgataccttgcgcgtaggctgtccaagtcctgctgctgtaggtaaaatctttgccacatttatcatgactatttctaggcacacaaataaagttccgtccaagcctaagatgatggtgcaaaccaagaaaactatgcggaagtcttctttgtccgacccgcaaatttcccgtctcactacattgccaaatgttgagcacgcccagcctactactgaagaggaaaatactactggggacattgaagtccaagagatggaggactagggcaaggttcgtcctgatacttcttctaaggctgaagatgaggaaggtgcaactcgaaggctgccatttggtaacttaatgaagaaggacaacctgtatctaaggtcgaggaagtcctagaggctggtgaagattatgtcactgggaatacaccgaggctgttcctctaaggaggcaaggcacactatgagatcagtgggtttctcctccacctttggtaactggggcaaagatgaagaatctgctcaagcttggttaattagggaatgtcgaatgcttccttccctcccccaaccagttggcgactagtccaagggaaggttactgcacttggttgggcgtccataccaagaagggtgctatcttacccttccttccgtactttaggaagatcgaaaactactaccgcctttgcacgacccaatttactcctaagggcatcaaatacgtatctatcatgttcatcctgtatgccttgcaaggatgggatgagccgtccccacattacaccaactggctctttgatctgaagtcaagtcccaagcagaacagattgggatacttctatttttctctgatcgaggagaagtggttgataggcgccacagataccgagctgagtaaaatacagaactttgagatgagtattacttgtctagggaatggacactgtccacaccagcttccaaca

SEQ ID NO: 195833 - DNA, 1297 bp, Cannabis indica
ttgaaaccttcaattataaatgtaattatatagtctaacaaacatatcaaatggtataaaaacttctaattacatacaaatatttcaattatacactagttgatttccaaaagcatttatatttatttgtagccgttgaattttttttaatttttattacacataaatataacatattttctctttatttttcactatattagatttgatttgcaaattaaatgacattattatagacacaaatatggagtgatgagactatgaagcagcggttacttacttgtaccaatcgtcttcattctgcctgggaccacgcagctcgttcctcaagctcatgcccactacattagtgtcacctttgaacaatgtggccatacgagtaagcccatcaatccacaaatctgggtcgaagtactcctccccaaagaacccattcccgtcacttttattgttacaacaccaactgggtttgcttacatgattgtccaatatcaccatcaccttcccttttccaagctcagatacaactccctatacataacatatacacaaattacacaataagtatttataatttttaacgtatatatatatagtacgtacctggtaggctttgatgaggggaatatcgatgatggagggattatttgcctcaataccagctatagcttcataaagaccgtatctttgaaaggactgtcgaactgtgagagaagcaagtgagttgttggtggccaagtagactggccaagtgagacgaacacagttaaaccccattgaggagattcggccaacgatggcttctatgggctgcttgttgaggccttcagccagtacaagctctagatgagaaacccaattcacgcaggagagtttcactctcttcccgctcatctcttccacaatccatcttgaattggtggtcagtggaagaccagtcgccggggctggttgggatactaagaagattattaatgttatgaaagataaaatattaagtgagaaatggtgtgggtaagaggaacttccagtcttcatgttatttttgctgtttgaattgtagtagttatccatacatttatagtaaaggtatagagagatatattttcatgccttatattattccccatttgtttttttttttttctgtgtaattaataataataataataataataatatgctttagcttttttttttttttatttttttttaattttgtaataatatgctgtattgttaatttctacttattcaaaaaacaaaaaaaataacactctaataaaaataagtaaag

SEQ ID NO: 195834 - DNA, 1370 bp, Cannabis indica
ggtactttttttttaaaaaaaaaatatattcattttcttttgtagcaatattacaaaataaaatctaacaaaagatgctccctgtaactaattttttaataaatttattttattaaaatactagaaatacttttaaaaaaattatgttgttaaaactgtttttattttttaatttaaatttgtgaatcactttttattttgttttttttaaaaaaaaaaaaatatctttccaaaaacttttaaacacgttttggttaattataatctatttgtttatctttcaaccccaaccctaactcgggacttgaccctagcccaagacttgagccccagtactgaaccccaaacctggacttagtcgcggaccccgacctcaacccagacccgggactacagacttagacttggcctcgaacccagcctcagaacccgaccccgatcctggacccaaacccagccctgaaccctggaccccgaacctcggaccttgacctcgaccctggacccaaatcccaaaccctagatccagaccgcgaccttagacccgaacctggaacccaaaccccgaccccaaaccacaaacctagacctcggacctgaccccgaacccaaacccgaacccagcacggacccagactttggacccgaacccaaacccagacctcgaatcctaaacccaaactcggccccagatcccataccttggacccggaccgcgaccctcgacctaaacctagaccccaaatcctagactcaaaccacggaccccaaaccctagacccgacctcgaacccaaacctgaactcggcacggacccccactctagacctgaacctgaaccaaaacccagaccttggacctagaccttgactctaaactcagaccccgcaccccacacctcgaaccccagacctggacccaaaacctcagaccccgaagcccggactccaaaccccaaacctaaacctgaccccgaacccaaccctagaccccgaccttgaacccaaacccggccccaaacctaggaccccgaccttagacccaaactcgaacctgaatcatagacccgaaccctacaccccaaaacataaaccttggacccaaacccggaccccccgctccaaatcctgacctagacctcagccccaatgccgaacctgacccgatctcgaactcctgaccccatccccagccccaaacccgaacccgaactcggccccagacccagacccagaacctaaacctttactccccgaacttcgaaccccaaaccccagaaaccgaacccaaacccaaacccgcatatttgtatttgaaagattttaaatttttctatacaaacaaaaataatatttcaaaataaattatgt

SEQ ID NO: 195835 - DNA, 3214 bp, Cannabis indica
caaatcgggtatccccaaataatctaaaagccagtgtgcttctagagaaatttaatgcttctagaatccttagtacctccaactctggcatccctgaataatacaccgaagtcttctgaacattaggctccaaaccagaagttgaggagaaaagtttcaggcctttgagcatgagcattgctgaaataaagtccccatggcgaaaacaccaacaagtcatctgcaaaacagaggtgattcagtttgagggatgaacacctgtcatgaaatttgaatccttgccattccccaatcttcttaaatattcgagacaaatactccatgccaagaacaaaaagaagaaggggcatggggtctccttgccttaaccctctctttgcttcaaaaaatccacacatggaaccattaaggagaagagaaaactttggagtcttaatacaattcataattaattgtatgaactgcataggaaactcaaaggcagttaacatctcctccaagaagtcccaatcaatggtgtcttagatctatcttgatcatgcaactaggcttacaattcttccttccatataatctgaccaagtcttggcaaaccaagatgttatgtgctatatatctcccatgaacaaagccaccttgattttctacaataagagcaggaagaattttcctaagcctattgcaaataaccttggtagctaccttatatagtacattacagcaagagataggactgaagtcaactacacttttaggacaaactgatttgggaatgagtgtgatggtagtggcatttatttctttgagaatcttcccagaattcaaaaaggataacacagcttcctcaatgtccttaccaacaatttgccattggagaggttaattgtatactaaaaataaaattttagtttgaattgttagagaagatgagagaaaatgaggtttgagagaaagagagggacggttgggaggaattgagtgagtataaggggcattttactcaacataattgtatacctattttttcaatattgatacacataagtttaattttcccctaatgtatgcataattagtcaaatttccctactgaattgggtgatcgcaatatccttaactaaagacatgctgtaatacaaattcaagattcgtaaagtaaatatgggatttcattacccctatgtagtttttagttgtataactaaaattatttaatgaaactttaatttggatattttatcgtacttatgtgtaccttaattttatctgagaaaattatcgtaaaaggaccagaataaacataagatttagagtttgttcgcttaagtatattgtcacatgaaattatataatgaatatatatatatcgtaatacatgaaagataatactcaccatataatgaggacctattgccatgattcatatatttgttatttagcttggataatcgttggacttgagtggcacattaatataatatcgattaagtgagagaatataagaatattttctaatgttggaattattaattatattaattttaagtgatttaactaaaagtcagtatttagtttaattgataaatattcgaaatgtggtcaacattatttaattactaatttaatttattttagttgtccagattatatttcctcattaattgttaaaatattctgacaattaattgtggcagagactttaataggaggtctcacctacataaatacagggtctcggtgaaaaataataaatctatctaaagatagtagatcgagcttggaatcccgattacccacgctaatcagtttcctttgcagatcaaagcttgtgtgagattgaagctcaaagatttaatgactgaaggtatttcgatcccttgttcataatgcatatatatttgattaattccgcacttcatacacaatttatatatgcttcaggttttacataaaatttgtaacattgattttatatgtgttgaatagcattagacatattctaatttttatgatttacaaattatttgaaaaattagaaacttaatttgcatttttttggactgttccggggcactgagtgtcaaataaatttttgtacaaatatttatacaggttatgatttttgagtttattcaaaatacagtcgttatgctgtcgatttttttttaaaataaaagagaatgtgttcttttgttatttttattatatgtctgcttttaattatactgataagaaccatattgatcatgatttgtgcatattattgtttcacgagctagtctctatgtcatcataggtagatcaggtgtgcactcacctatatgtaaatgacttaaaatctgtacagaaagtgaattgaatttgagccctgatattatgatagttatcaggtgcgactacctaatttttagatgtcgttttttataattagtattgaaagctaaaaaatatttaagaacataattcgttacatgtcaaaattcaagggcaaaaatcttaacgtacgcttagttcccagtccactataaaactgaaaaagagtgattctcctttctcttttgatagttttgttgtatacgctaccaaattcaaaagtgccacgtggtcattcaagaaagcgatgtgtattctcacatagtggagaatcaagatctcttgttaaaaattggtatttatattgtgttaaacctatcaaagtttgatatcaaatttttttttataaaaaaaattaaacttctaataaagttaacaaaaatagttaacatatttaatataaattaaattgatgtgtcaaattttaataaatttaatagaatatgccacctcaatttttaataaaagatcttcattccacagtagagagagtaggtctagtcttctcattttatacctttattttttttggcgggtcaagtaaagtaaaactattttttttgtcttcataaattccaaaatgtattaaatccatatcacgttaattagctagcacgtattgcccaaagtaaccttataatccaattccgccacgtgtctaatagttaatcttgaccgtccacgtatgcttcatttgccatgaagctgtttcctttctaactaccttttaaagtgatcgaaccaccagaatacaacctccacctcaattatcaaatcctacggagaaaaatgcgacacgtgtattttgaaatattttggtagttacgtttttttttttttt

SEQ ID NO: 195836 - DNA, 1457 bp, Cannabis indica
aaaaatcataattagccttaatataaacatgggatctactatctatcttacataaataaaaaaaaaaaaaataacttattagtgtaaatactattttagaccttatgttttctaaaagttactaactggactttctgttttgttaaataataaaatggacactgtattttctaaaatagtacaaataggaccctgaactgattttttatcagcataaaacttaataataatccgatctaaaggtattatgacaaaactctttacattttctgtatctgttcgcgttaggaattgtcttcaagttggttatattaaaaaaatattgtcaaaaattaagctcatggtcatatttttaccattttgaaaagtacagagtccattttgtcatttaacaaaacagatggtccaattggtaacttttacaaaacacaagatctaaaataatatttactctttatattttggtattttcccttaagtaattttcatttctttatcgattaagattttctattaaaaattagattctcgtaatgtattaaattaatttaagtgtgagtaaactcaaattactaaatttatattattaaaaatttactactttttggaaattccactaaccatttatagggtttcttttttctaaaaattgtcaaattaattaatgtgtgaggattagattgatttaattaatatattatgagatactattttttaacagaaaattttaatactttaaggatgtgctttacatgtttttttctttatgtttttgtttcatttgttttaagttcttttactttctatttttataattttttatttatggatttatataaatgcttttactttttttttgtcttctttatagtttatattagctattttcttttcttctttttgttttattttttaccataaagagtttttgtcactagattttaatattgaaagtacaaaacaattaaaaaatatgcttatagggagcagaatgaacactctaaaaaaaaaaatgcagtgagccacaaaaggtcatgtgcccctacatgactccactcaagttacaaaaattatattttgatgtaaaagatcttaaataattttaattttgtctcaacaaaattaatttctagtacttcatccttataaaagttatataaatatatatatatatatattatttttaatattttatattcatcctcataaaatttatatatagttttatttttttatttttataaaattttaataagtttctcgaataaaattaatatttttttattaatatcctatttatatataaaaaaaattttgcctagctcctctaaaataaacagctgactccaccactgggattgatgcatcccttgttgttttagtattaaaaaaaagaatttaatctaaatgttttttcatagtcaaatgtgttacttaaagttatttaagacatcttg

SEQ ID NO: 195837 - DNA, 1028 bp, Cannabis indica
aggacatggatgagttgagagaggccaatggatcatgatttggtcaaatttacttagacaatgaaatgatttggacaggtggtgatccttatcctattatgttaatatatagtttgatttttcattgaatatacgtacttgacccaaaaaaaaaatgttatgagtgtagggtctttatattatatagtattacaaactgcattgatatagaaattgatttcaatggttgttgatatctatttaacatttttttttttcttgaaatggacatgtaagtgtaggggctcctttattagaggataaaattggttacagaaaaatctaaaaatcatacacctcaataacaaacttgtcacctcaattacaaacttgttagagaattacaaaaagaaatattcccaaaaggattaaaaggaaaaatagcagctacacggattgttgatgtagacactaacattgaggttaatttggctattggagggatgttgagttggacataagagctgacttggacagggtcattttctaacacctcctctcaaacttagcgatgatcgagtcaccctaagtttgtctattagaaaatgaaatcttgcattagaaaggctctttgtaaggcagtcgacaatttggtcacttgatggcacatatcggatttccaatgttttttttttcagaaccttattccgaacatagtgaacatccagttcaatatgcttggttctggcatggtagactagattcgaagcaagggcactaactcccatattatcacaccaagttataggtatctcaggcaaaggaaatttcaactcttgtaagcccatgatagctcggcagagacatgggtaagggccctattttcggactcggtgttggagcgagaaacaatgacttgcatctttgaggaccatgagaccaaggtgtctccaaagtacacatagtagcttccaatggatcttctatcatcgggacaacacaaccaatctacatctgaattgccagttaaggtgagtctttcacaaggt

SEQ ID NO: 195838 - DNA, 2833 bp, Cannabis indica
tattggtaacttctattataagttaaaaaaatgtaactatatggttacaataaaatgtaagtcacctttaagtaattatattaagaattagtaagttaatatttagtattatcttctcattcgctgcgaaacgcggattatttactagttagaaaaataaaaaaaaattatgtatattatttcaattgtatttaaataaaatttaattttaagtgatttagaattagtttgagatatttatatctattggttttttttttttttgtaaaaaaaatatatctatgtatatttagtttagaaataggtatcatataaccgttttcaaaaaagattaaaatgataaatgtaaaatatatttataaaattaaaaattaaataaatatatatatatatatatatagtttaggattagtatgacagtctataaataaggttctcaacattctcactctccaaatcgttgatcaccattcacctccttaaagtgtttctaagctctgaaattagaatcctcggactacgataccataatcaaatttcgtaacttttacttttactaataaataatgtctggagaagaggaagagaatgccgctgagctcaaaattggagatggtacttcttctaaccctctctatcattctctctcttaacctggaaaatttaacttcagagcatcttaatcacgaaaaacaataattgaattattttgagggttcctattcttttgttttttgtttttgaggtaaggaaattattaaatttgttggttttacttaatattaggttcgtaattgggcaaataaaaaatctgtttgtttgaattattgttcttgtttctgtttgggagtttgaccaaaatttgttttttctgagtttattattcgggtttgtgtgaggtattattttgctgagtttgtgtgtttaaaccgtgagctttggttcgagtttctggacttgaaccatggttgtttgaggttcgggtgtgagcagttgtaagaataaaagaagaaaagcttgaagaaatcaaaaccctaacaatcctaacctacccgtgagtttagagagaagaagagaaagaaaattcaaaaccctagaaaacacatttttctgaagaagagatttttttaaccctagaacttgtgtgcggctgtcgcaagaagaaaaaaaaaatttcttaacccataaaaccctagctgccatttctattgagagaaaataagtttgaaattttttgaatttggaagaaaaaggtagctgccgaaggtgttgtgttaggggtagataatttagcttttctattgtggaggaaatatacatataaaacattaattataaaacaaaattaatatgaagtaaatgacaggattgaaaaattatttttttctctttgtaatgcatcagaaaaactgacaaaatattcatgtaattatcaatagttagcttcatgaaagaaaaaacaatgggtagatttgcttagtttaaattggtctattattagcaagattgttattgtagcattaattatcattaacaatgaaagaaatcaacaataagtagctagatgaaatctgaatcatttgatattatacaattgctcgtgttctttatattttatgagcaaattaatccagatcaatgcctctttaacttgttgttttcgttcttctctcttttagagtttttgaaggcaaaatgtcttatgaattgtgaagttgcgctcattcttgaacgtaaatatgatcagcttcaacaaatgtctgatgatccgctaaatcaagtttctcagtaagtaccagaccttaattttttctaccatcaagccaaatgttaagttcttcaattttaatggcttcggacaacatataatttgttgattaggatttgtgttcctacttcacgtaaatgtgttatttcatatcataatttgttaacatgcaaacgaaattcttaagtcctattggctattttatctctttttcagggtgtttgagaagtctctgcaatatgtaaagaggtttagccgctataaaaatcctgatgcagttagacaagttcgagagtatgtttaaatttgtgataatattcattgattataatgttgttttggttattaaatttttgaatactcatgatcttgatcttttcttccaaacttttgtccatctcgttgatcttaactgctgctcttcagaattctaagcagatatcaattggctgaatttgaggtaattaatatgcttactggtgtggtaatttttagttaaggatttaattatcattctgtgaatattcttacattctgtgaatattcttacaaacagttgccttaatgtctccttgattatgcagctttgtgtgcttggcaatctctgtcctgaaactgtggaagaagcaattgctatggtaccatctataaaggtataatgttatttcactctcttttattttgcaatgggtctcatattttagaaaaaaactattttttttgcattttttattagcaaatgttgtctaatcttaacaggattcgtaaaaccaatcccttcttttttctttcttttttttttttttatgaaactaaggcaaggatttttcacatatgtatatggttttaaatgtattgcagaccaaaggaagggcacacgatgatgaagctattgagaaaatgttgaatgatttatcattaataagaaatttgagtagcggcttcatctgctatttttatttactaatgtaatttaagaatttagaatttggtaagaatttttatcatgggatcatttctttgataattattatatcattccgctactttgttttaatgtattaa

SEQ ID NO: 195839 - DNA, 1390 bp, Cannabis indica
gtggttgtaggtgctggttcttgtattggtggacgtctgcgtctgcgtctgcgtctgcgtgtggttgtaggtgctggtgcttgcactggtgcttgtattggtggacgtctgggtctgagtctgagtgtggttgtaggtgctggttcagcttccaattcaggtgcttggtttggtggtgttgctgattcaagtgctcttgcttggtttggtggtgttgccaaagcggacacagttgtcaatgagttctcaccattctcatcatcatcatcatcatcactagtatcaatatctcctataatgatctgacacattataacatcaaaacatagtacaaattcagtaaacacaggattctaataaatcataaacaactaattaaagtgtcattcattcaccagttgaattggattatcagcaggaagtagcactcgtgcaactccaccaaaaactttgaactctgaatcagacaatgaaacattcacacttgcttcttcaccaccttcctccattgaacaagtcagagatagaatttgaaacaaaccctgtaacacaattcatatttcatttgatataatcaaaattatcatgatgagggtttgatagttaatagttgttgaaacatgcctcgtattccataggagcaaacatatcattgtaatgaatgttggcagtagacacaacgccataagcagcaagaatagtcaaagaaggacaagttgaagccaatcttgtaatttcactcacaatatcctaaaaatcaattacaacaactcaatcattatacaatataatacaatcataatgaattttcaaatactatgattactaattattacctcacccacatttacagttaccacacgaggattcaaagatttcgaagctgtgtttatatatatcaacaaaagaaacatcataaaatgtaattaagatttttctttttcttgaaaagatgtttagtttaattaaaacatgaacaatgaaagtaagattatataattaaaacataccagaataatgatgagtagtttgggtaaccaaggaggttggttcttgtgtttttctcttagtgcttctttttcttttacatttcttggccattttcttttcttgtgtaccttatcaagtaattctaaagtttctaattttagttctctatttacaatatatatatactatagagattacagagatcaaacaaccgacttttgatacatacattttttgtataaagaaaaattgattgaatattgtggagcattgccttttttttttttgtaaatttatttgttttaatttttaaataaatttataatgtttaaatatttaagattatttgggatcaataaatatttaaggtagtattgacacaaaaaaaaaaataaataaa

SEQ ID NO: 195840 - DNA, 2289 bp, Cannabis indica
tttttttttttgataggaaaacttgttttattgaaaaagaaaagaaaactacatagttgtcacaaggggaacaacctcccttaaaacagtcctcttacaacagcgaaaaactctagcaaaacgggccaaaccatccgccaaagagttttcacaacgaggaacaaacccaaccaaacacaaactaaactttgaaattaaagataaacattcataaaaaacaggaaaagacccccacataaacggcaattctttgttgcgcaaagctttaactgctatagcagaatctgactcgattaagattgtctcgtatccttcctcgagcgcaaatcgtaaggcctgaagaatcacattcaattcggcttctaacactgtcattccctcggagtaactcagcaacacagttgcagcatcctccccaatcccacattgcagaacccccgtgcctgcttccccatctttaaccgaagcatcaacttgaaagtggccatcccacttaaagtgatttaaatgacccctatcttcagagcatgaattttcagaaaccacagtctgatctttgactcgcactttcataaattcctgagctctctttaaagtcctgcaagagatttccaagacatttggcttgtgacccttgattctcaaatcatttctactgcgccagattacctcaaaaagagaggcagcataaatcatcaacatctcatcttgcctattaaagagccaaagcaagaactcctccatagtcgaaacttgcatagtatccacccttaacccccaggggctgctgaaccagatgcttctagtaagattacaatctctgaacagatgaataacagtctcagtctcttgtccacagaaccagcaagctccgtccacttccgtccttaagccccgccattgtacaggaagacaaccagaaaggcatctccataacagcagggcttgcctcgggtgaatgttcactttccaaagatctttccatatctgtttctcaggttgtagccgctccttttgagtccactagtaagcacttttaatggagaaccgaccatttttacttcctctccaaaaaagaatgtcatccctatcctgtaaaggcttaatccgaagaatggcatttgccaccggttgagtaaaacattgatttatgacattttcatcccaaacgtaagaatttggcttgaacaagtctgccactactgagaaagagtgagtaaaggcataagtgaaactatccctaacaacttcgggactaaaactaggaacccaaggagtcaaccacatgtcagaattaccccttcccactatcaaaccagcacccgaaactaccacatcacgaccattaagcatccccttccaaaccatagagtctccccgattcgcttccacattctagaaactcaaatttttgcagtatttatcccttagaatacttacccaaggccgatctgaattattcaacatgtgccaagcaagtttagacaaaagagctaagtttatgtccttgaagcaacgtaatccgagtccaccattacgctttggctgacaaatctcgctccaactctttggagcaaaataacgatttgagtccacaggtgagccacctcctttccaccaaaaccttgcaatgatgctatccaattctgaacacacactcagaggaactcttgaagtagccattgtatacgtttgaataccatgaagaaccgaactaatgagagtgagcctgcctgcttgagacagtaattttgttttccagccttctaaccgccccaagatttttgctttgagaaaggaaaaatcctctctcttacgggcagaagtaaaaaatgggttacccaagtatttctcatttctagataaaccgcccatgcccaaagtcgagaagatcttatttttcatatcctgagtagtcttcggggaaagaacaattccactttttgccttgtttaccatttgaccagaccacctttcatatttctcaacacaagtcttgaaagcaattgcttcttccacctttgccttgcaaaaaaagatagcatcatcaacgtagaaaatgtgcgaaataggccttgcctgcttcccaatcccgagtcccgtcaaatctcctctgttttcagcttgcaaaatcagtttcgaaagcacttcgctacatagaatgaaaagatatggggacagggggtctccctgtcttaaaccacggccaggtttgaaaggttttaacggggcaccattcaacaatactgaaaactggatcgtagttatgcattgcataattaaattgca

SEQ ID NO: 195841 - DNA, 1059 bp, Cannabis indica
ttctgtagaccctcaacctggagtctagcctctgtgagctcagccagaaaggtcacgtaggcattatgcaagtcgcgactatctgcctttacttgctccaattcagccaccagcgtgtcggcttccttggcagctctctccgccagcaaggccacctgtcaaagtaggccaaagtatcagaacaaggggcagaacataaaaagaaaaagaaaatgtctcgaggatttacctcaaccgcctgctgcttggtggaatgggccagcgcgaaaatgttctccctgcagcaggaagcccaggtctccatgggcagctttgaggcactctcagccacctggtcctaaagctcggcagcgaagggggtagcctctctccccaccttgtaagccacctgcttctccaaggcctcaacctccatggtcggccccacaggcggcaaagcatgcataccgtctgatatttcagccttacggactgccgacagcacaatcgcctttctgtagacttgtagcctttccgcctccaaacgccccttcagggcccagttcatttccctctccttctgcatgtcgagaggatcaaaaggaacaaccttcctagggaaagtgaaccccaccagaggtatttttggtaaggccgaagggtgagatgatcgaggctggcccaacctcaatggaggatcgtggcactgggggtgggctctcattccaatagcaggtgcctccagtctctgcttttttcttgtggaaggactgccacccgttgcttcaaaggaaccgattctctctaatgcaaacttaatgtacctgccagaagtcaatataatagaaaaaagggtcatcacatgaccacagaattctcagagacggcagacacggaactagtgttcctagggacactccctcaaattctacaacaaataaagggtgaagaaaacttacccgtggaaaagagaaatatgaggctggtgatcttggtgcaacgtctttgccgaaggaatcagtgtctgactatataaggtatcggtaacgtttcgcatgacaggagaagagctagaactaa

SEQ ID NO: 195842 - DNA, 991 bp, Cannabis indica
ttgcattgtaaatactaaaagttctctaagctcaaaacaaaacagttcatgaatcaaagttctagcttgatgaaatatatgattctcaagcaaatatcaaccataaaaaattcccaatttctagagagttgggcaatttccaaaatccaaaagattgaaactttgatagcaaaaaaaatataggaaatatgattctcaagcaaatttcagccataacaaactacacaataaagcaattgaatcaaagtttcttgcttaatgaatatatgaatcttcaaaacattatatgaacagttcatgaatcaaagattttagtttgaaaattcccaatttctacataattgggcaatttcaaaaaccccaaaagattgaaactttgataagcaaaaatattgagtgagaaaaatcacaaacctttgaagaagctctggttgatcaagaagaccagacccaatataaattggataactccgattacccaaatcaacctcaacaatggtgggagcttttgaacccaaagactgatccataacctgggccaagctagcacatatcctggaagtggacctggacaaagccgagttcgcaacacgagtcaactcaatcgaactcggggaaatagaggaggagcgaagtgagagggagttgggagtgtggagacgaagaaagaggtcggaggagctggaatttgggttaaagattgaagctttggtggagagagatgagcagaaatggtgggcagtggaagccatggatggtctgatgaggttggaggagaagagaggtgatgctaagagaagtgggtggtttggttggtgggtggctttggcatttttggttttagagagagagagagagtaggtgaggagagagagatgaaccggttggtccggttcagggctacactatattgactagtggggttggtaagtcaaccatgattgctattaaagttatagtatagaataaaaaattggctaattagtaattt

SEQ ID NO: 195843 - DNA, 1064 bp, Cannabis indica
tttctgcaagatctctgctatatacttcctttgggaaagataaatgcctgtgacatccctatacacctctatcccaagaaagtagctcaagtctcccagatccttgagagagaaaactttgttaagtctgtcaacaaattatccaatttcttttgagttgttgccagttattatgatgtcatccacgtagattaagaccatgataacaaacttttgtgtcttgagcatgaacagagaagagtcggctttggagttgacaaatttccagtcaaccaaagtcctttttagctgatcgtaccaagatcgaggggcttgtcgaagtccataaatcgacttttttaacttgcagacatggtgtggtttgctagtgtcttcaaagcccgggggctgcatcatatatacatcctcttcaaggacaccattaaggaaggcgttgttcacatctagttgacgaatctcccagttgtgagacacagcaatagttagaacaacacgaacggtagaggctttgattacgggactgaaagtttcgccaaaatcaactcctgggcgttggtggaagcctttggcaacaaggcgtgctttgaaacgttggaagctgccatcttgattgtatttaattttatgaacccatttgcatccgactatgtgaggtatatggacagtagttggatcaaccagtatccatgtacgattgcgacgtagagccaacatttcttctcccatagcacggttccacccctcatgccgaagtgcatcttcgagagagtatggctcatgaagcgagagatcaaatttggcatggtggagatagacttttggcttgaaaatacccgctttggatcgagtaatcataggatgagaaggctttaaaggaggcatcacagtaggagagttgtgaggtgatgattctcgactgtgagcagggctgtcatggtcctgtgaaacagacagaggcgactggttttgtggtgagataacaaaatcattggtaagtatgggagaatttacctgctgtcgtgaaaactctggagactgaggtggtggttctgcaatgaagggac

SEQ ID NO: 195844 - DNA, 1344 bp, Cannabis indica
cggagatgaaactcctcaagggaccatatctgcagctccatcaccaagaggtaacaatgttgctaacacaactatgagtgcacagtataatgcatcttcatctaaccctgttgttccacagtttgggagcaccttgaataggaacaacttctctttgtggaaaacaatggttaatgccattgtcaaaggtcataggctcgatggttacttgactggtgtgagaatcaagccacaagaactcatgccaatcccaggaattgatggacagccaagttttggttttgaaactaatcctgagtttgaacaatgggtcgtccatgaccaactatagatgggttggttatatggatctatgactgagagtatagccacataagttatgggtcattcttcatctactgaagtttggacagctctggaatctctctttggtgctcactccaaagcaaaaatggatgagtatagaacaaagattcagatagtaagaaaagggaccatgacaatgccagattatctcacacaaaagagacaatgggctaatgttttagctctggctggtgaccgatatccagaagctctactggtgtcaaatgttctgtcaggactcgatatcgagtacctacccattgttttgcaggttgaagcaagagaaagaacatcttggcagactctacaagagatacttctaagatttgatagtaagcttgacaggctaagtacactttttggtaatagtaaatcttccaacacctctaatcctactgctaatcttgctaacaaaaacagtcctagtggtaattacagtccagaccaacatggaaatagaggtagaggaggctacaatgctgtaaatcgaggcagatttggtggtaggggcagaggaggaaggtccaatggtccaaaacccacttgtcaagtatgtgagaagtatggacactcagctgcacactgttacaatcagtatgatgagtcctatatgggatttgctcttgctggaaacaacaacactaatggaaataagccaaaccagaatgctgtagcctgcattgccacaccagagatgttggaagatggtgcttggtatgctgacagtggggtcagcaaccacatcacctctgatgtgaacaacctgaacaagaaaaaaaaatatagtggtaaggattctcttactattggtaatggaaatcagcttcctattaaacatgttggatctggtactctctccactgaaaataacagtgttttattgctgcaagaaatattacatgtccctgaaatcactaaaaatcttgttagtatttcaaggctaacaaataataataatgttattgttgaattctcatc

SEQ ID NO: 195845 - DNA, 965 bp, Cannabis indica
acaaacttagtccaacgcctacttcatgatctgctctctgataggtcgcaaatatagcaggtaatgtttctagcttgacttgggtcaccaatatctataccccctatcctcaatcgaaaggtctatctttcagttgcaaaaatcgctattgggcctccatattcacaaatcttgctctatcaacattagagcgcccctaggtgggttggatgatgaagctccccctctctcactcactctagctcttttaggacccatctcaccaaaaagtctaacactcaaaaatttatggaaattttggcagcacttccccttaaaaattcacttcccgggtaacaacccaatcacaaataactcaattcctaatcacaaacaactttatccaacaatgtattgaacacaatcccaaaaattcacactaaaattccaaagttctccaacaatccaaaattaaccactaataattgtatagagagtttgagaattattacctcaatgagaatccaactttattcaacctccattgaaggaaaccttgaagttcttgaggaagaagaagatgaatagtggtttttgaaatttgggtgaggttttagggatttggggttgattttgaaaggaagagagtgtttgatgagaggaataatgatttagaatggtttgggatgagagattgtggttagatttaaagaaaaaagggttagaataagatgagatggagaaaaatggtttgaagagagttttttcggaggtggtttgttagggattttaaaaatgagtgtgtttgaaattgtgggatattttggcttttaaaaactgcctgcactagtctcaccgcggctagagtatatctcgtcgcggccagacaggctcgaaaaatggcctctctgcctaggagatatggccgcggcgggcctcttcctcgccgcggcgagatccttcaaaaaaaaaatacctgcttctaa

SEQ ID NO: 195846 - DNA, 761 bp, Cannabis indica
acagcaagacatgtggcaagccaaattcaaaagttactaaaaagagtagacaaggataaatctcaccaaagttgagctttaaaagtggggatccaattcaatgttagtttattatgacttatgagtatgcattaatattttgttgtatgaaaacttgattcagtctatgcatgtttggctagatttcttttattttacttaaaattatcattattgtttgtttagtatgattgatgtcaagacattcaataggttctcttacctattattttggataagcattctgttgtgttttatctatacatgtttcaacaactatattttagtaatattttttttatataactgttttaatttaaaatgtacatatattctaaacttttttattctatatgtattaattttattttgttttaaaaatttataaaataattacatcttaaaaaaaaaattaacccatatgtaattacatcatattttaaacaatttattatattttatttaaagtgaaaacataatatataataatatttgattttttaaaatttacttcaaattttttataattccaatcactacccttcattaaatggagggaaatagaaaaggcagtaaaactaacactgaacaagcttgttaacggcagaggatcataaatgctagtagagtataagtttggggaccaatttgccaaaaaaaagagtttggggactaatttgccaaagcttacatagtttaaggacctgccacacaaataagcc

SEQ ID NO: 195847 - DNA, 643 bp, Cannabis indica
aattgtaacgatgatgaaactaattctcctgaaatgttaagtttgttgatgagaatgaaaattgcgatttcgatttcttaataaaagagataaaattgtgattccattcgttagatctggtatatatatatcttctctttgctttctttctcttcaaatctcagatttggtatgcatgactggtttttgttgctttctttcatctaattcgatcagatttcgtttcgatctacattttggttgttgtttcatatcgaatcagcgatcttacgacgttggatagatatgatttcaggctatgaaaatctgcacgagatctgtacttgattcgatttcagggcttccttttcttataagatcaagttaagatctttattagtgtaagtctgtttatacttcctagctctcttatttcaacatgaatttcattaacatttcctttttctgagatgaatctaacgaatttcattattatgggaacttattctcagttctcttctaatcattaattttaattaaataactgacttgcttaccaacagattagttatctaaaatcaacaggcccaattaacatttcctttccgtttctatttttgtacattgaaattaaacaggcgggaagaagatgaactttgcttca

SEQ ID NO: 195848 - DNA, 2111 bp, Cannabis indica
gggccgtcctaggtggatctcttaggtttccaagtgtctacacgctcggattcgtcaccgttggatcgactgtatcggtctaattcccccttcgagtttgcacaaccatcatctatcttgtaaaagacttaagacaaaaatttcggtatctttgatctcaatgaaaacaccaaaatattgaccttgcttttagccaacgataatgagtctttaataagcgatgagatcaatgaaaacaccaaaatattgaccttgcttttagccaacgataatgagtctttaataagcgatgagaataattaaataataaaaagcaaagagcataaagtaaaggaaataccaaatttatagaggttcgaacctttatagtcggtaatagcctacttccctttttattgtattgacttgtgagaaagaatgaactattctctctcgaaagctcttacagagatctcttagcagtttactcttagacaaagatttcactcttgagtgtttttctctcagaataattttgtgtccttgaataatgagatgaaaccactatttataggaattacttacatgaaaatggtttcccttaatctataatagataaatgaagaaactagcttatttccataattataataaaaaaattaggaaatctaggctcattgtttgtattctttgaagatacgaatcaatcccaccattgtagggattgtatcctgacatgcaagcttggaaaaagcgatgtacatctttaaaattgctaactcacacccttggtcggtgcatgcgagttacccacgtgatcaagttggtcggatgtctacctgtgtctatgttcggacatcctaccatctatgtttgactttgagcatcataacaatttgcatgacctgctaggagtaaaatcatctatccaaattatgagatatgatacacgtgtcatctagactatgccacgtcatagtgtagaaattaagataacattaatgttattgataatataagtaataaatttggttcttgtgtgagttattgattgttaaagttatattgattattgaattagtgtcatggttcatggagcattagttgcatttgaaaataaagtcatttcacatttttcatacttatttatttatttgtagtgaaaataaagtaaaatttgcaataatatttatttattattttattttttaatcttactacgtgcattcaaacttttagagaaagaatagataatagttcttaaagcaaattgtatgagatttgattgaaacctattaccaagagttaacacatgtggttctaatttttatgagaattccctactctaatattttaagatgattgttagaagtttttgtgtttgttattcagatttttaagagtgcttttaatttgtgttattcatagattaattgcgtatgtttttcagatggatgaacaacttgttcggctaaatgactatctatatttttgtgggttgtatagtaaattttgacaaacattgcgtatttgtttgatgaagatgaaatgtatagtatttattatgaggttgttgctcacattaaaagtttgctgcacaatgtaagggtatgagggatttcatttgtttatagggaagcaaatcaggttgctcatgtattagccaatgaaactttgaataacaaagttagtgccatgtgggttggggttgttcccctttgtgcgagtcaagctgtgaaaaaagactcgcctaatctattgtattgattgttgtttgaatgaatcctgtttcaaaaaaaaaaagaaaattatatttttaatgaatttattgtttatttttaaaacaaaaatacttattaaaattcctaacaaacttcctagttgagaagattacacaaatatttagaggagttagagaaaattgtcaacggttatatcatgtctaccggggaggaattttggaacttcacttaaaacggcatgccgtttttgttgctatagtctcatttttctgaaccagtcctctttcgcgctttacccttttatatatagattaatgccactctccaatagcgcgcgcgtctccatcaatgctacacacactctgacctttgctttacaacattttctct

SEQ ID NO: 195849 - DNA, 746 bp, Cannabis indica
tatcaaggtcattctttcaacatgcaagtagtaagaaaggatctcttctccaaatgcatgatctcatacatgatttagccatacttgtatcacatgatttttgttccaaattggagatgagtgatagctattcatcaaagactcgacgtgtgtcatgtaatgaaagtagttacgaccttaacaagcttaacagtttgcgtaaagctagttgtttacgtaccttcataacattgtggaatccaaatagacaagtctctccaaactacccaaactacatagtcttgtttgatatattgtttacaaaaggaagttgtttaagagtgctttctttaagtgaacgtattaccaagttgtttggtagaaactttatcaagcagttgccggattcaattggaaatttgaagcatttaaggtacttggatttgtctggtactgaaatcgaagagttacctgattcaatttgtagtttgtacaatttacaaactttattgctttcagggtgtgaaaaactttctcatttaccaaacaatatgggcagcttgatcaagttgcgttacttagatattgaaggtgtgcctttgaaagagatgccaaaaggaattagtgagatgaaatacttgcaattctgtccaaaggtaattttgagtgacaaatataatgttgatgggtttaaaatagcagagttagcaaaggctgaatatgtacgcaaaagactttccatttcgggtttggaaaatattaatgat

SEQ ID NO: 195850 - DNA, 2330 bp, Cannabis indica
atggatctcatgaatagggtttttaaggagtacttagatcaatttgtcatcgtattcatagatgatatattggtttactccaagtcagaagaagaacatgaggagcatttatgtttgaccttgcagcgattaagagagcaccagctgtatgccaagtataagaagtgtgagttctggttacacgaggttggttttctaggtcatattgtcaccgatggaggagtgaaagttgatcctgcaaagattgctgcagtaaaagaatggccaagaccaaagaatgcctcagaaatccgaagttttctgggtttggcgggctattatagaagatttgtcgaagggttttcaacgatagctgcaccaatgacagaattgacaagaaaaaatcaaaagttcacctggtcagataaatgtgagcgaagcttccaagaattaaagggtcgacttatatcagcacctgtactcagcttaccttcagagaaagggcagtttatggtttattgtgatgcatcaaaacaaggattgggatgtgtattgatgcaggctggtaaggtgatagcatatgcctctagacaactaaaagattatgaacaaagatatccgacgcatgatctagaattagcagcagttgtctttgcactgaagatttggtgtcattacctttatggggtgaaatgtgagatttacaccgatcacaagagcctaaaatacttcttcacccagaaggagttaaatatgaggcagaggaggtggttggagttagtcaaagattatgattgtgacatattataccaccccggtaaagccaatgtcgtggctgatgcactcagccgtagagagccaggaatggtttcttctttacaaggagtatcaaagaagatattggaagacatggaacgagctggcatagaactagtcacaggacaactttccaaggttactcttcagtctacattgttagaaaggatccgggaaggacggaatgcagataagaagaagttgagtgacctaaagcaggaaatccagaatgggagtgctaaggatttcaccatgtcagataccggattgatcaaattcaaggggcgtatttgtgtgccagactgtgtggaattgaagaaagagattttagcagaagctcataccagtccatattcagttcaccctggaaccactaaaatgtaccatgacctcaagacattgtattggtggtcgggaatgaagaaggatgtagtggaatatgtggaaagatgtttaacttgtcagcaggttaaggcagaacgtcaaagaccggcagggctgttgcaaccattgaatattcataagtggaagtgggaagagatatcaatggattttgtgacggggttacctaggaccacaaaacaacatgatgcagtatgggtaattgtggataggtatactaaatcagctcactttttaccagtacggatgacttattcaatggatcagttcgcggagttgtacatgaacgagatagtacgtctacatggggcaccatactctattgtgtgtgatcaagatgctcagtttacatcaacattctgggagagtttgcagcgagcaatgggaactcgattgaagttcagtacatcttatcacccagaaatagatggtcaaaccgagaggaaaaatcaagtcttagaagatatgcttagagcgtgtgtcattgactttcaaggatcctggagcagatacttgccactgattgaattctcatacaacaacagctaccaatctaccattggggtagcaccatatgaaatgttgtatggaagaaagtgtagatccccacttcactaggatgaacttggagagacaaaactacttgggccagatgctgtgaagcaaaccaatgaggctattcagaaaatcagggcaagaatggttgcagctcagagcagacagaagtcttatgcagacctaaagcgaaggcagattgagtatgaagttggtgatcatgtatttctacgtgtgactccaaggaaagggattccaataaagaggtttggcaagaggggaaagctaagtcccagatatgtcggaccttttgagattctagatagagtaggcaatgtggcttatagggtagctttaccaccatcattgtctacagtgcataatgtattccatgtgtcacaacttcgaaaatatgtatctgatccttcacatgtgctgagttatgaaacattgggtttgtaggaggatttgtcattcgaggagcgtccagtgaaaatacttgatcgaaaagacaaggtcgtaaggaataaaaccatttctttggtaaaagttttatggagaaacagtgttgttgagga

SEQ ID NO: 195851 - DNA, 1206 bp, Cannabis indica
agctcgtttttataggccaaacttaaatttatgctttaatttttcatatatataattgacaaactaattattatattttatacttttaattatatttataatttttaacaatattatataattacataaaaaactattagaattattatataatttgaacatttatttataaatgcttaaatttgtatatcatattttataaataaatcaatatatatttttaattttacaaattttaatagttttaattataaaattataatattaattatatccgagggacataaatgcatatctgttattattattaattaaattataagatttttttatgtgtcgatgtcatgtattgtgtcttttaagttagtctatttatacttacgtattgtgtctttcgtgcttctcatgttgtataagcacaaatttttttttatgtcatgtcgtgttaattttataaaattgtatcgtactatgcttaaatttatattttttctgtatgtggtcgtcattatgccagttttgttccatattaaaaagtccaacccacttattcaagaaaaaaaaagtccaacacacatctacaacactattgtaaagtaacaaaactgaaagttaataaaggtattgctttacctttttcttttctcttctttgaggattaaaagataattcattatgaatctaacatgcactatacaagatcctgcctagctttctcaacatattatatatataaaaatatttatatatgtgtggttgaagttgaatagaatttagtactgtacaatatgacctgaatgcctggacggtggatgctaatatatatatatatatatatatataatatatatatatatattgctgcatatataatatgatatgagacaacaaaaaacaaaagaaggtaatttttactttttaattatgtctaaagaaaattcccaccaaacaacttgtgatgaagatgagataactcccttgtgacagttattgacattatttttatcattgtcttgtgtcatcactatttaagttgataaccaagtactatctttgtctatcaattccattggtttgccacttggctaagtatgccattctttaattactttatttttattaattaattatgtttattttctttttgggtgaaaatgcaattagcttacagattgtggtccaagaataatgcatttttttgttgag

SEQ ID NO: 195852 - DNA, 543 bp, Cannabis indica
atttgtgagtatcccacagatcatgttgccacaataaatccttcaatttaggttcatgaaacagatgcaagagacactcaagaacaggaattacctacacctgcagaaacatcgatggcatctgcagcacctccacaacaatgcaagatgcaccaagaagatcaaatagacaatctaaaccaccaagcttcttaagagattttgagtgctattcactcatctaggataattcttcaacacctcataatattgataaatttatttcttcctacaagttatctggttctcataaggcttttattcttgaagtttcattagccaaagaaccacgaacatactttgaagctatacagaccatagcatggttgaatgccatacaatttcaactgaaatccctcacagataataaaacttggacgattgttcccctgccatcaaacaaaagaaccatagggtgtcaatgggtttacaaaatctagtataatagtgatggcaacatagaacaattcaaggcttgccttgttgcacaagctacacgcaaca

SEQ ID NO: 195853 - DNA, 601 bp, Cannabis indica
ctttatatagaatagatagtaaatattagaggaagattgatgttgaaaatacttcaagaattaaaaatgagctagaaaaactcaactcaaaaaaagaaaatatgtcaattttaattgaataagaaataaaaatgataagaatgacatatggacaaatgagagtaagctcttctaaccccttcttttacttatttttctaccagcattactattaggttttagtggtgctcaacattactgcgatttgatgcctaaagaataattagtaatatttcataaaagttattacattaaattatgtaagacttaaatatttaattataccaatagcaatataataccttaaatgatgttagacattactgatactcttaagcatatttctcttattctataaatacatacaacatctctcatttggaaatgaaatcaatctccattattgttagcattcaacttagacatcaacatgaaaaaaaaactcaatcttcaaccggattctagattaagatgagttaagttcgtgtttatgacccactcaaattcagggtcaaaaatcttatgtaatttgtagagaaaaaatttgtttgttaaattttat

SEQ ID NO: 195854 - DNA, 1985 bp, Cannabis indica
caacattgttgtgtagttcaagctaaacaccaaaaaaacaacaataaaaatagtcatgagcaagaaactaaatttatttttaagttctggctaaacaacataaacacaaacattaaaaaaaaacctacagtaacttatcaacatatgctattatattctggctaaacaacaaaagataaacataaagtattttgcttggttttaaatcacttgcttttgctttcgcttttcccttactcttctttggagacttaggtgggcttctggctcacttacaacattctcaacttgtttcattagtccaaacttgtacaacaacacagaatgatgtcttaggtgatactcttcaacatcaaagtcagcatgaatattctttccctcaatacaatactcagcaaaagcagcaataaacgccccataatcactagcaaaaacaaaaaacaagaagcaacataagacatagtaaataacaataaaactacaaaataaaaacattaaaaaaaaatcatacttatccacttgttcaggaagtacttcagcattgacaattgggaaaggtgcaatagggttcacagatgctggtaaggaataagaaagctcattataaacactcaacagagagaaaaataatggcaacatgacagaataaagttccaaagaaagcaacgaagtagcctcgtacttcggggtccttagagaattatacaaataaataattatagacctcatgtcaagcctacccgtaatccaatgactaacaatctttatgtgcaccaataataacacatggtcagcctaactccaatgtgtaccacatcgaagacgttcaccctttatgaaatgagtaatttggtgctttggatggacaagggagatttattctttcaaacttataaacttttcatgcaaagacttgatgctactattgaaatagcaatttgtagttgtaatcttcatatttgttgcaccagaatacttagctttctttctcaaataataaaaaattacatccatatgttaaaacattaaaaagatgatttaacaaaaacttaactaacaatgaagcaacgagtgaaaccacatctttcgttcaacatattcacaaccaaaatcaaaatctggatcaagcttattaacagcaggaacaaaatacaacaattgaccatacttatccttcctataaacacaaacaaataaaaaaaaattaatagaaaatcaaatatctaaaaaaaaaatgctatgcacaaataacatagaaaaaagtacaaaaacaacatgtgtgggtctcttcagcaaaccagatttaaaccaagaattaaaggttttctcatcatcatcactgacatggtcaacaataggttgttgcagagcacataaacctttaacattgtaactacagtagccttagatgatgaactcaactgctgagcataaagagattgcaaatgtaaactgggctttgagattctcctctcaatatgagaagtgacatgatcaatagtaccagcattctcgactacaacattagggtcagactcttctacattaacatcagatgccaaatcctacataaaaaaaagatacaaaaataaatacaattaaaaacaatagataaacataaacaaaataataagggaaaaaaatttactagattagcagaatgtgcgatttgtggatcatatggaactaaagtataagaattctataaaacaacaaaataacaactatataataaaaaaaacaataaacaaatattcaaagaaattgaatgaacaaaaaagaaaaaaacctaaaaaaattacaacatcttttaaaccagccgtaacaacatcatcatcctcaactggtagctggctatatcctttgaaaaaattatcatcaacaatttttttaacatcttttgatacctcaacataattatcaatatcccttttaccactattatcattatcatcctcctcacttgttattatttttttgtacgt

SEQ ID NO: 195855 - DNA, 677 bp, Cannabis indica
aaaaataaaagaaaaaaaagtaatgatttggtgtaaattttaaatttcaactccaatatttaaatataataaaattattaactataaagtctaaatttctaattaaacaatataaaattcaaactataaataaaaataatttaactaataaacttaatttatgtaatattatacacattaatttaaaacaaatacataaattggtttgtttagattatttgggttaatcgggtttagaattatttttaatctaaccaatatattcattaggaggtttagattttcattgggttatttcaagttacattttttatcagtttatccagtttaatttgggtgatttatttaggttggatgatttgttaatttttttaaagacccctacttgcggttagcagatacacgctaccttacaacattttcatatcttactaataaattataataatttacatgtttcttttattttttttttttaaaaaatagataattacttacacttgtttttatatgaagatatataaatatactaagtgtggagaacgtgccacagtgacttaatttcgtcaaaacttatggattatactcatgtatcttactttcatcaattatgtttaaataaatattaaaaaagttaatataatgttgttagtcagcggatacactctcggtcccat

SEQ ID NO: 195856 - DNA, 867 bp, Cannabis indica
atatatatatatataagataatttctcaaataataattatatgtcaagtaataataatatacaacatataattcataacgtaggtaatttaattcttcattgaattggacatttctatttatgaaaagaaaaatatatactattttaaataggaaaattcgtggcaaaattcgattagatacggtgtatttggtaacatttttttaatcaattttttatttttttattagaaaagtgaaaatattgtcaaaaaacatgttctataaaactcttttcactttttgattttttaattgagaatcaaaattttaaatattttgaaaacaaaataaaaattactttcgaaatttttttaaacagtttttttaatcaatattttagacccttacttggaccttgcgacatggactctagccccgaccttagtcccgaactcggatcacagcacaaccccgaccctagaccccagacccgaactcagatcacagccccaaccccagacctgaacatgcacccgacttaaataaaatcaaaagataaaaataaaaattatagaacacacttttattttctgtttttaaaattgaaaaataaaagtggttacagaatacattttattttttaaaaacacagttttacatttatttttgtgattaaaaaattaaaaaatagaagtgttaccaaaaaccccataattttttcttaaattgctaagtaatttgtttagcctaaaaagacaaatgttaaaattaaggcacaaagtaattagcacaaaatatcatatcgctattttaacaattaattaagtacataatctatatatatagtagaagtatgaggcagcgacatgacattttaaaattattc

SEQ ID NO: 195857 - DNA, 1148 bp, Cannabis indica
tttttttttgttttaaagaattttgttctcttagcgtggaattatttgttgttatatttatttttctcttgctatatcatatttttgcttttgtgatacttgtggattttccaggtacttgtattagttttctttctatatgaataataggtaattttgttttgttgatcattcccgtcttccccgtccccgtcgtgtagaagaattttcatcagtatttattgaagcagagcttttgcatgaattttacagaaaaggaaagggaacaatggaagtagagatgagttgaaggttgtctattcaggaagtgttgaatacaggttagccaagcatctaagcaatttgtacaaggacctttctgatcaacagaagagactgcagaagaggttgattgttgaagaaggaaaaatatggcaacattacaatccaaaactcaggattaaaagttaagtgttccctgctgtccacttttttttgtttatgtttttgtttgcatatatgcccattacaatactttagctaaccatacttgatttttgcttgcgcaaaacccactacaacactagtagttcccaatgcagaggtttcaagcctgcctttttgtaatgtttcatctctggttacttttgttgtttgctgatcttgtacatagatgtatagcacttgcaacaaccatgtaatgaaaatacttaattgctaaagttattaaaactcaagtactagtcaaaaaaagatttttcaaatttaattgccaaacagagtaaaatttagggggatatttatgctatatatataaacccttcattgttatatgcttcatttgagttcccattttggaccatttcgttttagattggcatttttcccttttcattccaaactttgttggatgtcattcgaaggtgcaaagtgaagtggtactaggggataggcagggattcaagtcccctcgtttatcaaggaaaaagacaagaaaaggagcaatgatctctaccagaggtgcttaaaatataatctaaaccaatctgtgaaatacaattagtaaaaattgcatatctaattataattagagggttttgacatatagttgaattggatcacttttgaggtaacactaccaaaaactcagttacaattgaatgattgat

SEQ ID NO: 195858 - DNA, 586 bp, Cannabis indica
gagtcatcattctgtgggtgtaaaaacacaatgaaagcttgaagcatggacgttacagacttggcatttaagggcttagattcttacaaaaattctaaaaatataacttaaatatttttatcgttaaaaattaaatttaaatatatatttatttgcaataacaaattaaatttatatttattattatttttcattttatatattttgttggccccaaatcaatttgttgaccaattaatttattaaaaatgaataaagacaaattaatatgattatttggtggattataggataaatgttctaccccacaaaacgtggcagcttagctagaagctcttaataaaatatgataaagcagtcaaaaagaattaagatcttcaatttatattgttattatttattaactaatttataataaaaaaaagccatgtcaaataataatggccacaaatataaaaatagacattttatttagaaatcaagatcaaatagtctggtttaggatactcttttgtcgcccttaaatgtgatgcccctaatatctcaaattattgtagtgatgctcaaaacatttattatataatat

SEQ ID NO: 195859 - DNA, 1985 bp, Cannabis indica
cctccgctgccaatgccacctgctacaccactgcctttcccaaaacaaccaggctttcctaaaccaaacccaggtttggatccaaaaccgaaattggacccgtaacctttgccaaaactaatagaatgcccaaaccccaatcctttgccaccaccccagctcggaaagccatcgaaaaaccactgtggcttcttcacttccccagggccagagccatggcccttcttttcctccagcctccttccttcaacgccaatatcccaagctaatataaccaatacatagacaacccataaaaccaccaacttccccatccccgccattattttgcatgaaatatatttctgaagcttgaaactctttgatgtagcatgcctttatatagagcacaatgtatagattcaaaatataaataaataaatgagattgttggaagttggagagaccactaccaagtaccaccatggctttctttagatgcaatctaggtcgatttaattacatgccggttaacgtgattgggtcaattggcattgcatgtacaagcattcatggtgtccatgactttctcatgcaactacctctctaatcttaatattattattattattatttcttttccttgagaaccgaacgacattaatggttttcaaactaacaagggattcgcatgcatactacacaagtatcaacaagttcaaattcaatcttgaagaaaattaaaactacattacaacttacaagctacaacaatatgatgaatttaataatagtaagaataaatacagggtgggtgatacatcaaacgacgtgtagtagccgactcataagaaacgacgtgtcgtatttagtatatatgattttaccaaaagaagtatattttcgaaagaaatatctcttcgataaatcgtcttggagagtctgactgagttagtgttcattgatttttcggagatggaaggcattggcgacgataatccaaggtaccctcgaaaatcttatactccaattccatatggtttctctaactctaactctaacccccaaaagcaaaggactcgtactcgaaacatcccatttactcgcccaattgccaatttcaaccacgattatgatgaagatgacgaaatggatgatctcaacgaagaaaccgaacacgaagacgggaacgtaaatgggggtagtcgtaatttcgatgaggaggaagatttcttgaggcatccgaagaaaagaaggctgaagaatttggtttcggcatacgagttctctcctcgggtcagcctgtcggattcaggtcgaaatttctctagggtcggcgatgatgattggactgagcatggaatgtttgtgctgttggaggtttggggaaataggtttcttcaactggggcggaagagtttgaggtcggaggattgggaagaggtagcggagaaagtttctgaggcttcgaagattgagaggaaagagagtcagtgccgaaatatgttggaattattgaagaacaagtacaagaaggagaagttgaaaatggagcaaatgggattgacatctagcaaatggggtttctttaagaagatagatatgttaatggcttcttctccaagacaggactatggtcttgcttgtggggttgattcgggtgagtttgtgtttatgaatacaagggtctatttggataggtcggatgggtttgatgagatgagggatagtcctatggaatcagaggcgtctgaggatgaaactgaggatgggaaaggtgggagagattcggataaagggtcttcctcttccgaatcgtttaaggtgttgactgattcaattaatcagtttggtgagatttatgggaagattgagaatagcaagaggcaccagatgatggagttggagaagttgaggaaggatttttctaaagaattggagctgcagaagaagcagataatggagaggactgaagctgagattgcaaaaatccggaaggaggaaga

SEQ ID NO: 195860 - DNA, 2738 bp, Cannabis indica
ccaaaggactactttctgcttccaaggatcaaccagatcatgatgcatccaccagatcaagccaagctgcttctggaaaatactgacgcctaccttcaataatttcttgcaaaattgcctataacatctagaggtttcttcttaaccagatttaaagagatgatccctaattttctcatcatttatttcaagaatggtttgaggtcttcaaattttgggcttatattctatggcataaaattgaggacaaaccaattctaaagattctgggattgcaaattcaaggatcaattgggacatgataataaaaaataccccaattccaagaaaaacaaagcacaaataaaacccaaaaactctgtgaatcataataaccttaaattttctagccctaaaatccaagcactcaaaaccaaattacccaagcaagaaaacaatgcagataagaaaaacacataccaataaattgaaattgaacacacaaaggaagcatcaacaaagagaaatgccacttactagtttgatgagatgttctgtgcaaaaaaggacttattggtgaagattctgatgatcgaaaagctgggtcatgatgactttgaagagaaggagcacaatcagatgagatctgcaagaagaatgtgagagacaaagagggcatgcaaatataaaagagagggtggttgagattttgtcaaagcttgaaggtttgtaggctgaagatggaaaaaatgatgcacaatttcaaatttattcctaaaagatggcaaccattcgattaagggtaatctaatcaaacagatgggaattgtacaagaaaataacagtcagagaattaaatgagaaatgatgtgcctccaagttttgaaccgctaaaattctaagcatgcaaatttttgggaaaaatacaataataccgttgaagacatttaaaaaagtcatttttaattaaaaatttccttttaattaaaaagtcatttttaattaaaaaagcactttttagggggcaattgttatacctgaaattcggctatcaaccaaaagctgacacgtgtacttcaggaggaatatgaatcaactcaatgattatagtattaaattgcatcattaaatgcaacttaaataattcgtttcaataaattatagtcgataaaaatattcaaactcactaccacataagcaaatgcgagataagaataataactattgcccgttaaagattagtgagataataagtccatctcggatagacagagtgtctaataaatgttcaagacaagataacaaagatcttgcagctcattgacccacatacttgggagtaagagcttctaactcattgaccaacatacttgggagtaagagcctgcagctcattgacctacatacttaggaataagagctggcaactaatttatccacgtatgtatacatggagagaataaccatacattcatccatctcgccctctatatgatagaataaccacctcgctaatatcattataatacaagacactgcaaggaggagtatatctatacttagcgttttttcctacaatgacggtaaaagacaactcgtacttagcgagaaacaacctacatactcagcataaccatttaaggataaagacaaaagagcggttggatagttactaaatattatcccatgtgcatagaaatgaaatgtggggaatgtccacatttcatgagcagttataaatgattaaagtccaatgaaaataactgccaccctgtacacatataaatcgcgattggatctatggtaaaaaatgacagcaaatttatgagaaaaagctatctatgatattgattgtactctgtatccaaattaacatccctaataagatagactcgtagagtatgtagattttaactacaaaattatgtaaaaatatctaatgatcattttttattatcattaattatgtagtatatttattacgtaaaggtttatatatttggttaataaaaatctgcgttaacattatgtattgtattttaggagtgtcgtcttcaattatgagtgcgtgaataaaataaaaagacaattgtaattgaactttaaaaaaaacaaaaatttaaatcaatatttccagatccgtggcgctagatgaatgcgaattttctgttattgtcatgatcagaattgaataattacaggattaaaaatttggaaaacaactttaatgcaacaattatgacattatcaaatatgtgttgatatgtgtattttagattaaacctgttttggatcgattgggaactccattattcgttcagaactacatttttttgaatctgtaatttgaatataggaggattaatttgcggaatctgaatcgtaattgatggtgaatttgtgtttcaaaccaatttatatgcaatgttgtttaccaatcagtaatgattgattttctaaataatttcttctttttttccagtcacgttgcccaaattaatggtggatcatcggctggttgggtttatttgctgttattgtcctcgtttgatcgcacgatggctttgaggatgagaaaagtgattcatgtgtttgtgctgcttgaaattgtgtgtaagaggtattcttaaattttttttttatcttttttagatataataggaaaaaagtctttagatttaatccaataacgaataattaaagaataatttgaatttctaagcttaacttacgtacgtaattaaaaaaataaaaaaaaa

SEQ ID NO: 195861 - DNA, 561 bp, Cannabis indica
ggtagggtagggaagaagaaatgagaatgaatggatggaagggcaaaatggtgaattcgtgtccaacaaaaagtagggccaccgcaacaaaaatacccaaactcccaatcccatcataaacaacaattgcagctttagacaaggcaagcaaaggaaagaaggaagagtagtagtggggacatccatgacgtgtcacgtataattcggataagcaaaatgtaatttgctttttgttgtataaacacattgacacaccacaacacagcagcagcttaacactaaatcttctttcctctacaattatatatagaaacatcacccacctacacgccttctggcctttcctcttttctactttcattaaaaaaaaaaaaaactttctaagtttccttttcttttttctttcttcctttctatatttgtgtttgtgtacataaggaagaagaaaagaatagcaaagcatgtgaagaaacgccgtcgttttgatcatcatcatcatcataatcatcatcgtcgttatccttttcacttatattttttttttaattgatcgtcgagtag

SEQ ID NO: 195862 - DNA, 795 bp, Cannabis indica
ttcatatttttgcatgtttagtgttcgacagcactggaacgctgtgtatggcttagttgagtcacatcttagtattttagtttagcggggcgatatagttagacattgagaatgtcgatagtagtcagaatttcagaatttcccaaaaatacccttaagtaccattttgccccatatgtattttgtcctttagtggacttagctacatttagtaacctgatttttagtagtgtaatagctaattttagttgtttaaacaccattatctcattttcaagaaaataaaagaaaaggaaaatcacatttcactcccaactctctctctctcattttcgaaacccacaagaccagctagggttgggttttcttcagcagctttaggggatttccagctaagtttcaagtgatttcaagccaaggtatagttcttgcaacctcctcttagttttcttaaagtgtaaggaaagaatttttgcatgctttgtgattttgttgttgtggatgctgttagtgttttgctttgttttctaaagcttaattacggttagataaatggatttaagcaagtttgagtggttgttggttggttttaatcaagtttggagtttgaactcaaactttggtctttaatggtgaaatttgattttgaggttctgtagttgttttgttgtttgggttttgttctttatggtctaaatagcaggtctggaaagtttgatttgaattggagttattttggttgagatatgagagttttggtcattcctgcacggaaccggaattctggttcagagg

SEQ ID NO: 195863 - DNA, 1640 bp, Cannabis indica
aaaaagactgcttaagggatttggaacaagcttcaagaattctacctgaagccatcaatttctagcaagattaatttctataaaggatatatgaatttagaatgatttctcgtctttctttagatgataaaattgataggtttaatgagattattgtaggattggctaacataaatcataaagttgatgaagaatgccagaccttcattttgttaagattgctttcaatttcatatcaagaagtcaaagcttccatcaagtatggtagagacgtgattacattaaaagatgttcttgtcgcacttaggttgcgtttggttgaaggtaattaaatggaatagaatggaaataattttcattccattcatttgttttgttgcattttaaagtattggaatggcattccaatggaatgctctttccaccatgttggtggaatgactattccattttaaaaagaaaggataggccattctaatgtaacaagagaaaaatttaaagattttttatcaattttttatgcattttaaattttaatccattccatttccattcctattcttattcctattcctatattttcattcctcccaaccaaacgccaagtcaaagaattgtgaattacaattggaaaatgaatccaagaaagaagaagtgtatttgacaagagggagaccacctaaaaaattaagaagagtaaacaccatcactctcaattaagattgaagttcaaagagaaggaaactctaaagtgttacttctgtggaaagtccggacacttgcaaagattttgcaagaagtacaaggaacatcaaggcttcaaaaaatcttgcaatggagatagtaaggaacaccagtatcatcactataagaaagattcaactgctatcacggaggatagttatgactgctcaatagatggggaattgttttccatcttggaattctcaatgaatagggagtggattattgactccgaatgcacttatcacatgtgtctaagttgagaattattttttgattataaattagttgatggcggtcaaattgtaatgggaaatgatcattcatgccaggtcattagaaccgagaaggttgacatcaaatagtatgatggtggaatttaagtgctgacgaacgtaaggcacatttcggagctgagataaaatctcatatccctgggtgcacttgaagatgaaggatacagatacaattccatgcataaaagcttgaggatcaccaaaggttcgttgatagtggtgaaatgtgaaaatatcaatggtttatatgttctacaaggatacattattccagctagagaggaaagtttggtgaaaggaccaaaattggatatagctatggcatcacagactagagcatatcagtgaacaaggcgtcaaagaacttcactaacaaggtataattgaattttttttttttttgatgaaatatcaacttcaataaattaacatgctgagtacaaaacatccagaatggcaactggagcatcagacacagaaatagtacgaccagataagtaccgtgacatcctagcaacagtatgtgctaggcggtttgctgatcgtttaacaaaacaaaaatttattaaaggcaaagcaagcaaaagagagcgacagtct

SEQ ID NO: 195864 - DNA, 1031 bp, Cannabis indica
acaaaagacaagacttgcagtaacggaaccgaacggaagataaaagacaaaagacaaggcggtggccatcgttgatcggtgactccggccaacgttgaccgaacagacgacgacctgccagtgacgctcctggaatcgacgcgcctgtacagttatggcagaagcttctcgacttctcaccccttgacttgtggactcgctctagggtttctctctcctacgtattacgtggtcaatatttttcgtattcagtatactttggttggtgtacttattaaaaataaataatttgtaaaagaaactggtgaatggtatatatatttttagttatcaaaatgtgtgtgatcaccttctccaaatggcaagttatttccaagaagctcagaatcatggagctcaaatggatcagacaactcaagttagtctaatcttgaatagtctgactctaacttttctgccctacacctccaattatgtcatgaataagaaggaacaagactttcacgagttggttcacgaccttcagacatttgaaaatctgattggaggaccactgaagaaagggtctaaagctcataattctggaaatggtaatggagcgactaaggctgaggcaaaccttgcctttacttccaaacccaagaacaagaagaaatggaaaaatagcaaaaagcctgttaaagttatgaaaacagttaaaaagaaaaaggttgctgatcctggtgatgaaccaaaaggaaaatgcttctattgcaatgaaaaaggccactggaaaccccaatgccctaaattgctagcaaagaaacaaggtatatcttttcctataaactgatgtgttttagtgaattattatccacttggattattaattctggacctactaaccatgtttatttgttttcttcttatttcagccacaactgcttgaactcggatgctatcttagcgagttgagtcggatagttggacagaagggtggagatagtccaaaatgatgatgaagctcagaatatttattttattttattttg

SEQ ID NO: 195865 - DNA, 1353 bp, Cannabis indica
gacttgtcgcaaaggggtttcaacaacaacccggtatagacttttttgaaactttcagtcccgttgtgaaaccatctacaatccgagtcattctctccattgctgtaacttttgattgggacattcaataaattgatatcaacaacgcctttctcaacggcactctccaagaagaagtttacatggaacagcctgctggttttattgatcctcagtttcccaatggtgtctgcaagcttcaaaaggctctctatggcttgaaacaagccccccgtgcatggttcgacaaactcaaaagttcacttctaggccttggtttcaaaaactcagtggcagatacatcattattcttttacaaccaaggtgatgctctcttatttgtattagtttatgtcgacgatattcttctcactggaaataatgcctctcaagtcactgctattatctctaaacttcaaggtcagtttgctctcaagtctctcggatcagtcacatactttcttggttttgaaaattagggggcctcatggtctgcacttatctcaaaacaaatatactactgatctgttaagaaaaactaacatgcttcaagccaaatcatgtcctactccaatgaatcaaagcaacaagtcaagcttacaagatagtgttccttttgagcatcacacactctatcgcagcgtcataggcggtctgcaatatctcactcttagtaggcctgacattgcttattccgtgaacaaactaagccaatttcttcaagcaccaactcagaaccattggagtgcttgcaagaaatccttcggtatttggttggatcaattggagaaggaattctatacactcgggtagcaaatctgaccattgaaggattttgtgactccgattgggcaagttccttggatgatcgaaaatctacaacgagttactgtatttatttcggcaataatctggtaagttggagctctcgaaagtaaaagtcagtagctcgttcaagtactgaggcggaatatagagccttggctcaagcttgtacagaagttgtgtggctgcaatccctcttcactgaaatcggtattaaacacaaagggcctgcaataatctggtgtgacaactcaggggcgagagagttaacatccaatctggtcttccattctagaaccaagcacatcgaaattgatgtgcactttatcagagagaaggtgttaagcaaagaagttgaagtcaggtacatacccacacaagaacaagttgctgatttgctcacaaaatcactaagtatagctcagttccaaaacaagcttgctgttacacatactccacagcacaacttgagggggcgtgttgaaaata

SEQ ID NO: 195866 - DNA, 1992 bp, Cannabis indica
acccaaaaaataggtgagttcacttaccctgctcatttcaaactcttattgcatatgttggacaaaaactcttatttctataatcatgagaaatcaaaaactcagttagatgctcataccaagcacaaggtgcttatttcaagcaatacaaaaccttgtctaacctataaacatgatcaagaaagttgggatcttcaaccattccattttttttaggagttttaggaggagaaaattgatgagaaataccattagatttaaaaaaattcatcataaataatattttcaaatcctttccatgatcactcctaatacaaactatcatcccgatgttgcaatatttttcaacttttaatttcaaacaaagggacttaaaagaatcaaaagtattgaatttttttccctaaaaatctacccatgaaaatcgagagaaaccacttgtacacacaaaaatatacccgtaccattcaaactttcaacctgaattggacccatcagatccatgtgaagtagtttgagaactgtggaagtattcgcattaggaacacttctgtgagatttttagttgctttccaaactaacatgatccatattttccttcaaatctcttacccaatttaggtaactctcgaagaatccatgcattggacaattttttatttttttaatgaatgtgtctaattttttcatgccataaataagtggtgttatcaatagcagagtgacaagtagcataggtagtgatgttgtaacaattatcataagatcaacacccttgcaaactaattttatcatgatcattaagaacataacaatggtaactatcaaaatttatagtgtaaccctaatcacaaatttgactaatgctaaggagattagctcttagtctttcaatcaacattatattcttaagcctgggtagaccttcaaattaagagttcccatccctattacttttccagctagaccattaccaaacgtaacttttccccattggattggtctaatgttgtcaagatattatctatcacctgtcatatgcctggaacaatcactgtcaaaataccacatttgagaatcaacagttttgaaacaagaagaaccaactaaacatttatttttgataacccatttttgtttttgagaaacatctttattttgaagtattccaaaatattactaactaaacatattttggaaggtaaaacatctaggtcgaatatgacattgtatccaaaaaaaatgacataaaagaatgaattgattccttttacctttgggattgctaaacttaccaacctacttcttttcagaattagaaccctgcaaagtaatgtcagaacatttagaaacaaaattttcaaatttgacaaatttagtattttgtttagattgagccttaacaaaacccaaatcagcaagactcgcttgtcctaaattttaaagctcttcgaaaatgttagaatctgaatttagcattttaacatttttttttttttagtttttcaagctccttagttaaatatacgttatcagaatatcttaaaatcaattcagattcacaacatttattttctcttaaagatcttcaatgttgtgagataattctttattaacttttattaaggaacgatcctcatcacaaatttgtaaccacttaccatacattactttataagattctagtaatgactcctcatcaagttctgactcatctgaatctagaaaaacttctttatcattgttatcagtcaaagtgttgtttaaacaaaaactttttttttcctacaaaacaattgacaaacacttgttaaagcaatatttttattttcatcttcactatctttagaatcatcaccactccaagtaacataaaaaccatttttattcgttttgaaggtattgacacattcagattcatacttttcacattccatacattgaatacccttttgattattaggaacaaatgtattttagttagttaaaaca

SEQ ID NO: 195867 - DNA, 474 bp, Cannabis indica
ttatattttgtgaaaacttagtatgtagatttatgatttattcaatggagctccaattatttataaatgagaataaaataaaaaattatcttttacttcatgtgggacaaaattattattttttaattctaattttatatcatacctttttttctatttaggccttcaaagtaaattaagcatatcttattctctactaacatgcgtattcacttattaattacaagaaatatatatagtaaaatctttataaagtgttacgttacagtctagattaaaataacttttctataatcataaaaataactaataatgggattgtttgaattatgatagagaactttttttacaagttcaacactatcatgaatttaatcctaatcaacaaagaaatttgaagtttttcatgattaattttgtttcaaattttgttaagtttaaaattatacaaattgaattagaaaaagaaacttt

SEQ ID NO: 195868 - DNA, 719 bp, Cannabis indica
caatatgtcaatatcaatttttgttgtctcattataacaacagtcttttatcagcttatcaatctttaataagaataagcattttcaaaagcatatgcctaacattttaactcctttcccttttttaaatactaaattagtctataagattcttttccttttttaataaagactatataatcctttttctctttttaatattataagatttcaatcaaattatgttcaataagtactctttggattaaaatctatcaattaggagatacatgtaattataaattgtaaaatattgctattttccttgtttaatgtttacattttgttaatcggtttgtgaatagggtagctcattatttggcaaaagcttcctattcattttctttgaatggattattcattggggagatgtgtcatctagatttttagactctttagtttgttaaataatgcttatgtttaataaaacatcttattttattcaatttttaaaaaatagttttctcttttaatatatagttaatttaaaattttgtgtacataccccgttggtataagttatatctctcatatatttgaatatcatcatataataaaaattaggataattacataaagtacaattttttgtaaaaaaaaattatatttttacgtttaaagatattttttttttatatattttttacggttttctacaaaaacaacatgaaaacaacaag

SEQ ID NO: 195869 - DNA, 2071 bp, Cannabis indica
tccttcagtatttcacccataagcagctccacgaacatgtcctcccctccgaccagttgatctttcactacagaaagcacccgatcctggtagaattggagcatctccttacccttctagtctcagggttcaacacgtcaagagtagctaagcatttgggcaacccaagcccatccgcacttccacccttggtgcctttagatggagctactgttgcctgagacttctagttcttcttagccaaaggatttacatccaaccctgcctcctcgggaacctcagttggaggcacagatggactcttctcaacggtcaactgaggagacttttcttgggtagaacatcgtccacctttgaccgttttgctgactattttcttgggcagaacatcgtccacctttgaccgttttgctggagacttttggccggaagcatcatccgacctcttctttagcgtgtgaagcatcctctaagacataactacacataagtaaaacaagagggtcagttaagtatgatctaaataaatgtaaataagtttacaaacaagataaagtaccctacatgtgggtaggagcaacctctcgaacaagaaaagagggaacatcctcgtctgaagaatcttcctcttcctgctcgaccataatgggcttctcctttccagccaccggggcagaagatcgagcaaccttctcaagaccatctctgatcctaatggcctgctcaataggtacttggtcacttggaggagccttcctcttcttcttcttcttgctcggagcctcccattccgatactacctcccctactgcctactcgacctttggtacgaagtcagacgggtagagcttatacttgaaaaaattggcttcagtggccaggagagagatattccgatcatttgaagggagttggagaatttcttaagccctccttatgagttccagcatgaatgaaggttggcagtaggatagaatatgctagaaactggtatacttggtgtccatccccttgacaaagtagttgtcctccacgaagccactaatcttcgtcacctcagtatctgtggtacccgtcagccacgactccttgatctgagagaagtaaaagtacctaaacctgttctcttggggctcgacttcaggttaaaaagctagttagtgttgtggacagatggctgatcccatccttgagaggcgtacaacatgaacagagtagatagataattaaggcccttaggtgtgaattgggttggatttatgtggtagtagttggccatatctttgaagtacagatgcaatggcaacattgcaccctgtttggtgtgtggccccaaccaagcttaaaaactctcgctagggtcgctagctagctgaccgggagagggaaggaagcattcaacattccctaggaaaccatcctcaaaaatactagttaatctcttcatggttagcacaaatggtggaggaatccatcgagctccccttggacctctcctatttatgggatgagcctctatgtactccttgtcaacatagtctcagccaacctccatgacatcacttgtctcagacacaggttctcttttttcattgtagccacaaaaggtagcacctaagctaccccgcttcctcatccccttcggcctcagaagaagttgcaggacggacctcgccatggtcctccacatcctggacttcaacgtctccagtagtgtcctctcccttgacagtaggacgggcctattccaccctggctagagtagttagacgggaaatatgagggtcggtagatgaaggttttttgatatctgtggttcgtgccatcattttacgtttgaacgacgctttattaaaactgtgccttgcaatggtcacacaaaatttggcaatagatttttcctcaacagttgggattgggcggccctcaggcaaagtttcaaccacgctcagatggaccctatacgtccagctggcaggaagataacatctctaacctttcttaagttcccagacaaaacggccgtatccctcaccacgaatctgcttgggatagaaatggtgttgcacct

SEQ ID NO: 195870 - DNA, 791 bp, Cannabis indica
tttggtctaggaatgcagcactggatttgtggacatgagaagcgtactttggttatcacactaaatagtaggagtatgcagctttgaaaaatcaatttcaataagcaaatactgaatccaaataagttctacaatggcagtagcaaggctcctatactcagctttaatgctagacattaagacaatcttttgctttttagatctccatgacataagattggatcccataaatatacaaaaacctattgttaagcatgtgtcatctggattggatgcccaattaacatcaaaaaatctagtaagaattagattagaacagagtttactgtggagaccataatcaagagtcccttttagattctatataacaaccataatattctcctccatgatccaaaaaaactatcttaatgactcttcttgattgttttccaagcacatttcaaaagattttgagtttatcaagatcgttagatttttctttaatcaagtaggtaaagccatatcgagaaaaagcattcacggaagttataaaatacttgtttctccacaacatagtggaataaggtccactgatgtctgtgtggacaatttataataaagattgactacacttagcaacttttttcttattttagtcaattttccacgagtgcaatcaacacaagtatcctaactagaatcctcaagaggaggaagaatgtagctcgaagtaatcgatcaactctttctttgaaaatatgagctaatccattgtgttataacaagaaggatgtttccttaatataaga

SEQ ID NO: 195871 - DNA, 1130 bp, Cannabis indica
aaaaaagggaatgttcattaaactaaatttgcatgacagactcaacataacacacaattaatatttcaaattactaaaatttagcataaattttattaaactatcagattcccctttcatgccatacatagtttaaatatttggatcttatcattctcaagcttttttcacaaactttccattagcaaacaaacccatgatttccatgagttagattgaaaaaagcaatgaagttgttctaatttctactcataattcatagattctatagcatgcccaattaaccaaatccaacaaacataaaacaccactaatacataacgattaaagaaaatgatgatgaaatgggtactgaccaactagaatttataagctctctccaattaacagaaaagatacttcaaggtctggacacataaaatgcatacgggtgagcctctttttctgttatagctccattggtcatctcctcagtttcacgcttcaccattaacaaaactaactacaacaacaacaaagcttccacctatatatatatatatcataatcaatataaaaagagaacagaaccacagaagagaggattaatgccacaaaaatattcaagaaaggtattcacctaatatagtaacgagagagagagtcgggttggggtacctagattttgggggtcggggagttgggaaattgcctctatttaggcgttgaacgaccaaagttggtctctctggtaggagcagggagcagggagtggcaaggtttaggaagagagagactgacggagtcggtagagagagaatgaaagtgtgatgaaattagggctttaaatgactgtcgtagtggttattttgggagcaggtcgtcgagacgaggcctggttgtggctgccggcgtggagcatagggagcagagagagagggtatcgagggagagtgagaagggaagagagagggttttccaattaaggttttcaaatattctatttatactttttttaaactgaaatttttttagtatttttttaaaaaaacattgtctttaagcctcagtttataaccgacaccaaaagatcttttagtgccagttataaatagacacttatactgaatctgaatgtataattttctttt

SEQ ID NO: 195872 - DNA, 520 bp, Cannabis indica
ttttcttctattttttttttcagttacagaacactccatctctttttcgatctctctctctaccaatcattctgtctcaccgttccttatcgacatcgtagcagcaatgctggccaacaggacatctctttagatatgtctcatgcttgcttcactagatcttctccacaccagagctgcacgattggagctactaagagaggatcgtgacagatcgagaagttttgggaactagaaagctaacagtgaaggttccttcgacgattgacggccgagaatgactagcatggcatagccatcatttttgtgcattttatttctaacgaaaacatgtctctcttctcttatatattcctctattttttctacacgtgaccattgttggatgttcatatttgtccgacaggttgcatcgttagagtttgggtttgtgggtttttggttcaacgaggaggggttctgggtttatgggtgcggagatctcccaggtggtggttgttttgatttgtggtggtaactt

SEQ ID NO: 195873 - DNA, 577 bp, Cannabis indica
aattaattttattttcatttaaattacatcaaatgtttttaactaaaaaataaacacgcacacatatctatactagttacaatagtataaatatacatgattaaaatgacaagaaattaacaaattaaagacgtggcacataaaatgaattattaagtgagaagatatcgttaaatcatgtaatcgatagttaaaatacgagtattgatatcaggtaccaggcatacttagcaccttctcgatatgtcgtgttgtgattggttagtaatactctccaaaagctactatattaaattatatgggacccgagacttaattagaccaatagcgatattaatatggagggtactaggcaccactgatgctctttagtatttttcttaaaatatttataataagattaattaccagtcagaaaaaattgagtacacaatttgtttactcttagaatttaaaatttgggataaagtaatatgcatgagattcatctcaaaatcaggataccatgttagaaaaagagagtggactctcaaaatcaataaacaatgaaaagagtagtcccgtgaaaaaaaaaaaa

SEQ ID NO: 195874 - DNA, 2538 bp, Cannabis indica
aggatgctctccattctatggctctggataaatccccaggtattgacggtatgtccgccatgtttttctagcatcattgggatgtagttgggccccttgtttcttaatgtgtgcttgaaatcttaaatgatggagttgatatctcgactatcaactcatcaattatcactttaatccctaagggggagaatcccaaacggttgggtgaatatagaccaattagcctatgcacagttttctaaaaattggtctcaaaagccattgttagcaggttcaaaaaggtacttcctgttgccatttcccaaaatcaaagtgcattcctaccgggtagattcattatagacaatgtacttcttgcatttgaattggttcactgcctgaaaaataaaaagagaggatgtttgggttatgcagctttaaagttggacatgagtaaagcttttgatcgtgtggagtggcactttttagaagcggttatgctaaagatgggatttgctactaaatgggttgagtttatcatgagatgtgcttcttcttcaactctctgcttcaatattaacggagctattaaaggatcagttgttccacaaagaggtcttcgtcaaggtgatccaatatcaccttatcttttcttgatatgttcagagggactctcagccttattatgttcggaagaaatcattggacatcttaaagggttctcaatctcacggggaaccccttcaatgtctcaccttttatttgcagacgatagtctcctttttgtcatgctactgaagattcttgccagcaattagtagagccttatcgatatatcatcatgcctccagtcaatttctcaatacggggaaaactgttatgtccttctctcccaataccactgacgctttaaaggccaaatttcaccaagttcaaggtatgcctatttgcgatcttcatgaaaaatatttgggatttccatcttatgcattgcgtgataaaaaaagaactattcagcaacataaaggatcaaatatggaagcttatgaactcatggcatgctaaacttttctctataggaggccgagaagtcctcttgaaaccagttgtccaaccaatccctacctacgctatgagctattttagcttaccaaaaaaattctgcaatcaattagaagcaaagatgaaaaatttttagtggtgttcaaacaccaacaaatcaaagattcattaaaagaaatggaaatttttattccaaaccaaagcggaaaaagggttgggtttctgaccttttatttattttagccaatcactcctcgcaaagaaagcttggcgtattcttgtggatcccaattctctattggctagagttctcaaagcttgatacttcaaaaatggtgatttcattaatgctaccaagggtgtcttaccatctcttactcggaaaagtatttgtgacgggaaagagctattaactaaaggccttcgctggaaaattagttacgggaataaagtcagatgtgctactgatccttggctaccaggttatatgacttttaaactattctctttttgtggcgatcgtgacttcacttttgaacactacattacacttgaaagacaatgggacatcagtctgctaaggagtcattttggtcagatcaatagagacagaattatgattctagagaagattagctaatttggcaccattgtgattctaggacatacaatgttaaatcgggttcacttagccgaaagcttggaaaggaaatatacttcttcaacttctaactctccacgcaaatggtgggacagatttggtctctaaatgtgcctaaaaattaaaatctttgcttggagagtcattaatgatgcaataccgacggttgtaaatctattgcacaggaaaatctctcatattgcagaatgctctttatgtaagggggatgggaatcggttggtcatgctttatttcaatgcactagagctgaagctgtatggaagctaaatcattttcaagtgtgtattccaaatatcaacaaccttaatggccatgatatctactcatctttagctgaggctcataatgattctgatctgggaaaaaaatcatttgcctcatgtggagtatatggacgaaaagaaataagaaagttcatggcactaaaccaaaaccagctcctattatttgtacattagttgaagcctacatcgaccaatttaggaaagttaaagcacctgctactccttcgaaggctctaatgaaaaaaaaccaaatgctccacttcagctactcctattacgttggacaccagcactgcacctcaaattagatggcttccaccggcagcaggctcttacaaaattaatgttgatgctgcgtatgatgtggaaggatcaatcattggtataggagctattgttagagaatatgctagagatgtaattgcagctttctcaacacctttaaggggttgttattctactaaagagatggaagctaatgctattgtctacagtttaaaatgggttgtttcaaaccagttggctatccac

SEQ ID NO: 195875 - DNA, 901 bp, Cannabis indica
ctccccagcctcgttgtattccctaaaattttgaggtgcagcctcctcctcttccttcgcctcggaagggctgctaggacggacatcatcctatcctctatctcttggacttcagcatctccttcatgatccccctcctccttgacgggcggagccggttcggcgctgggtaaagtcgcgtgctgggccacatgagggtcagacgcattgaccttatgcaatcgttttctttgttcgagccatcatcctatggctggacggaaaatttgaagtggagagcaagtcacttgaagaggacgggctggcacgaagacgaggataatccttgtacaagagttgaagcaaatcctagtcaattcggtgttcgcttcctcaaaactcacagggttcatctacaaaagacaagacgtgagatgagtgtttggccgggatatcgaacaataaataggcaaatatgctgaccaagagtactcaacagatttaaagaattaaagtgttcaaaaataagtcaaaacccaaaaatttcaaatttttgggtttagggccaagtttcacgaagctttgaataagcaaggtgaaaggaagacaatgtgcgataaaaggataaatgtcatcaatcacaaagcttcacagatcattataaagaaaatcgcaaagttttaaaactagattttctacttatcctctacagcaaagtcaagaacgcatgtatggaacccaaaaattaagcatgcaaaataaaagaggaaagaattgagaacttactcgctgtttgacgtctgagtttggtccaaacaaagctgctcagatacttcgggtggaaatttcacgacagacaaagcgaaaatttcctttttttgctccgagcttgccaaatagataagttggtaaaagtgaattt

SEQ ID NO: 195876 - DNA, 900 bp, Cannabis indica
aaaggagagacagcaaaagtttttaagtttggctcaatgctcttttatggctcgcttttttagatcgggagcactttgaactcaaaacatatcacaagcggctatgataccatgttaagaactttggagagaaaaagagagaatgattttcattgatttgaataatggtacaatagtggtatatatatactacaaagccagctgagaatacaattggagaatggaaatggaatgaaattaaatttaaaatgcatagcgaaaattgataaaaaaaattattaaatttgttctcatctagcattgtaatggtcttttcttctattttcaaatggaatagtcatttcaccaaaatgatggaaaagtcattctattggaatgacattccaatcctttaaaaataaccaaacaaaggaattgaataaacattttcttttctatttcattatctctaaacgctaccttaaaaataaaaaagaatgattatgtttatcattgtactaaatttatatgtatacataaataatatacccctaaatattggcacattttaaatattttaatctcgtttttattttatgatagtgtttattatagttatagtgaaacttctttacttttttatcttttctatatattttagaatgctaaaaataaagtttaaacaatttattaccctcgcgctcctttatttttagccgagtaaaagaaactattttaaaatctaaattcgacagtgtaaattattcattatttttaaaaactttcttgagatttactctaatgaacatcatcataaaaatagtaatttacgactaaactcctctccttgaactttgaagtttagtgcggtcaaatccttagactgaaaaaattatgactaaactccccaatttccacaat

SEQ ID NO: 195877 - DNA, 1142 bp, Cannabis indica
atgctctcataattgccgaaatagataaaaaatctaccaaaatacctctttaaagaatgtattgtagatttaccctaaaccattttatcaaaataataaaaaaacaactttaattaatatatatagaatatataaataaataaaaaatgttaaagagtaatataatggtaaaaattgaatattaatacgaggtgttatattattattggtgaaaataaatattaaatttgtatatttaatcttaactaattattataaaaaaattgattattcataaaatatggatatcaattaaatactacttaataacaatgttaaaattataatcatattgttgtggagatgaaaatgaacattattattttattttggtggcccttaataattttgacacgtggtgcattcttcatcacaatttcaaagaaaaagcaatgtcaaaatttgttttctactttctttgattaataaatgttgttctacaatcgaatgttgtgacatatattaaaatcaaattagggtggctagctcaaatttgaagttaaaatgtcaattctcaacctcctcttctaaaaaaaagtttcattattattcattacaagaagtgtgtaactagtataggctaagtttatgaccacttaataattttatcttttgaatatgtaattagttactttttcaaaattttcataattaaattaattataccagggcatacaatctaaagaaaaaaaggggggaattttttatttgtacaattgaagctatttttttttctacaaataaagtaagtaattttttgtggcattaatatggatataagtttttattttgcaaaattagggttgaaagccacttgtcgtctccaaagattgtgattccaataaggaataaaaaaagaagaaaaaagtggtatatgaagcttcacgtacggaatcatttttttttggcttcgaaaaatgttcgataaccattgctaaagctacgacctttggctcgggagaatgactaagaggaggaagaagaaaagttacgatttagattgcaatttgagttgcgaaggacatctgagaatgtaatatggtttaatggttattcagggttaaaatttgttgggtatatatccaaagtcccacattggctag

SEQ ID NO: 195878 - DNA, 2560 bp, Cannabis indica
gaaacattactaacttgagtaagtaaaaccttacaatcagaaataatttcaccaaataaagaacttgtatggatagtacttctcaaggcttgaaccaccaacaaacagtcggtttcaataatggccgtatgcactggatgtgttttcagccaactcaatgcttcacgaaagcttatcgcctcaacaaccgtcggatgagttgaaccaataaaaagcttcgttagagcattcaaaagaagaccattatgatcccgaattacccacgccacaccaaaacgattttgctcttcaaaaattgccgcatctacatttatcttaatgctattcacctctggtttgacccattgctccgccccatctttggtctgtaaaccagaccaagaagtctcaatttgagatttttgagcaatatgccattgatcaagaaaactttttgcagaagccacaattgttgaaacattcaccggtttttgttgccaaacaagatcatttctagccccccaaattgcccaacacagagtagcaattaaacattttctctccaccgactggtttttaaaaactgctgcacaccagtccacaaaacactcaccagtagccacggtagtacctattcccactctttcccaaacttgttgcaccaccttacaagaaacgagacaatgcaatatagtttcaggatcagtattgcagatgggacactgctgacttacagccacacgtttcgtaactaattgcgttagagttgggagacactttacaccagcacgccacaccagatttttgactttcggaggaacttttaacgcccataaacatttccaaaatgctgtcacatttgcattatttccatcccttcctttattcaattgtaataactggtatgcactactaaccgtatattccccactgctctctttataccagcagagatgatctctggatgcactaatttgaattgggattttaagtattaattccttatctctttgaacaaagagatcatttaatatatccatatcccactctctaccttccacacttaaaatattagccacagtggcttgctgaagagctgggtggtcagaggttatatatggattaattggatcatgcagccatggttctcccagaatttttataccagttccgtctcctatacaccagcgagccccttgtttcactaactcttgagcctcccatacactacgccacacaaagctaggattgtgacccaactccgcattaagataactccccctaggaaaatatcttgctttgaaaatgcgagaaactaatgagtttggtcttgataaaaacctccagccttgcttaccgagtaaagccacattaaaatctctgaaattacgaaaacccattcccccattgtgtttctggtcacacatacgatcccatgacatccaagaaatccctttcgattcgccattagagcctttccaccagaattttgctaacaaactctcaatgtctctgctgatttcccaaggcagtaaaaatacactcatggcatagctaggaagagattgagccaccgatttgatcaacacctccttccccgccctggacagaatttttgaatcccaaccttgaatttttttcgaacccgatctcttaaatatcccagcactgctgtcttatttctccccatagtactaggcaaacctaagtacatactcctatcatcagcttcattcatttgaaggaattgattaattcttcttttacaatcttcagtagaaaatggaagacttactagaattaattctttgccccgaagccaattcaaacttgtgaaggagctcacgaacgcgagtagcctcttggatagatgctttacaatacaaatagctgtcatctgcaaacagcatatgtgatattctcggagcaccattagccaccttacaaccatgaatccacgctctttcttcatatctcttgattaaagatgagaagccttccgcacaaatgataaaaatgtagggggacaaaggatccccctgtctgattcctcgggtcggcaagattggccccatttctcttccaccatgggtcaccatataccttgctgaagaaacacatctcatcaacaatcgaatccatctttcaccgaaaccaagctttattaaaattgcctccaaaaaaggccattcgacacggtcatatgctttactcatatccagtttaagtgccatatatccttcctttcccaaccttttcctcttgaggtaatgtaggacctcaaaggaaactaagatgttatccgagatgagacgacccggaatgaacgcactttgggtctccgaaacaattacatccatatggtgttcattctattagccaaaactttagtaatagtcttgtataagacattacataaagctataggcctaaggtcactcatactttctggcactttcttctttgggattagcaccacattcgcctcactacaaccctcttcaaactgtcccgtgttgaaaaaacgttgaacaaacgccactacatctctgctaacaatattccagcatttttgaaaaaa

SEQ ID NO: 195879 - DNA, 997 bp, Cannabis indica
ttttccaacactaagcaacaatacaacatggtgctggaatctatgttggagcaagaaatgactccatattttttttaaaaaaaaacatgagtgaaaataattattaaagttgaaacttactttgctactactgaactagtaagatgatctattaataatttttttttaaaatataagtcttttgtaattttgtttcattcattatgaataggtgcacatcccaacatcttcactgttactatacaccatggaggaaactggtttactctatctggaaacaataaatatgaaggtggtgaagttggacattttgattgggttcactttaattatttcactaaaaaagaattagatggaatggtgatagacttgggatataaactccctgttggctttctatacaaaccaataggcaagacacttaatatgggtttcatggtggtggtggataaggatatcaagatgattattgaagatattgagagcaatagggctacagaaattcatgtatatcttgtctttcctaaggtagtacatgctttgggttggaaggaagattcagaagttgttaatcatgtcccttctaaggctttacctcctttaaaaggatgtgttattgaggaactacctgacgattgtgatgtccctgtggatgtttttggtatcccaattattaatattgaagaagatcatgaagaacgagaagttataatgctttgtgattcaaatcacggtactgctgatgtggggatggaagaagcaaatgaggtgaggaatcatacttttgaggaaaatctaggagaagctgaagaggtgaggaggaacaagaaaggtaaaagaaaggtggttgaagaagattttattttggaggaggaggaatttatacaagatgttgaagctgagaaagaaatgggtacaaaggctgaccccaagaggtggtggggttcaattgcagatttttgtgctaatactgcaggtgatggagactctgatggta

SEQ ID NO: 195880 - DNA, 2623 bp, Cannabis indica
aaattaattaatattagaattattaaataatttataaatagattgatgatataaaatattatatggttattttttttaaaaaaaaatacttttcacaatatatattataaaaaaaagaattatatggttataacaaattatatacttttcacaattttttttttaaaaaaattatatattatattatatggttattttcgatatttaaataattttattttatataaaagtatataacttaattatttaaaaaattctgtaaatttttaaaaaaattaaaaaaatttaatgcattaaaaataaaattcaaataatttttgagatgttggaaacgaagtgcaccttagaaggtcactaaagttaccttcctagcaaactaaaattaattttatagtttcaatgcaaatgatattcttcgacattactattaattatgatattttttattctttgaaggatctgcattcatgtttggaagatttctgacttccattttttggggaatgatagctgatcgatatggtcggaaaccagctatgatttttagcacaattgcagtgtcagtacatttatcagctgattacctatgatttttgttcatattaaagattgatcaatcacctttctatcaactttccttctctttatctctcctttgatcatggttttaacaaatatattctttttcaggataattttcaacaccctttttggacttagtacaaaattttggatggcagtttcaacaagatttttacttggaagtttgtgcggaacattaggaccattgagggtacacattttgttttaatgtggattaaatgattaatttgatttcatcatagaacaagtttgagaacttatcttaagttatagttttaattcatcatgtttaatctattctattgacttattatatatgaataactaaaagtatatttttcaggcatatgttttagaaatctgcaatacaaaaaatcaagctttgggaatgtcaatagtaagatatgtcttctctttaatttgttttacactacataattagtagtgattagttgttgtgaatatataagagaaagaataacttaattttcagattagcactgcttggggaattggattattaattggtcctgcccttggaggttttcttgcacaggttagttttcttattttatgttggaggtcatatattactacttatttttgtttttgaaatattgatcatatattacttttttttttttttgtagaaacatctgttattattaatgagaagaatcagcaacaactacaaaaacgattggggatggaatttcacctaaccaaaccatatctttgtccaatcgaagagcaaacttagctaagccatgagccgcttggttagcatctcttttaacatgagatacctttactctaaggaaaaaaggacataagataattaatatcctctaccaaatcaataaaaaggagttatacacttagtagaagataaacaatggagagcattagacaataagagagaatcgatttcaatgaaattgagtggaaagttgtgcatcaatgcccattgcaaaccgtaaaacatagccaaagcttccatttcctttggtgagcaacagcctttgcaaactttggagagtccagcaactacatcacctgcatcagttcgaataagagcccctactccaataatagcaccctttgaatcaatagcagcatcaatattcaatttatacatgtcttttccaggtggctgccatttcggaatggtcttttgatgggaggtatgaaccgactggttgctgcaatttgttgcagcagatgcatgcggttgaatggcagcagcagtagccgagtgatattgagcaagatatgtgtccgaatagctacaaatcacctccgcaatcttaggcttagacccatgaatctccttattttgctcaatccaaatacaccacataatacatataattctctccaaatcagcgtccttatttacattagcaaaataggagaaaatatcaaagcctttaaggttaccgatgttaggcatctgaacttggcactttgaaatcttccacacagctttagcacgagtacaacaaaaaatagcatggccaacagattcccaagcacataaatagagtgaacaagctgaggaagtcgagatcttacggtgcatcaagttggcagccgtcggaagagcatcattaatgaaacgccatgcaaaaatcttgactttcttaggtagtcttagagcccagaagcgattccaccattgacgattagatgatgaaggggattcggcctccatagtttctaaactagccgctaagtggtagcccgatttcactgtgtaatagcctgtatcggagtggtgccagactagcatgtcctctctaggagagggagcaagcggtatagagagaatgcgttcaatatcaatagtcccaaaatgatcttccagaattctcaaatcccattgtctttcattagtaatataatgagccaccgtgaacagaggatcccccccatagtaataaggagtaaaagtagtgtttcccgggagccaaggatctttaacacatctcacactttgcccattccctattttccatct

SEQ ID NO: 195881 - DNA, 1444 bp, Cannabis indica
aatataattttaaatatataataaagtctattaggatttttcattcttgaatccttaactttcgaaagaccttccctgagctcaggcctggcttttggttagggtttgtggttttgttactgtaatttgttttctcactgtgatatagttttgtgtgtcttttgtttaggttactgtgataaatcttgtctctgtaatatggttttgtttttgtttcattgttggttcattttcttttttctttgatggtttgctatcaaattattgttagcggttgagaacaacaagctttctacgatttaaaggattgttagtagtacagttacttgcattgcataatagttgattatatttaagttttttttgtcaaacgatccaagaatcagatgaccaattggttgacttgttttataactctgatcttatatctaagagaggaaatgtcacgattggattgcagatcctattgttttaattgattggtattaatataatttctaaataaaaaatatataaaattttaagggttctctaaattatcaagaattataatatttatattgtattattatatattgcatatcataaatttgttatgtacctattttgtaaaacttatggtaaaaattccctattgtaaaatcatttatcgaatatggtttattagcatgtgatatacatatccagggacacgattttgtcccgtgatgtactttcacggaatgtattccgtgatacattagatggatctcagggtacattagatgggtacgttactaatgtttaaccctaattacccctagatcaatctcaccccttagatcaaataactccctcatctaacggatgtcgtacatcacgaaatacattctgtgaaagtacaatcacgtgacaaaatcatgtccctgcatatacaatatataaaatataggtagggacttgaatttggttaagttatttagtccacgttgatatatatttagaaatttttatatgaaaaatcaaaaattcaacttttattactcttttaccttcacaagagtaggataatttttatatcccttattttgttttattgaccaaaataccacttgtacacataattcgcttaatgatgatgtcattgttcttctatcatactcaaccaacctatcttttctgtaaagtttctgcatatcatttcaattttttcttcttctttttttttttttttctattttctacctacacatttaaactttcatacacgatttaaagaagaaatatctccaaaaaaaaaaaactaaaatatcacaatcatcaactggtattgaagaatcagcctgcatttttttcttacacatttttatatataactcgttattctatcttctccatctccctttcgtggaaaaattcctattactaggccctaaagcttcagaaatagggttaaaatttgtct

SEQ ID NO: 195882 - DNA, 1484 bp, Cannabis indica
tcaagattaaaaggtggaaaatggccatggatgatgaaataggagctctcaaacgcaataaaacctgggttatggttccctactctgcctcatataatcttgtgggctgcaaatgggtttttcgtgaaaaactcaatgctgatggtcttttcagagatgtaaggcaagacttgttgccaaaggtttccatcaaaggcctggtttggattttggtgaaactttcagcccggttatcaaggcatcaactgttcgaattgttctcactattgctataaatagagggtggtccattcaacaacttgacataaataatgcttttctaaatggctacttggaagagggtgtgtatatgctgcaacctgaaggatttgaggatccaactaaaccaaaccatgtgtgcaaattgctcaagtctctctatggcttgaaacaagccccaagggcttggtttgatagactaaaaggcaccttactgagttggaagtttcagaattcacaagctgacacttctcttttcttctacaaagatgagaaacttattatctttgtcctcatttatgttgacgacattattgttacaggaaacaatgaagaaaagctcaatgagttcattgcaaagctcaacaaattgttctctctcaagaacttgggggctctccattattttttgggtattgaagtaataagggatgacacgggattatacttgaaccaaaggaagtatgttgaagaactgttaaggaagtatgacatgatcaacatcaaaccgtgccctactcccattgttactgggaaaactatttccttgacagatggagaagtgctgcataatccaacaatctacaggagtcttattggtgctcttcaatacctatgccacacaagacccgacattagttttgctgtgaacaaactaagtcaattcctgaaagctcctaccacagtccattggagtgcagcaaaacgaattctcagatatttgaagggcacaataagtcatggattgcttatcgggtacagtgacaagctcaccatcacaggctattcggatgctgattgaagatgttgtattgatgatagaaggtctgttggaggctactgtgtttaccttggagacacactcgtatcatggtcatcaaagaagcaattcgttgtctcaaggtcaagcactgaatcagaatatagagtccttgctcatgtcactgctgaaattacatggatagagtctctgttgaaagaattaaaatttcctctgcctcaaacttctgtgacctggtgcgataatgtaagtgctggtgcattggcttcgaatcctgtctatcatgcccgcaccaaacatatcgaaattgacattcattttgtgagagacaaaatactgaaaaaggaacttgaagtcagatatatattccttcttcagaccaggttgcagattgcctcactaaggctctatcaccatcaaggtttcagctgctgatttccaaact

SEQ ID NO: 195883 - DNA, 730 bp, Cannabis indica
tgtcaagacttgaagtcctcacagcagctaatggtgtgctgcaatcacagagcatcacagcagggaattgtcatttacagctcagcagtacccaccgaatattctcctatgattttgtttaatgattttgcaatgattgtgcaaatccctatgatgatttttctgttatactgtaccaaattatatgctgccacttgtcaatataacagtggcatttgtttgtaaaaatcctctttaaaaggaatgaaatctctcagcataatttgagttgagttttattacatcatttattccctgatttctctcttggtatcagagccaatttaggctagcgccaatgtctacaaatcagtctcagactccagcagctgcccctgccaacaacaatggtgtgccaacctccagtaaccctggaatcaccaacataccctctgctcaatcgagctatgtaactaatttcacacaacctttcaacaccttaaaccaaccctttcctctgaagcttgaccgaaataacctataccctgtggaaaaccataggtttccactattattcgtggccatagacttgatggatttgtcaatggcactcgaatctgccctgctgaacttgttcctgctgctatttcctcttgagaagaaggagtcgagcttactgttcaaatcaatcctgattatgaagattggatcgttagtgaccaactttggatgggctggttggtacagctcc

SEQ ID NO: 195884 - DNA, 629 bp, Cannabis indica
aaaaaaaaaaaaaaaaagtcacactgagagactgtaaagacttgtgtgccacctccaaaaggacaaatttgtttcgcttaattaaagtatggtcagtattcactgtttggtcccaacgaggctctaaccaagggactttgttgatttcttcacattaggtttttcgttgttcttccatctcttccactgctagaccctctatactttctaagtaatgtgggatttttttaaaaagtaagcttatgaaattttcacaaaatttgaataagaaaaaaaaatataaaaaaccaatttaaaaaattatatattaaaattatttaagtaactatctttttatatatatacacatatatatttaattatataactcaaaaagaaattaggtggtgcatatcctatcctcaactcctttagcttaatagcaatctcaaagaccactggggaagcaaaggtttatacatagttcctaagatggttgctagcagaggccctcccacgtaaggataccatgaactacccaatagggcacataaacgtccgttacttccaaaggagcgccaattttaaggccctgcttatgtaagtgctattatgggaattcgaacttcgaagggcaattaatgtgtaac

SEQ ID NO: 195885 - DNA, 1606 bp, Cannabis indica
acacaaacgactttttggataaatggactggcagcactttggctcacaacggatcacaaacgactttttggataaatggggttccatctcaaaacctatgttagattttggaaataagatgaatgaggttctatctcaaaatcaattggcaatgggaagagtagcttatttatcttatatatcacaatttatttccacacattagaaatgtgggactaactcttaatacccctaaatttttatctatatcagactttctttagtaaaaattaaacaaaaattcttacatctaacaatctcaataatttaaaagaaatttttaatgacttaaaaaattttaaaaatatagtttaatacatattaaaattcgagagtaaaaatttaaattaacctataaataatagtgatgagatgatgcataattgcatatattatgtcggcaaaggcaaggaaagggcacgccgccacatatgttgttactatcacaactcacaagagaaatataaagagagagagagataaagagggtcctatggactcactctacaaccccctaatcataatcccaatcccattttcatttctttacttttcttttttctctctagagaaaatgaaaaaaaattaaaaggggggccaattgacaattgtccaacttgcttgtactataaatattattcatcatcatacaacataaatattaattacaaacacacatacttctcaattctaatttactaaactaaactaataaatatagtggacttgctagttgctacttacctatgtatgctgcatggccacccatcttagttaacaaggctcattacatttacaacaccaaatatatttaagaaatttatgtactaaccctctaatcttagagtccttttagtacatcttttatttatttttacaaaaaatttaaatagtttataatattaaaaattagagttaaacaatcttatcacgcgtataagaaagaaataattgcaagtgaaaatatgtaaattttatcttcagcactatcaactattttattttttattttttaaatttataagtggttctaaataattataatatagcattaagggtatatgtatagatcaattgtattttgtgtaaggagagagaggtttggattttgttaattatagtaacacattcattcatatatatacccccttataccttacctactactactactattatgttatcttcaattattaatcttaatgatatttgatcaatatcccctctccaacccttcctaaaatgctattcaaaatataaagaaagaaaatgaaaagggaaactaagtatgaatgatgggtggtgggggaccccctatacatatgagcttaattgtctttaaccttaaattcagctcatccatccatgatccatccaatccatcttaaagtcctatacatgattttcttattacttcattcccatacaaacttcaatagcataaattggacaaacaaacaccacagtttagtgcaagctacctttcaccattttccttcttattcttcttcttatcacatatcaacatcatcactttttttcccttctttctttcaataaagagaaa

SEQ ID NO: 195886 - DNA, 1092 bp, Cannabis indica
ataccatggtgagggcactttcttagaagatctttaaaccgctcccaagcatcatacaaagactcaccatcaatctgacaaaagttatttatttatccccttagtttagaagctttagaaggagggaagaatttagataagaacttttgagtcagatcttgccaagtgacaattgtttaattgtagagaattcagccagctttttgctctttcctttagagagaatggaaaaagcctcagtttaataacatcatcactcactccattgtatttgaaagtgccacaaagtttcagaaaattagccaagtgagtgtgaggatcttcaaaaggtaatccactaaattggaggggggactgaaccatttgtaaaatagctaacttgatctcaaagttgttagcctacactgctggtggttttatacaattttgtacccctgttagagtagagagtacatagtctcctaggctcctttcatcattagggtgagcctgacctccttgcataactctaagaattagatcattcccttcattatgccccatcttctctaatttttttgcttctctcttgttctttctgttttgcttgcaagatttttcaatatcgggattcaaaggacaaggctctctgcacctcttctactgcacatataatagattcacctgagacagacaaaacatctcaaccaaacaagttagaaacaagagaaaaaaaaattaaattagaataaaaatgaattaaattgatattgataattttaatccccggcaacggtgccaaaaacttgttcggtaaattagatatgcaagtatacgcaatcaaaacaagtaatataatgataagtacagtattgttcccacgtggattgattatcaagtgccaattaattaattctttagttttatttgatgaataatagtttttggataaaaggtaaataacataacaataatgaaattttagaaaattaataataataaaaataaggattattatgattcccaactatcttttactttacttcataatgtaattacttaatttctttttttctactcaattgataagttgagcaccctccatatctgtta

SEQ ID NO: 195887 - DNA, 948 bp, Cannabis indica
aaatttgcataaggtgacgtggtcctctctaggtgacaagtgaatcatttttgagtctggatggcatatacctcccttagtatgtcgcccgattaaattactcataagatactgcttatttgaagaatacggtaaagttgtcgcgcatagtaaacaataccattcaactagcgacaatttcacggccactttgcatatgtagcccaaggtaaatgtgatagagtgccttaaagatactttattcttttatttgtcaattaaattcctattttcatggaattttcacacgtaaataatgtaattgaggaaagtaactagttttccttgtttattctttatttttttgggggaaacctaatgaatgtaattcttccttataaatagtagagctatttcactatttagggatctgaaatattatttttgagagagcacttacgctgctaaaatctctgtaagctttcgagagagatcaagaacttattgcttctcttctcacgagcaatataagtaaaaagggagtaagctattaccaccatcacggggccaaacctctataacaaatatgtgttcttattttgatcatttgatatttaaattctattgcttctaatctctttaaagactctgggtcgttcactaaaagagagatcaacattttagtgctttcattgagagcaaagaacacaatcgttgttttgattcccttcaaaacgcacgaagatggttgtgacaataagaaggggtaatcccaataaaataattgatctaatggctacatatcctaatgtgtgaactccagcaaatcagaaagatatagtgaggacagatcccgatccaaccatttttcagccttcaaggggtccccagacggcaggttaggactgacgacccctttgactagattcacaccaagcacgcaaaaaacttgaatatttagtactcatg

SEQ ID NO: 195888 - DNA, 531 bp, Cannabis indica
ctgtgacttgggctggcccaacactgcgcccctcttcaacagcgaccttgtcctcaaggttgatcataccatacacctgttcaaactcagccaaattttcccatgttgcatcttctagtgcgctcaaggaccattgcactaacacttgtctctgtcctttgtaatcccgagatgacattatggcttggggaaacatgattggtttgttgttaatgcatagctccggcagtgagtaacacacaggaggcttgggaccatagaatggtttgaggactgatacatggaaagttgggtggattctgctatgttcaggtaatgcaagtgtgtacgccactgggccaacttgagctgtgatggaaaaggggccaaaatagcgtttggaaagcttaggatgcaaacgcttggccactgttgcttgtctataaggttgtagcttcaccaaaaccaaatcaccaatttggaactgaatatccttacgttttttgtttacctgttgtgtcatcctgtttcgggcacgaatcagatttgttt

SEQ ID NO: 195889 - DNA, 1236 bp, Cannabis indica
atccatctcaatctacaactctttccacacctaagcaaccctgttttttaaataataatatatagtcaaatattcatagattttattatatgttttgttggtataaaatgtagtatatattcatatatatatatatatatatatatggtacctgcaattttgggtaaagatctccaagagccttcaccatgagtttgaatgtagttggtcaacacttgatcttcttcagctgtccatcttcctttttttaaacccaacttctcacaacatggtgctcttcccatctctcccacacctataatgatcttattttctctgcaaatttttcttttcagacacaaaagatcactaagacaataaatagaaacagtagttaaaaatatgccctatagactagacaaagacaaaactcacttatatgtatatatatatatacatgacaaatgacacaacacgatgaagtggctcataataccccacgaacaacacaaatgttaaacaccatgatacattaaatgtatgtgtataaatacgtatatatatattaatatctttgtagacgtatatataatatatcttaaagttagtcacttcatatagttgaaatgagagactttggcttttactgaaaataaaacaaaattgaatcaattgcaggtggtccaactaaactttatgaaagaaaaaaaaaagaaaagaaaaaaagacattatttttattgaaatggtttttctgatccattgccctaagttaattagatgagaaaataaaatatcattagattgaccgtaccgtactagagctatagtcttagtttaatgatttcacacttaggctcacgtagacaaaattttatattcaaatcctctactttgatatcaaaataaaaaataaaaaagaagaacgtttttcaatattatatgcaggagcggaaccacataaaggtgagatagagcagtcgctatgttgaaaaaaaaaaatcgaaaaaaattatatataaattttaattagtaaccacacgtatttataaataaataaaagtgatataatagaaaagagttcataaaaaaaaataagtgtcgttgattacatgcatatcatttatgtatatatataaacaaatatatattaacagccgaaacattctttttgtctcctaatcatatgtctctatcaccaaaaagttgtggaccaatattaaatctcatcataaattactataatttggggtcattc

SEQ ID NO: 195890 - DNA, 618 bp, Cannabis indica
attgcgaatacacatagtaaatatcaaaatttgatacaatttaggacttagttaaatagaaaatcaaattttgcccaaaaaaataaaattattgaaaaattttagaatgactgtactactgcatcttgaaatttgaacaattatttattctttggagacaattataatgaaatgaaataaatgttcagtccattgaattatatttattttattttatttaaaaaaaaagaaaaagatatgttttctcctaaattttagtaacatatgattaacatcacaaatacaatgtttctatactggtaaaaactagactacatttcgaagcttgcttagctatatctattgaagacatcacatactggaaactttgtctatgattaaccaacaaagaatcaaaccgtttttccaagaatattccaaggtaagtgtggattctcaggtatgctttagcttaaacagcggtgacattaagaagaaaccacaaagtgtctaaagttctctacactaaatttaccatttagcctgaagcttcactcactcagtaaaagttcattatctgcagtttccatcaagagtcacaagagatttcctgtggcaaattgtcatttctggaattca

SEQ ID NO: 195891 - DNA, 1323 bp, Cannabis indica
atgcaaatctctttgattgttacatgaagtgtgacactggcccaactggcatttctctgctttctatggagcacctgaaactcaaaaccgaattcacacttggacacttcttgagcgttgcaaagatgttgcacctttgatgccttggttggtgataggtgattttaatgaaatcctatccaatcaaaacaaacttggtggtgccttacgaagcgaagcgcaaatggacaagtttcggaatgttttagattcttgttatctttatgaacaaccatttgaggggacccgtatacgtggataaaaggaaggcttaatactaatgctactaaggagagacttgactggtgttttgttaatgatcaatggcaacaaagtttcaaacaaataacaacacaccatcttgattatttcaagtcagatcatagagcattgtctgtcactgttctcccattagaagaccaattgcccaacaatccaagacgatctcggttcaggttcgaaaagctttggctttctgaccctgctgctgctgcaataattcaaaaagaatggaaaaaaaacctgccaggcacttcggttgagaacttctgcagtaacattacatcatgtgccaactctatgcaactttggcacacccacaagtacggtaatatgaaaaaaagatcaaagaagttcatcatgaagtcgaggccctcaacaaccaagctgtacgatctatggattcaatgactcatttgaaaaaaatggaagatactttagatgagttattgtctcaggaggaagtctattggcaccaaaggtctagaataaattggcttcaaagtggagatgaaaatacgaaatttttccatgcctatgcctcttcaaggaagtcaaataacaccatcaaaacgctgcaaaattctgcaggaatcacagtgcactcgaagaaggaattaactgaagttatttgctctttttatgaagaactgttcacggctactggtactgatgctgctgccttagaacagatcctacacacagttccacgcacggtaacagatgaaatgaaccagctacttcttaggcctttttcggacaaagatgttttggatgctcttcactctatgagtcctgataaaagtccaggaagtgatggaatgtctgcaatgttttatcaacattactgcgatcatattggatcagatgttactggtgttattctaggagttttgaatgaaggacatgatatgagttctttgaacaaatcggtcataacactcattccaaagattaaaagcccaaaagctatgggtgattataggccgataagtctatgtaatg

SEQ ID NO: 195892 - DNA, 766 bp, Cannabis indica
attttaatgatgcaagtgacatattggaacttggagtagacccagttgaagagaaaactagattttaatttggactttatatttattaattaaatcgtgcttatttttctatagaaagagcgatatgtcacctacatttttaaattaaatcttatcaaataaattgtttaactaacaaccaagtcttgatttgttgtttttgttattgccttattgggttgtgattttttagcaaaaaataaaagtaaaaacaaagagtcaagtgagatcgatatatcgattttttttttcttctttttgagaaaattttgaatcggtcttattatatgaaatgaaaggattgtgtaatatattggagtattgagtatgaaataattaataagtaactaattagttaaaccagcttagtggtagacaaaatatatatatatatatatatatatatatatatattatatgccatacaaagttctagatgtgcctgaccgatctgtattgaaaccaatatacttaccaatatcatatcatagtattaataataaatatgaatttatcatgtatggctaatttgaacttgacaataatgattttggctcaaaagtcaatatatcacataaatcgatcgagtcaaaaatatcataaaatattgaatgttcgatatataataagtagagtatcacagtagttcactaataattttaaataattagcttgctaaagagctgattaaagcaagttttagcattacttattaaattaaaatgtg

SEQ ID NO: 195893 - DNA, 759 bp, Cannabis indica
tttttgcatgatttaatcatgccatataaaaataaattacatcaattttccccatatttatataaaaaaacttttttttggaagaaattgcatattgtatttaattaggaaaaattacacaaattatattttgttaaaatttttacaccgttcaaatatttttttttatatttttatagagtcatataaaacaacacaaaaataataagaacatataaaagtaacaagaaaataaaatcaacatccaaacaacattaaaataatatacaaataacaaaataataagagtacaacataatataacatgaaaatatatatataaaaaaactatattttttgtaaataaaatcttaaaaactgtaaaaatatttaaaattcatcgtattttggtaattttttttattatctttgtataattttgaaataatccattttaaattagagatttttacatggtgtgctgttttttatatttattatttttatattgtgacacgcgtttttaacattttagtgttaatttgtacagtgtcttttttgtaagcaacataaaatttgtaataccctattttgacacttgtttcatatttaataggatcctatttaatatttatttcttgaataaaaaattaataaaagtttgatgtgatatttggttgtcacatgaccatattttttttttcttttaatttatttgatgatgaaatatattagactcattatgtacactacttcgttacttttcattattctctctct

SEQ ID NO: 195894 - DNA, 3684 bp, Cannabis indica
ttatggttctaatccgaaaaccgaccgaccattataaaaatataaaaaaaccgaccgttttaatccacggtttggtcggtttaaaccgaccaaaccgaacttcatttttttttaaaaaaataagtttttaaattttttataattatttgaaaactaaaaaattaaagtattgtatcaaatatcatataatttaaaaataaaactttcttagttaaataaataatgtaaaataaacttttttaaatttgttcaaattatttgtgctactaatatggtaatgagttatattaaaaaactagtattattttatgaatgtgtgtatataatacgtaaatgcatcaaattataataaaataaaataatgaataattgagactttaaataaaaaagatataagtaaacttagattaataaaattgtatattaaatatgtacaaaaataatatatattatatataatatatatgttcggtcggttctcggtttaatcggtcggtttgccattgacactaaaaccgaccatgttaaggcggttttaaccgaaggcggttttttcggttttcggttttttcggtgtcagttttttcggtgttcggacggtcggtttactcggtttggtcggtttcttggattttttgctcacccctgctctgaagagtgttctggaataacaaagatcatgttgcatgagtgtttgggccaaaatgggaaagctcgtaccaagttatggagataaaaagcaaaggtgcatacaagcttggcatgtataatgagtacatggagttagttctcctacaaagatattagaatggagaacatctcagaacgtactagatatgagcaatttgtaagaactctactcttaagtagtagttttgtcaactcacttataagagttagtttagaaagagctaagtatgcatcactcttcaattgtggcccctgcctggcacgtcgagtacgggtagccataacatgagtctagaagtagactttttattttgtaagcttttagaattaataaatgtatgttgcagaacaaccatagatatttaagaacaattaatgaataaaaatgatttttcaattcaatagtgcgtcaaacaacttgctaacaagataacttcttaaagttaatctttattttaagtttcgcatgtgtacaaataagtcccaccatgaaaatagacagacaaaggtctatagtacttggtgaattgtaagtggccaagagaccataagtatgcttgatcacatggggggcacccacaccgtacaaggatcaaatgaaaaagtaagtccaaacacttatatgtctaacaaaaaaaggtaatgctaggattaaagactccctagccgatcatctatctaaagtaacagactttgaggcaatatacaaatattgttataaagtaaaaggcctataggccatacaagaacatgataataatgcaagataaaaacataaaagactaacaaaagtttctaaatgtcatcaagagtaatgggaagagtaggtggatctagacttgttggaccctagacagcagcatcagcctgggcaagtggagcctctgaaggaggctctgtagcctaaactccaataggctagctggcctctacatcatcaagatggccagccacttcctccataggctgaccggtaatagtcttctcaagttggtcggtcggtacatccatggtctggctgaccatcatctcaacatcctgattggcctgctctgctagaaatctaccctcataaagatccctccctcattgaagtgaactctagcagaatggtgaaaaacctctgaggataatccaaggtactcatccttgatggcatgttgcccatcaagggctgcctatttctccttgcacttcttgtcaaggtcctttctctaccttgctgtcttagaagtcaacctgggcacttcttggttgtagaggctaagcaattcgttaaggccatcacattggtcctgaacctcactcaagcaatttaatgcgtcattgaggtcagcttgtacctttgtacgggcatccttctctgtcttaagttcaacttttggccctaaattttttccttgagacctgcattagagcccttggctcgagcgtgagcttggctgagcttcagcataccctaaaatcaaagacaaataacgttagaaaagcttgtacacaagtcttgcatacaaaaagttaaacaaataaaaaacttacagtttaaaagtctctgagagtgttggaagccaagtaatctagagtctcaacatctagctcctggagctcctcatcaacacttagaaattttttgccaaagtagttctacgcaacctaaatcaccttctcacccttggacgaacatgctgcccgactaggcctctgggcccctttgcctaatggcctacgagggagtggagtgcacctcgagtgagggtccacaactactagctggttggctagaataggctctagaggacgaggaggtaggatggactgaatcacatcagaagatctagctgtccaagtcaccttggccttaggacaacaagaagaaggccaccagaccggtccccccactaattttctcatcctggaggccatgtttgcaaaaatgaaagtaaaaaagtgtgaataaagtcatcagtactaagtgcaagtaaaagtataaaattattattactatcatctaaaggaaaatttgtaagcctatcatctttagaagaggaatcttcagaactatcttcatagacggtagccttgcccttatctatgaatgcacgtgttggtctggcaggcatggcaaagtcctgtcctctggatctaaacaacacaggagcattcgcagcagcgcctcctcgtgcctagcattgtctaagggtctgttccctttgggttacaatcttggcaatcctggtaatagggatgccattatgagaatcacccttctcctactcaagcgcaagccattcctcttgactatctcactcttccataggagtgttgtcaggacgtctgggagggcctcgggttccctcagtaccaggtgcaggacagtgtagactatacctccaaaacttttccttacaggaaaacttgagaatgtcatgcctctccacaagtacagacaagatgtgattggccttgtcccttagctggggagtagggatctatcaaatgtatgtcagtaccctttgaaaacattgactaacatacctcacatcccaagaaataaagtaactctaggtgtacctcctaattttttacattgccttatctttggtgttgccaagcaactcgtagcctaactagctaaagtaaaattatctgaaccttccctatagaggaacagattttaactcaaagtaaaaccctatctcgtaaggtgaaggtttttgccagctatgctccctgtagagaacgaaaaagcgccgaaaggtactcgatagcttttggtgtgatcagggttggaaacaccctaaagaagtatgtaatttccctaaagtaaggatgcaagcgcagaactactccttgctcaatgtgatgacctgaccaagccatctagttatatgctagacgatgcgctaactgatacctactgggcttgtcgcaatgaaatcctcccacaagtcctccttccatgatctcgtcaagttttgtggctaacagagaaga

SEQ ID NO: 195895 - DNA, 796 bp, Cannabis indica
atctcctcatactactaatactatcaacaccaagaaatctcaatcgaatcccaatactgctgtttccaagtatagcgaaaggagaggtgtaacgcatctgtttcggagtatagctcattcttcgttaccaaaccctagctccaagtccactaccatcttcgtcattgccgtccccaattacttctcctttgaagatttcatccgattttgtggctctcgaatcgatcatatcactgagcttgtcttcataaggtgaagtattattgattttggacattttttttttaaattccgggtaatttcgagaggtaagaaagataatcaagaaatgatttttgttatggtgtttcgttttcttgatctaaactcttaactgggttgatttggttagagaagatttgcatgttgcttatcactgtggttctaatctataatttgataattcgagattaagataattgttttttcattaatcagaaacgatgggatggatgatcgatacagcgttataattaggcttatgaatcaggtgacgtctgatggattttattgcagtctcaatgggaagaaattctcacccggagaggttggttatcttctcttatgttttttgtggaggctgtgttgttttgatttaaccagttgaatccttggtttttaaaggttgaattttgtttaggctgaggtttgtcacattctgtttctgcattcggtggattacacagaatcagctgagatagctgggacaccaccagatgggtccgctgagttaccaacatgccctgtttgccttggt

SEQ ID NO: 195896 - DNA, 386 bp, Cannabis indica
cagttatgcaccaatgcatgctagcgtcagttgataactgacgcaaaggtctttttcgtcggttataaaccaatgctttggtgcataatcgacactaaaccatctaatttgaaaaaaaataataataaaaaaaaaagacgaacaaatgggccaaaacccatttatacccttaacattttaaccctaacaatacaaccacccgccccttattccccatctcattctctctcttatatcatcttctctctctcatcatttaatttttaaaaaataataactaaaaaaagacggaggacaaatgggccaaagcccatttacaccttttaacattttaactctaatacaaccaactgttccttatttcatctctctctctctcttcctta

SEQ ID NO: 195897 - DNA, 3411 bp, Cannabis indica
atttctttttcctgagttggtacccttatattaattgcatcattgctcactttgtttggtttaagttactttcaattcaatttttggataatttctagggtttaaaagagaaaaacttaggtttattacattcataggcttctggtttgaataaatttcttccaaaaattgggattattcttttttgtaaaaatggcccaatctggttttgaaatttcaactccagatttcctagaaatataatgtcctaaggaattagctcttccattcaaaccccaaatccaaaaacttcaatccaaatttaagataaatgatgctaaaattagggaccatttaataaaaaccaatcacgatgaagtttctagtcactataggcaatttttacaagaaataactaagggtaaacgtcgttatctacgagatgcaacttggcttgaaccccaaactttatcttctattcctttagcaagacccttgtttttaccccgactcactattgctttttcgtcaggtgaccttgattttgaaattatgttcaccaagcctcgtaaatcaaagaccccacaagaccctaatgtcacttttgaagccgagctcatcgagttcaaagtaagggccattggcgattatgtcggtggtgtattaaagacttgtggtgtcaagaaagggtgaggatgccgcattagatccgttgctcctggagaatttagttgcttttctccagaatgagttattcacgaggaatgtggtggctccagtactagtggctcgtctggaataggcgctcaagcctcgagcacatcatggctggagcatttctccccctaagagttttgtaccatattttaggctaggagtgtcccactcccctcaagatagtttatttatactctgtcaaagctgttcccgcaaggaagcgaggttcatgaggtttctattacctcggtactcacacaaatgatcacaggatcattgtgaggttacccaacaaaaaccgagttcaaagatgacttcttctagactacgggtctttctccaatcaacacaatcgcgttttgcattatacgtaagtgacttctctactcaaaagcttggttttgagtttttagattaataaatctaagatttgcttacttatttcatccccccgagatggttgagcgccacaaaatcctgctgggtcttccttaaggattgcgatcagcagatttcttgttgaacgagtccagtatgaggattgtaaacctcctttgctcggaccagttcacttgtgactacaaggttctgaagtactctttgtgggaaaaagtcccagtcccatccaatgaggaaagctaggattacattactcgcatccactatctccagaaagtaacccctcaggaagctgaagaagaagcatccggaggtaatcaatgtggatggtcacccgccgtacttaggactgaacttacctcgctagtaacctttagggatagccaataaaatttttatacatgggacaacttctgtatagatcgcatagcccataggtttgatagctggtaccctcaattccatgtccagcttagttgcactagttcatattacgagattaccgagcagtaccaacttggatatgtcgagccatccagattcaaattgggattttattttctccaataaacccttttatcatttcatgatcacagggtctagggagtttagtaattactatagtcctccctcttcatcatttgatgattatgataacttttctttaactgggagtttattccccatttttcttttaactatttttgaacaagtgttcacgcatttatttgcctcgtacatatggatctaggaaaccttctgaacacctctggcaaaaaaggaaagaagaggattgttgccttggaaacttcatcggggacgaatctggaacctctgaagagatcaaggaagaccactgccaacaagtaacgtgcctcacagcctataaatctcgagtcagcagaagatgaagttcaagctcacactccggccattgtacacgttgatgagaaagctcaggcttcgactcaccaagccaagtcctcgggtaaaggacttgagatggttctgcttgaaccttcttgccccttgcccaacaaagcagggagcactggcttggagtactgctcgcaatatgccacctttagatggcaccatttcacgtcctttcagtctaacaactagcatttggttaacaatggtagctatgaagagttatttgagaggagtctcaactttagcctctcggttagttcccttcttattctctttgatcttccttatatttctttcaaatttatatttataaaagaaattattttatatttttttttgtaggcatcctttctgtctcatgttacacaacatcggggtctttagaaagtccaacaactagaagctaaactccgtaaatccattgaaaaatgcaaagtcattgcaaagcaatggaatgatgcctaaaaagaaatcacgcgattgactaaggatgctgaggagttaaagaggagccacaagacggagcttgaggttgctcagaaagaagccaaagacaaatgtgaggcctgtctaaaactccaggaagaactcgatgaggcaaatgtgaagctcaagggagccgaggctgatgctaaggaatggtgcaacaatgttgcaaagcaatccatccacagagcctggctggccaaccccaacatggatttaagctttctgggtgaaggtgctaaagaggttctggcttactgcgagcgaaccaagagagaagaggcagtggactccgaggaagaagaagaggatccatccaagtctcccaccatgtatgcttggtttttacttgttttttttatttagaaaaatggccctccggacgagacaatggttgcccctagtggtattatttttgtaaagataattttacattattagatggccaactttactttttatgcatttatctttactttcaatgtctcgtaccttatatttcgattgaatatatctgttcatggtgttttatttcacaatttaaatatttatatttgatccaagttactgatactctaggaagtatttccattgttctccctttttctttgatgcatttaagtagttattagtctactacatatgtgcgcgagcaattataatatgcgtatagtttcaattcgcgagcagttcttatctactttattttatatgagcaattttaatctgccttgttatacgcgagtagtttataatctaccaaatattgtatgagcagttttaatctgccgtatataacatcgttatatatatttttagagcaaacttaaaaatattttgaataattcactccaggaactattttgcatagtttttgattgctcatatgaatag

SEQ ID NO: 195898 - DNA, 1950 bp, Cannabis indica
ttttttgaaattaattttttacgtaagatgccacctttgagacttcttcttcacatgttctcaactaatgatattccaagcgaagtttaaacttggaaaacaccatctttccttcaacaatccaaattgaaatttcctaagatgacacattgagctaggtaaattcaatatcaaacctcccctgaagttgtaacttctattctttaaatcctactggagccatctaatgtgatgccttagtaattgactccactctcggtatcaaaataataattaatcaagtctacttctcgctgctatgatagactagaaaatttctttaggaaacacatcccagaatgcttttactatgctgatgctattagactttgctatttgggtctactagagctcatcataactgttaagaatcctatccatctatcttgaaaaaggtttccaactttccaatactgaactaattgggattcgggaaaccccaaactgatcccataaaaacataaaagttattcaccctctggctgaaaattcaccacttttcttttacaatcaatgttggctgcaactcaaacaataatccaatatgtgttcaaaatgatattcaccacaactaacttcacaagaccgccattgaacacttgatttattactctgatcaacataaacttaatccacctttttgaagatatttaacagcgctaggcaaatggggttcaaaaccttgacccatcactataacctaatttatccagcttaacaatttcttaacaccatcgatgagctagctttaacatcgacccaagcaatagcaaggactcgagcttaaatgaatttcacttccttctttggctcatctttcatcaactaggggaaatcactcttatagtgtcccaccacattataccagagccaagcttgcttctatattcgcccaaatgatacatcctataactggatataccgactaaatttatctgtcttcaaaactatatgaatgaccattttaacattgtttcccccaggtctcttactctgacttgaaccaccaaatgctgatggagcttctccactctaactagttgatgagtcatcaccactcctaccaaaactaagggtaggatacctcatgggctcttaaaagtactctactgcacccttggcttaaaaaacctactctactatttgagcatagatagtaataacatcagtcgtgatcatcagtttgggtttgatctcaacattaaattcttacaagtattcaacttccttactgaaagtggaatgtacctgaagccaacttgaataacctatctcacttgttactatacatataattgaggaatgccatttccccaccaacccaggacaccttcccagaattggaatgtttactaattacctaaccttggtaacttctttaaactaagaatgcaattagggcttaactactaatttagatttatctaggtttctcttaaaacatgagatttcttcctatctaatcttttacatatgcttctaatcaccctatttgagatattacaccctagggagtatactgtcttgaactaacccaagcagctagaataaaaaacttaagaggtcacctaaacatctcaggagttaacatgtgcccaagtcaataatgggtgcttaggttgacatcttgggtcctgatttacatcagttccgactaggtcaacatccatgtgcaattagctaagccattgcactcaagcacatgagagacatgccacaaccaagtttcagactccaaaaccaattctggatcaagccaaacctagaggcaccaagtaggaaagggcgcccatattatttgttatatgagcgagatctaacaggtcaacaatcccgtgccaggttatttgacatattaaatagtggcgctgtgcaaacacaatttaacttagtgaagtgttaggctagttt

SEQ ID NO: 195899 - DNA, 1504 bp, Cannabis indica
gttaattatgtcttgcaaatatggctttaattccctaaggagaatggaatatatatatttagttacttataagtttttttcattaaaaaaatatttaggtttgaaattaggattagtaaaaaatgttaaaaagggcagttttaggtggtcatcattataggttaggtgtggtatcattgaattttttatatcctattattataggtgaagggttagcaacactacaaaatcaatttgaagtactacagatgtggagtggtgacccatgtcttcctacaaaatacacgtgggaatgggttacgtgttcttcccacccaattccacgtgtaacagcactgtaagtattatatgtatgtacatataagcctacataatattatcatatctcttcggctgtaattctttaatatatataaatattatttatataacatacacaggaatctaagtggctacggtttatttggttcacttccagattttagctccatggatgcccttgtctcaatgtaagatgttgcaatgatggactcatagatgttgtctcaattgcttttttttatatattgattcaatgtaactgtgtataaatccatatgtcatgtgttttgttttatctctcagagatttgcacaacaataccatatatggtcctattctttattttcttggcgaccttccaaaattaacgttattgtgagtttatttattatacactataatttcttcatcatatagaaataaatgcatatataaaaatatatctaatataatatattgtttgttgtattatacaacacagggatttgtcggaaaataaattcaatggatcagtaccctcaactttatccaacaataagaagttgaagttaatgtaagttaatacatatatatatttatttatttatagctaggtctaatgaattatttttaatattttttaattagaggctagcaaataattaaattgtgtattgtgtgtttgaagggtaactgaaaattgccttaccggaatgtcttgcccacttacattggtagcgccgccaccgccaccgctgtctacagaaaagacaaactcaccaccgggattggatagctttttctttccaccaccatcgtcgggatttgatttcggatatggctttgataatggcagcaccaataacttggcaaatatgatattagcagccatagttcaagtctttttacttgctttcatcttctttgcctagcttctaattacatacctacttttttttttttacattcttacaatttatttttttttttaaaaaagaataagtactgatgatgtgttatcttatttgccccttcctctcgcatagaaaacattaagtttggttttcagtattaaattaaacaaaaaatgtggcaataaagagatatttgatttgaataaatttcacatgcgaattatattgttcatttttggattatgattctataaaatttttgaacacgtacttgtataaatttatatatt

SEQ ID NO: 195900 - DNA, 2729 bp, Cannabis indica
agtttcactttcaaggtgaagacgcttaatgaggatcacacttgcggtttagtgtttaacaatattcacgccaactcaacttggcttgtgaaacactttattgacaatttcagattaaatccaagcatgacatatgctggattccaagagattacttcaaaaaccaagtttgctcgtgtgtcaaggtggtcattttatagggctaaaaccaaggctagaaagatattgcaaggatctattgggaaacaatttgccattcttgatgactactgtaaaatgttgttgtccaccaatcctggttccacaacaaagattttaactaccatgattgatggcaaaagaatatttcaaagagtttacatatgtcttaaggcttgcaaagatggttggataagagggtgtagacctttaattgggcttgatgggtgttttttgaaaggttattgtaaaggaatgttattggctgctgtaggtgttgatggagacaactctatgtttcccatagcttatgctgtagttgagaaagaaaatactgaggtttggaaatggtttatggagttgttgaaggttgatcttctaattgaagacactaagaagatcacaatgatgagtgatcgacggaaaggtttggagattgcatctggtgaagtgttcaatggaagtgaggagaggttttgtgttagacacctccattcaaactttaagaaggagtatccaggtcttctacttaagaaattattatgggcaacatctcgtagtaccacattgcctaagtttgatagagtaatgaaagaactgaaaaatgtgaatgaaggggcttacaattggttatcaggtaaaacaccatcagagtggacagagtcacatatgtcagagtacccaaaatgtgatatgttacttaataatttatgtgaaagcttcaacggagccatcattgatgctagagacaagccaattattacattgttggagaaaataagattttggcttatgtctcgcttttacaacaagaagcaagcagtgaataagtggactaaaccagtgggcaaaggcatcttaaaaatcttggagaaaaaatattaagttgcaaggaattggttggtgacagctgctgagaattataaatttaaggtgacaatttttagtgggagaacattatcagtatacttggagatgagagtttgcacatgtagatggtaccaactttctggcattccatgtgggcatgcagtggcatgcatttggttcatgggaaagagtgtaactgactatatacatgcatactacaaaaaggaatttgtaatgcgtgcttatgagggaagtgttaatcccatgccatcccctgataactggtcaaacacaggactcaatcctatttatccaccacctgagatcaagattccaggcagacctaaaaaatccagaaaaagagaacttgatgaaccaccaactgggacaactaaagtaaaaagatatggacaagtgaagacctgtagctattgcaagcagaaaggtcacagaatagaaacttgcaataatcaaaaattggttaaggtgagatttttatgcaataaatatttgtgcttaataatataatataaaatttaattgtttgaacatactgttgttcttttttaataaatcgtcaaattgataaatgtaaattacgtaatgatttgtgcagcaaccaaacaagaacagacctggtcgtccaacatctactaatccaagtgaagcaactataaagagaaaggcaagactggagaaacaaaaggcaaagagtcaaaatgcaggaacaagtagtgcatgaaaggaagaaatttttaatgtcttttgatgtggcaagaaattattttttgatataggcatactggctgtcatgtaatgttttttatgttgaaaatctgccaagcacttcaatgtattttgaatggattttctaatcttactttttgttggataatattttacttttgcttgaacagagatgtaataatgacattacattttcatatgtgcttcaagtgtatacaaaagttcttttagtttattttttttttcactgtattatcatttaagactatgtcttaaaatcaaggtgcaatctatttacttttaataattcttttagtgtatctctatcaacataattagattcatatgctgtgataaaacaatagcattatgtccatatatacaatatctgcatcacatgatgacccaatccatatatacataacttcattcagttcatattaaaaaaaaacaatgatttaaaagacttggtacaattactcctttaaaattccatctgatatgaagttaggagcaaagagcctaggacctacaggtcccagaagactaaaagatagcttgaatggtccaggtcacacacatcccttaaagcattaatttggaattgcttagcctaaacacccaccttcaatttaatctcgttaaacagtccaagcggcaaacatctccgaacctaaaaaggttaaagagtgacatatatcttatctaatcttgtagacttgtagtagcttctaaatctttgggttttgtttgtctaatggatagcgttccatccacaatgaaaaactatccaaaaagaaatcaaagatgtgaatctcaaaaatctcataattccaacgagcagagtaactaagtctttctcttgctcaatttcgtatgaatatggaatagttgggttcgtcaacaatggtgat

SEQ ID NO: 195901 - DNA, 2119 bp, Cannabis indica
ttctttttttttttaatggttacttccctttatggtttttttttttttgttacttccctttctagtttctatgttatttcttaaagatcacgaaaagagttgaaggctctgctatattttctatttggtgtggttggattgtgaaggagtagtttccattacatatctcttactcatgtatgcactacttaatatgctgtttcataccatattctttttgtttgatattattaggcctaacattttcttaaactacttttcatgtaatgctataccttaagcatccatcagttttagagatttttctagggttctccgattaaaaactttgtgaacttgcaacaacattgtgaacttgttttgttagaatctcgattttatgaattaactcattagtaggaactagacactagtttggcttgattgtaagttttttgtctcagcgtgaggtcagattttctgttctttatcactgagcggtcgtttaatggccttagctggatcaatgtctttggtttattctccgtaacatttcatttgtgcagaacatgacaacacctaatttttgaacaaagtttggttggatggatggttggttggttattctcagtatgaggtcagaaatttgatttggattaatatatttagtttatttcctgtaacttttgatgtatgcagagcattacaactgctgattgtgtactactatttttcgatgtaaggtcagatattacaactactgatttacacttgggaaggtgcatatttatatgtatgagttttagttcataattttgatggtgttctagctttgactgactggttttttaggctgcaattgttgtcatgttgcaatcctctttttttactgggcgaactgttagaattgctgaaataaatcttgggttatgatttattgttgacataagtaattcatgcttcccctgtttttagttgcttaaaaatatttaggaaatcttagattagtattaataatgcctttcatgtaaatttgttaaattagattgatatttacttatttattttacgataggaaacttataaagagaaatgactaatttaaaatgtgattcttttattgtaagcactcaaatcttttattttagtgacatttattttactaaacacttgtatatagagtacactttaacacacactttttgggacacttttttttatactctcaccctttttagaacacacttgttggtacatacaccttcagctactccaggcccctattatactactcaaagtttgtttacactgattctcgctctcttttagggtttttgtattaattttttttttctaggtgatcatgacaattaaaatgatttctttcaaattcttatttagttgtccttagttttctactattttcaagagtttctattagatttttgtgaggtttttggttttacgttttcttagtatttccactcttgcatttgacttagagatatctttttgggttttacatagcatttctgctcttgcatttgcctctcctttctctcattgtattttaagtattcaattgtttccatgtgtttccggtactattgttttggtgtttttggtatatttctttctccttagatgatgaaggagtattattttgggttgctgaccttggattatagaaaaaggtgtaaactatttgtttcgtttcatatttaattttccttgctcaattgtatgcatgctcctttgcaacacttgctattttgtttgatcttttcaggctttcaactttcctgaacatcaacttgattactttggattcatttaaaaaaatcacttaaaactttggaggggatgttgtattaaaattcaaggtctattataattacttaagggctgtgtgtatttatgatttctatacacgaccttggggtatgaattccatcttgagtttctcgaatcttcttctaaataactaacttgtttggactagaaacaacattgtgggcaggttttttaagattcaagtttctaatgatcagccattgtgaattggtatatcttattaaagcactttcaactgttgatttacactagggatatatcttattgctgatacttttgctggtgg

SEQ ID NO: 195902 - DNA, 726 bp, Cannabis indica
tggaaagaaagatttcacgatttaaaaaatcccaaaactttagaagcgacatttaggggaacaagctgggagatttttagtggttatttatgtcgtccctaatactcaaatttattatagtgacttggttagtctgttattgttgaatcctctcattgagcgatattatcatgaaatttttccaatctacttattaattgatatttccattttcctttcaatttttttttagtaaaaaaaaaaaaagaaaatcaaattagtttttctttattttgccccttttacttttgtgtttttttgctccgccgcatatattgaagaaattgtctaaattcccattcaaacagtttttgtgcatatatatgtaataattctcatatactgtgcattctgtctttgtttctttcttttttttttctttttaagatgaggaattataatttcagtccttctatatgaaggaaaaagcccgacatagatgtgaatggaatttggaagctatatatatatattgatctgatcacattgctcgacaaaatatttgaatgatcaacgcgtacttaaattattaaaggaaaacgctacgaaactccatcctttaacatcgattattatatcataattaatcatttgtacgtgcaagaaggtccatgcaaaacgacagcaatgaaggaagaaacgacgttatatcgaagccgcacacgtataacttataactcctagctt

SEQ ID NO: 195903 - DNA, 827 bp, Cannabis indica
taatttaatgtggaccatagatataatttgatcaaatggattaaaattagtgtaaataataatgtagaaaatagtgttaagagaacgggacttatacatatagtaattacttatacatttatgacaaacaaactgcgttagacttaaatcttatatgttgtcatctcgtgatagaagtgaaagtgacgtgcaaagttttgaaaaaacagaatcgagtacttagcctcgtcaatgaaaataaaaacttgataaaatatcataaaattcataacaaacaacatataacaaagtcctaaaatgtataaaattactagctcaagtggtcatagtggatactaggagtgtgtgtgtgtgttgaggggcttatgggatcgaatctcaagcgtgtaactcaaaaaatatatttataaagacacttctataaaataaaaaaatcataattaaatttgtacgaaaaatcttaaatttaattatactttcttagaatccgtgtgatagtttttcctcattggtgagttacttcgagctctttttaataataaattctttgtgatttctttcataccgagctcttcttagccattcatttaatttacacttatatagttaaataaaatggtgtcttattcgaaaaaattatcatttgatttaaagtacggtggtagtccaattcaacggtgtggctcttactctagtagcaagatatttttattgcaaaaccttgtcagcaatcttggtctcaatttaacttaaggcttgcaatttatgtattcgtaaagtatttcaaattaacacaatcttcacacaatacgactatgcttaatatg

SEQ ID NO: 195904 - DNA, 643 bp, Cannabis indica
ggtggtactaacatttcagtcattccgattgtggggatgggtggcattggcaagaccactcttgctcaaattgtttacgatgatgttcgagttaaacatcattttgagctaagagtatgggttactgtgtcagatcagtttgatatttcaaagataacaagagagatctttgagggtgtcacttcctacaaatgtgatatcaagaacccagacgaaattcgaagaaaactgaaggaagcattgcaggggaagaagtttatgtttgttcatgatgatgtttggaacgagtcttatactttgtgggactctttgaagagctgtttcgattctggagcaaatggaagtaaaattgtggtcactacccggagtgaagctgtggcctctactatggccagtggacatgttcatcacctaacaactttattggatgatgattgttggcaattatttgtcaaacatgcttttgggcccaacgatgaccttagtactaagtacaaagatttggaagaattgggtagaaaaatagtccacaagtgcaaaggacttccgctagcaataaaatcgcttggtggattattgcgctctgaacgaaatgctgaaaaatggaaggacatactcactagtgacacatgggaggagttgt

SEQ ID NO: 195905 - DNA, 666 bp, Cannabis indica
gtttgtatgaccctgaacttatcctacgacctctttcagcctggccagctcaaaatcatctcccaagtccacattgaccccaagctagtttctccaacatatacctgggaggtaggccttgtcacaagaatccctgtggtcctttgggcaggttgtccaacattgaccgggacttgcccaatacttgttggatcttgcccgacattgaccgggccttcaagtctgaaccctatagatggagttgcctgagttgactgggtagggttggccgagttgtcaccagtttgtggaacttggacattagaatccacacccatcgaatcttggggctttgaggaagtgctcctccttgtcaggaccatggtgactaaaaggtgaaaagagataagatctttgtaagaacgtatctactctcaatgaaagcactaaaaatgttgacaaaaaaacaactgactctaagtcagataatcactgattaatcacccataaagagttaggaataacaagtacataagaacacacatcaattttagaggttcgacccccttgtatatgggtaatgacatactccagttttagttgtattgattctgagataataccgtccagatcattaaggaagacaaactgaattcaagctataactctcaaagtatttacaaagaa

SEQ ID NO: 195906 - DNA, 1287 bp, Cannabis indica
ctccatcgacatttaccttaacctgaaagttctctagtttacgccaatggttgcaatgaaaagaaacaccagtctgaaataaagactgttgggatctagcaaccgtccattgattaaggacctgcctagccgacttcactactctcaaagttgtagcaaattttttctgccataacacctcatttcgggtcttccataaactccaacttaccattgcagcatcaagtataacatcaccccggtcctcctctagcagagcaaaaaacaagctgctgaaatcctgaaataaactaagattggaggcagcgcagcagagaggttccagcagcttcgagcaaacccacaatcaacaagaacatggaaaattgtttcacactcaacatgacaaaatggacaaaataaatccacattgacatgctttgtactcagctgaaccttagttggaaggcaacctgtacaagccctccataagaagtgttgaacttttgaagggacttcaagtttccacaattttttctagcaattttcttcttccaaatgcaaccaattcccagcagcagattgcaagaacttgtaggcactcttaaccgtatataaccccgaatgttccatatgccaataccacaaatcctcctcagtcgagtcacttaaatgtatgctcataatcaagtttttatccctctccacaaacatatcatcaaggatctttaagtcccatgacctctcacccacaatcatcaaactagcaacctttttatccacagaccttgatgatctgaaatgataaaaggattactatccataggcagccacggatcaagaaggatactaacagatgagccactaccaatcgagcgtcgagcaccattcctgaccagagcttgagcttcccaaatactatgccaaataaagcttggattttggccaagttcagcttgcaaaaaagaaccatttgggtaataccgggccttgtaaattctctccaccaatgtatctttcttagtgagtaatcgccatccctgtttgcccaagaaagaaagattataatcacgaagatcacgaaatcctaacccaccgacatgcttatgttgacaaaggcgcttccagctaaaccaactaacacccttgcttgaagaattagattgggctttccaccaaaaattttccatcataccttcaagactagcacaaatttccttagtcaacagaaacacactcataccataacttgaaagtgcttgagcaaccgacttgatcaaaatttccttactcgctttggcaaaaaac

SEQ ID NO: 195907 - DNA, 538 bp, Cannabis indica
ccgagggttcacttccctagtcgagacattagtgccagctgctcgaggagcagcggtaatgctatcgagaccaatagctctaacattccttccatttaaggtttcaccctgagcgttggtgcctacatggccagttggaagacgaggcacccttcctttagtggatgacactctacctagcactatccttctatcagcttggctcttcggtacctctggtcaacttcctgagcctcaacactattccattgctattggaatcagtgtcagaactcttctcgctgcttgtccaacaaatctcaaaaattcctttcaaaattagcaaaggactcatttaaatgctccacctcagggttggatgcaagctcttcttggtgtttcataagatcctcttcgagttccacaagctcctctcgaggtccacacatggctcacctggtggcacataaccataatttttgttgccaactcttatttttgtcccgtttcctagtctcgattccaggactttcgacctaccgcctgaagctcggtcaac

SEQ ID NO: 195908 - DNA, 2943 bp, Cannabis indica
cggaactcaagcctaaacacggtagtgtacctcgactaggatcgagacccagacccgaacccagacccagacctagagttgggacccgatcccagacccagactcggacctagatatggattcggatactaacttggactcgaacccaaacccggaccaagactgggatcaaaactcgggacctagatccggaccgagaccttaacccagacaaatatctggacctttactcgagacccaaactcagaactggacccgaacccagacctagactgggatctggatctagacctgacccatacccggacccagactcggactaggactcacagcccatcccagacccaaacccgaacccagacactgaattgaaatcgaaagtgggactaggacccaaaccataacacggatccagattgggacctaggacccggacctggatgggggacctggagctcgacctcggaacccaaacccagattggaactcgagactcagacccgaacgtagacctagactcgaacccaaatttggagccaatccaagatcagaacccgaactcagacttggactaagacttgaacaccaacgtggtcctggactcggactgggacctaggactcagacgtggattggggatctagccctaggacacgggaatcagaactgggactgagacacaggatccgaccccggacctggacctggacgtaggaccgggaccgggacctgggactcgaagtggaactagattgggaccctagatcgtgattgagatctggacctggggcttggacctaacccgtagttaatgtttggatcttggacccatacctggactcaaacccagacccagacctgtatccaagacatgggttcgagtccgagtcagggtttgagtccgagaactgaaatgtaactaggacccagacccagacctggaccaggacgcggacccaaatacaaactcgaataagggctcgagacacgaaccagaacctagacacggacttggacccagactccgaaccaggactagtaccgggattggagactcaggcctagacccaggaccttgagctagacctaaagtcggatctagacgtggaacttaacacggaccaggacccttaccgggtttgatacccagacctagacctgaacttggacccagacttacgccaggaattgcgacccacaatccagaacccaggacctgtgactcggaacctggaccagaacccagactcgtaccaaaactcggacccagacctagaccctgacccatatccagacccaaacctggaatgaaacccatacccagacccagacccaaactcgtaccaaaactagaactcatacctaggactcggacccggaccaagatcaggactgggacctagacccggactaggaccaagacttgaacctggatacggatgagaacccagactgggactgggacccggacctgggattgggaccgggactcaggacacgatacttggacctgggacctgagaaccgaaccgtgacctagacctagactaggccaagtcccgagactagaaccagtaccgaacacagactgaaaccctaacccaaactgagacctaggaccctaacttgaattggggaccacaacccattattaggacccaagacccaaacctggacttgagacccgaaccaagacccaagaatgagctagatctggaccaagatctggatttggacgcgacacccaggacccacgacttgaggcttggaattggctctggactcgcaccaagaccaacactagaacccgaacccgtaccagaactcaaactagactcgacatgtggtttgtgtttggatttgggaccaatcagacttgaacccaaacacggacgtagacccaaacccacactcaaaccttaaatcgtacgctgtgacccgaaattaaaatagaaacttgaagcaaagccttaaaccctaaaccctgaaccttaaaccctaaatgctaaactcgttacacttacccctaaaccctaaacccctaatctctaaacattcaacctgaaaccctaaaccctaacctggatacaggcctagaacaatccacataccgagatcggaacccaggacccaggctcagacccgaatccagaccccaacctagacccaaactcgggacctgaaccgagacccaaacccagaccaaaacctggtccaagacctagaccttgattgggacacagatcgggacctcgacccggacctgaacagggacgtgaactcagacctggacccagaccatgactcaaacttgaactcgtactgggacctagactcgaaaccaaactcgggatacaaacccgaaactgaacttggacctagaccgggacctaggatccgaacctacatgggggacctgggccccaaacccaaacctggaccccgacttggaccaaggatcctgacctagatgggggacatggacccaaaactaggccccgaaattgggaccaaggtctaaaacttgacccttaatttgagacactacaccctgccctggacccggaacctaggacctgactaccgggacacaaccccaaacctgggccctaactaaaacataggaccctacccaagacctgagacccgaattggaacaagactaagatccgaaatcgagatccaaatctagacttgggcttcgacctgacccgtagttagtgtttgaatccaggacccagacccggatccgtaaccagactcggacccgaacccagattgagaaccagacccgattgcagacctggaattagaatcagactaggattgggactagaaccaaaacctaggacagtaacatgacccaaacctaaaccaaaacttagactagaacccatacctagacttggacccggatcgggacttgtgacctgggacctaaac

SEQ ID NO: 195909 - DNA, 961 bp, Cannabis indica
ttatacacctctcttcctttcgttcttctactctgttttttatttcttttcttcctgcaatggcatcttcatccactaccactttcactcttgttgttttctctcataaagtttcagtgaagcttgatgataacaatttcctaatggcgtcctcagttttttctgccattagaggtcatcatctccaacagttcatcttagacactcatcaacctccaagaaaatatcttactcaagaatatgaagtgcgacaccacatcaatcctcaattcacagactgggaagtacaagatcaacttatgtactcgtggttgttgtcctccatgtctgatggtgttctaactcgaattgttggtgctgaaacatctgctcagatctagaaaatactagaggtatattttgttactcaaacctcagctaaaatcgatttttatactactcaacttcaaaattacaagaaaggttcctttctgtcaatgaatacttacttcgaatcaagacttttgtgggtcatcttggttctgttggccacgaaatttccaccaaagaacatgtttcagctatctttaaaggattgccctcaatttatgatacctttgtgatttctattaattctagaaatgatgagtactatgttgcagaaattgaaacattactcttatcctaagaacatagaatggatactcataataaagaacttgattctattaaccttgctactaattgtggttttagacaaaaactacaaagttctccgtatttctctcacagtgcaaatgccagacttttgaatgatcataacaatactggtaaaggttcttggaatccatatatgttgtttcaatcaaatattttccctccaaccaacactagtcaaggtcgtggccaacctcatagcaatccctctctcaatcaatctcagaccactgcctccaaaccagtgtgtcaactctgttcaaga

SEQ ID NO: 195910 - DNA, 809 bp, Cannabis indica
caactgaggtcatggcttttttgatacggctagtgaagtgggataaaaaggtgtttcatagagccaatgttcattgcctatgaaaagagcttagctattaatatgtttatataattatggttattattagtagctagtgtgagatgatagtaggtgattattaatttgcctgtgttttttgacttggcaaatttaggtagctgtgtgtttcactcctcaccacttatgtaaaagtgatgatgctgacatggctttgatataatggtgagtacttttgcagagtagtaatcccaaaaaagaatagtattaggtaatattatttattataggggagaactatagaaagcatatgatttatgttacatattgagtttgaagaggcaacctcttcaactttagtgttgtcttttcaaatataatagattaaagtagtggttaatggtttccttttctttttttcctatgttcttttacaactattaaatggcgaaaaatgcatcaactttttcttttgaacatgatgaggaatataacaaggtaaattatcacaatcacattcacataatcaaatgaccatacatcaatatcaactggagcaagttaaataattgttaacgattatgtaaagtgctcgctttaagtctttattgggcacttacactcttggaatgatggttcttatacacgagtatgtcactttggccgctttatggactgacgactgaccctatagacctttagagtgtttctagcatgctttgtcctcactcacacactttctgggaaaacttcccaggaggtcgacttat

SEQ ID NO: 195911 - DNA, 1478 bp, Cannabis indica
gagtttctctatatttcatacaaaaaaatcaaggatgactgcaattattagtctatgtgtaatataaatcaatgccaaaaattcatacctagatgaaattctacaacacaaaactatattactatattctttggtactagtatcattcatcaaaatagcaacaaaattgaaacccaaataggagtctaaagaaagcttatatcaatctatgggaaacaaacaagtaaatgaaaatatataatttaatttaaaaaataaaaataaatatatacacacataaatcacacactaaaatggtaagtaatttttaataagtggaaccaatcataaataaaaatgattagttgaaattacttgttagttgccacataagcgtgtcaagtttgtgtgtgaattttaagtgcatatattattttgcagctgagaatgaataaaaaaaaactaaaagccaaaaatacataatacactacatcctaaaaaaagggtcacataatataataggcactgaaaacaataggaaaaaaaggactaaaaccgtttacatgtaaaaaataaccttttaaaaattaattataaacatatgtatacataatgacacatacttcctaaaacataatttttgttacttaaaaccaaattaaattagaacataatcaaattgtatccatccaagcatcaaagtcatccaatgcttcagacttggttccaacctgagactgagagacattacactgaataaaattctcactctttcctaccttaaattcaaataaattattgcttcggttcatcaaaccgggcgtctgattaagtaggtcatctaggtcatcttccaggttctttttcggaagttgaaacttggctgcagatacttcttctatggggtgagctgaacttaaacgagttgaatcgagaatctctacgctagttagtgagtcaagaagcatatcgagctctgcctctgccactgctacctgggaatttacagtgtttcgtggtgtgaattcagagacttcgcgttgatgattgtacttggcaacatcaatctgttttgatgaatcacaaaattccagagacggatgaagactggcagatgctttaacctcagcaatattcgccaaagaatcaattaaatcttcagatatttctttcagtgctgaatgatcattggttgcaggaatttggtcactttcccgagagctgcttgcttctgatatcaccgttgcacgctgtacaacaaactatgataagtatggtacaccctactttgaaatttaaagatttgaacaataaaactatttcaaggataacataagcagcaaaggaaacatctttctcagcaagaaacagtgggaaaatgtatatgtttgctgaacttattagtacaggcagatggattgaatcagttggtatcgaaacacattagcaaagaaagaaaattcacaaccaataaaacttggaaagaagcataccagttc

SEQ ID NO: 195912 - DNA, 844 bp, Cannabis indica
attgttgcacgaattttgtgcaatatgagatttgtaattaatgtgtataggaaagaatattacttaacaggagacctatagtttataaatcctttccatatcaaacatggtagaatgaaatatataatttatgtttattgtttattgtgtaatctttgataatatgacataattctatgtaccctttttttctttgaaattaaagcgtagatctgtgtgtgagtattattcctgtcaaaaagcactatgactaagttgaagaatgaattttcggtgaaattttgaaacatctactgtacattcttaatttgattgtacatacacatatattttattagagctggaaatgaagatcgaatactagtatattatatgatcgaacaaaaattcatgtatatatatttataatttgagcagaagtctagacaaagaataataaaaaacgcataattttaatccctggcaagaaactaacaaaactctcttatatttttgttttaagaaggaataatagaagtaggaatattattacacaataagtatcggttttagcttcaactggtctgtggagggggacctttaggaacttctgggcgttttggagatcttggagctttgatgcgtatgcctttacctcttcttcttattactctctgtaattatacatatatgcattacaatagtattattaaaatttacccaaaaaagattatgtagaaagataacctgaacagatctcaatttgggttgttctccatcttccgtttctgaaattattgttggaaaacattagtacaaccaaaaattgagaatcaataacaaggcaatactattaccatacatg

SEQ ID NO: 195913 - DNA, 1773 bp, Cannabis indica
tgagatcgatctagaaagaaagatagtagaagaatagaacggttaaaaaaaaaataagggaagagaatgagatgagtaattgataatagaagagagaagtgcaatcgcctttctataaacatcactacccccccaaaaaaaaatacccactatattgtcactatctacttaattatatatagtaattagtactctactgctttttcctgtaatgaaacaaaatatatagttatgtctaccattattggaaagagattaaaaaaaaaattaaaagaagggtgtgtgtagtcgttttgtggacgtaaaattctgaatgagcatgtgaaatagagttgtgatcccttatgattcagaattaatcaacttttttccttttcactttgaacgtggtgaagtaattaatgtattaccaataagaaagtaagtttgtgtgataatgggaacagtagggggccggggccgccgggcttagtggccatagccccctaactttatgatctataatgtgaaaaaactgaaatggtaaatacatacattatataatacatacatgttttgaattaaataataagagtatgaaaaagagcgcaatagatgagcataaaaatatttgtgaaaacaatttttggtcttagaatgaatatgttttttaaatagaattaataatttttttgtaactttgtttcttatttttttttttttttttgtatcttgcttttaactaatgacaccaaatctttaaagcgatgagtttataagtaaaaataattataaaataatatatatgagcaataagaacataattaaattaatagaggttcggtcttgtgattatggtaatagtctactctttttttattgtattactttcaagattaattatcaagatcacaacgaggtgactaagttagtttatcaacaaccttgatgaaagcttacaagtattttgacagcataagcactcactagaatatatgaactcaaatctctaaacaatagaatgactcaactctttattggaaagatacaataagtattgttacttaaaataataagaaataaataggaaattgaattctaaatctctaggatcactcgactgtacaaaatcgatcacataaatgtagggatttaacgatgctataaataaggatatatttaaagaaaatatcataaagaatctaaattcatcgcgtccttctacacgaaggattctgctttcctggctaatgacgttctgctcggaacatcacacacaagtctagtctagatgcttgctggagactgacgtaactagttttgagcgtagattcttttggagggagcatttgggggcaaagaactcgtccatgccttggaatgatctccactagtcatcttattgagtgccatgtcaccctgtgcggaattgggataacatttgtccccatgtttgtgtgggaacaatcgctcatacgtggacttattcggtctgtaagttgctcggatgggtgatacatgcttgaccccatatgtcatccctgatcagatgtgacttgtccgcacgatgcgaacccttggttgtctctttagtatcctgggcatttaatgccttgcctaggaaataggatcttaagtattgtgaggacggctacaaggagtcatgcctctaacggttgtactctttaatgagtactttattgtcattttttggaggaaacctaaatttgaacaccaaattaccgacctgcccctcaagcaatttataaaaagaaaaatagacttcgttggcca

SEQ ID NO: 195914 - DNA, 1773 bp, Cannabis indica
ggatggaagccactggtattcaacctgcagctcaacgagttgtttcctctcgttaatgtaggcaataaactttggaggattatctgaaatttcaacatcaaccaaaactctaacatattttataattggcctttctagagtgactttgtccaccatgataggttttttatagtgctcactaaagcactcaaattattcttcccccaatatttgagccttaatccattaagcctaacctaaacagggacagacctcaccatttgcatcgtatccatattagttgtccatggtcttagaaccactggtttcgtatcaaagtagatcactatagtttcaaggattacatctctagtaacttcttttctaaagcttacaaaagtaaaactagaatgcatcctcacaatcttttccactcctaaattcccctaaattctattaataaaccctttgaacactctgaataggggatttgctcccaaaactatacaaacaatcgatgatttccagtaagaagcctcaatttcaacttcctctaaatccaatttagcaacaacttgatctccaatggtttagtaaaatctaaccgtgaagaaagggttcttacctaattcacattgaatttactccaagcatccttagctgaatcttgaaaatctattttctccacctcctccacccaactcgcagactttggggtcaatttagtagcactaggcacacgaagaacatcgacttctttcagatcaatttccagctcactgcaaggatcgagaaaaacctctacctgaaccatagattcatcctcttggatcaaagctgggaggtcgcacgaatcattctcattagtagaaactattcttacatgctttgattctgtcttcttcctcttcgccatgagaataaggagagagcatcacacgcccaacctaaaaaggtttttatcataaaagcttttctatttatcacaaaagaatttttcttgcttatgtgttgagatcaaaacaagaacttcatatacactttgtcctagtagcccacattacttcttgtgtgtggtggagcgatttggaagactactgtgtcaatttctaattaacctgaaaggatgaaacatacaaaaagattcaaggatacattgataggcatcaagaggtaaatattatttttacatttttacttttagtttaataaatatacatatagcgatcttgggcatatggtataatgataatgaaaaataattcttccgttgtgtacctgatttagtaccataaaattgacaaagagagagcaaaaagataagaaaatagataaagtgaaaaggagaagagaagagagggtgagaaaaggagaggataagtaaagaagagaatgtgctatggtgagacgaggctcaccacatggacctggtaagatgttacccttggcaagatggggtctttgcaactttattcccttgttgaggctcatgcttctctaggtctccatatgttagggtttatgctttaaaagaaagtaaattaaggataatatatttataaatatatgaaacataaatatattatataagaatatgttaattacttgttataattaatcaatatcaaaaaaattatttactcatacaggagtgtatgtatgatcttgtaagattacaagagaattaggttcataacatataaatgaaatgagttagtaatgtataaatgtatgtaacatttaatataatattgctagtatggtttactaagcactactaaatagtgtgtgtga

SEQ ID NO: 195915 - DNA, 788 bp, Cannabis indica
gacagagtataagtggaatacaactttacaagtagcaagacagggtctctatacaaggtacaacaaaactgtcaagcaacaattgaaaggagtgaagcgagctctcaaggggttgtacctacatccctggctggcaaagagaagcctataagtcggccggggtgagcctataggccgaccaagatctgtacacaaactggcagccaaaaaatgactttcggagcaagggagctttcgttcgactaaaggaccctgacctcgacaaggaaataggtgtacaaagctattctcaactagcaaaatagtgtcctccacatccaaaggctggcctcctcttggtatgagcatggtcgaccatgtttaacctggtaggaccatggctagctagacctcccctgtaggtctatgggtggccaggattaacctggaaaaaactctatgtgccgcctaaaatgtggacatcaagctacttgcaaattgagccattaacaacctaataaacgatatcgtgtaatgttttttgggcttgtcgcatgcatgttgtgcctttcgggatagtctattcatgcgcttttcgtatcgtgtcgtgcttaaagatatattttctgtgtcgtgtcatgccaatttgtagtatcgtgtcgtattgtgcccaaactcatattttttcatgcctagtcgtgctcgtgtcttccaagcttatgttggtttcgtgccgtgtcaaaaagcacgactcatatttacaacactattcacacatttgaaaatttcatatttgtatgttacaattt

SEQ ID NO: 195916 - DNA, 850 bp, Cannabis indica
aattgtaaccttgaggggccgtgctaggagagttagtctgttatgatagttagcaatgttagtttgttttgttattttgtattcatttcagttgtaactaactctgttaattgtaactatctctcttgtaatctgaggctatataatgcctctaatcattcattaatgagtagattgctctttctttcaatctctctcttttattgtctttctttcctttttccttttttctctctcttcgtactctgttttgctattcatctggttcatccatggccaagaggtttaacaagctacgctgaccaataatttttatttttttttataataaaaataatatattgattagttaattttttacgtaagttttctatagcaattgattgtattgcttctgttgatgatggcctaaatttttatataatttgtgatgattttttgtttgattggtcgtatgatttattgattattatacccaattcaagactaaaaaaaatcaatttttattgtaagtgattgttgatattccatttcaagcatttaagtattgatgcttaactcaacaactttgtttcacgttcaaagaaatagtgtttcaattatttatggtcgataatttttttaaaaattattaagaactctaaggttttgggaattaatctcttaacttttataagattctttacttctatactaaacaataatcattatatttttttcttatttaatattttatctatatattaaattattttttcataattttagaacttgagcgttcggggtccaaaacacacgcctagcttgcttaatctcatggccgaccatgattattcatctctattttgaa

SEQ ID NO: 195917 - DNA, 2656 bp, Cannabis indica
ggttatgttttggtttaagaatatgaatgagggaaaaatggtaaatgtactaggttgattttagaatttaattttgtattattggagcccatcattttttctctctttcatctttcggctcaagggaaaaaactgaaccctagaaagacttcaacccattttaagcaattcttgccagaatttcatagcaccagatgcgagctagattaaggtaagttttcagtgtcttttccttaatttatcataagttttaaaatgattttggtgaaagttttagggtttctgaattgtggtgttaagctatgtttagaggatgttttaagggtttgattaggttcttttagatgtattgtgtggatgttagaattggagtttgcaaatttaggtttaaaagcttaatcttggcttttgtataatgatttgtataatttgatgaactgtggtgaactaatgatttggatatgttatttttgtgatattgagttattctagagttgtttatcaggtttgggaaggtgttggtttgagtttggcggagaaaatccttgaatttctggtctgccagaatcagtccactggtttgttctggtacaccagaaccggtctaccggttgcatctgatgcaccaaaaccagtcgaccggttacactataggggaaattcctagattttcttcaagttttttcttggctcggggtggtgcatagtatctattttatgttgtttctgtgttgtatgagctattttggagttgttggaagttaggttcttgttcggtttcagatttggattttattttggagttttggtttaaggcatttattgagttttggttatcgtgacataggaccgggatcgcccaactttgttttcactcaagtcggcctgcacaactgatttttggacagaggtaagaaaagtgttacacatcacttaggattcagtgatcaacgattgtgtttgttatagtctcgattatgatggagatcctagttatgagtttgttattcctcgattatgactgagggttagaaacggtcattactgttgaaagcgtagataggtttcttacttgtcgttcgttgtatcggcaacgatagtgacatacgtaacttatggttgatgagtggtaagggcgcttaatgaagcaccaagattgtgtgattttgatgttgtgaaatagattaagcttgttattatttgatatgttgtaattgagtacatttttgttataatgtaactaaatggattttataatgcttaaggaattaatcacttttcttgttgagtctctgtgactcaccagttttacatggtgtaggtaaagaatagggcaaagttgagcaggcatgaggttgaggtcgctacagtagtgtacatatgagtcgcggtgccacggcccggtggacaggatgtcccatcttgattgtattttgaactataaacttattttttaaaagcaccaatctttctgaatataaatattttggtaacaaggggtcccagtgaatgttaatatttatcttttataaaattatgtgttaatttaattacaaaattttaattacccacacttttcatatacttatacaattaaatagaaaagtaattcttttgaaaagcacacatgtggcgtccctatagaacaaggcattacaacattgtatcagagcgaccaagttttaaagatcctgaagactagtttgatatgtacattggctgcgaagactcgtttgactcatggtttagtatgttttaattaatagattatttgttaattacctgattgcacgtttatctgaaatatcctagctgttagaaaagtgtgaaaaggttgagatgtatggaaatacttatcagtattgtcattacttgtaaatgtgaccggaagcatatagattatgcacccgaggcagtctggtagagtaaccgcgagcttgctgggctcaaggttggagattagggtgagaatcctccaccaccaccaaactaggaagaattatatgccgcaatgcaggagaccatttggcaacatggagagcggatttgagagttgagggagtagcagccttagcctactcaaaatccaaaccctaatgctccggaacctctggtactgccacaggatgcaaggaatcgtctagaaccattgtatgagcagttcaggaagtataatctgccagtgttcaagggtggtgctgatccactcaaggcagagtagtggatgagtatgataacatcgatttttgattttatgcctgtcgagaataatgatcgggttagatgtgctatttacatgttgtgagaggatgcccgcatttggtgagagattgtttcacagggtcatgacttaaataacatgacatgggaagctttccgggcattgttctacgaaaaatatcataatgagtctatccgagcaatcaaagcaaaagaatttataccattgactcgaggcagcatgacagtgatagcgtatgccatcaagtttgatcgactggaaaaatttgctttagatgaagtggctattgaggctgataaaaaagcaaaatttcttcggggattggataaacacattacacaagatgtgattgttgctaccaaacaactttggtttgttcagacttatgcatagatagttgagttggccctagct

SEQ ID NO: 195918 - DNA, 1599 bp, Cannabis indica
gaaaacacgacaaagaaaaaacaaaaacaaaaaaaaaatctaaaacttcgaattgagatagtaaaaaaaaaaaccctaacctcaatcctcaccactcttcacaaacacaaaacaaccaattaaacgcaatagatccaaacaaacactcgaattaaacaaaacccccttaaaacaaagcttgaaaaccccaaatccctcactgatctctgaataaacactatcccctaaccccaactaagatcaaagagtcaaagtaaagacgggtttgactactcttcttcctctttctcactcaaagcacaaatctttacactaacgaaaccccatccaaagataattaaggataaagcgggaaagtaagagagaaaatgagggaaaatgattttctgtttggagagagaaagaaaaaaagttttggaatttttgagtaaatgaattgaaggcggacagtcactgtttggtcttcaagtctactccggcgacttatttgttaatatcaatttgaataatcacctgcgccgcagtccacggtatgactcttgtccataatggacttttcaccctttacaacaaagattcctccacgtggcgagatactattagtttagagaaacgtattgtgttagtggacgattcatccagatccattgacatatgggtcaaagtaatgtattttgatgtggcagcttggctcggctcggctcggcctttttccatacgttggatagtaacgtcaaattctgaccgtacgatctgccatatattttagtaaatattattgtttttgtctacgctgtcggctgcactcgccacgtcacttgatattttcttttttgtttttttaactccgactttgtattatgtcattccatgacgtcatttcccaatttcttttttcttttgttaagcagttttatttgtacccatacattctattattataaaaaataaatttagataatttttaaaattatttttaatatattttaaaataaaaaatttatattattttatatttttatattttttttaaatcatgtatatacttttttatattttctaaaaaaaattatataattttttgttcataatatttaaaatataatttatctttatttgataaatatatttttttaagaatatgaattagaagaaaaaattaaaaaaattagtacaattaaagatataaaataaaaattattaaaatagagtgtctttagaaattttccgagtgtaaacaaaattttcttttttaatttaggctaattagtatttttgctccttgaatcaaagtatttttccgagtgtctttagtatttttcttttttttttttttaaattagggtagtttgattttaatacatatcaaaattcgatgggcattatttggtagatatcaaagtctaggaatcataatttaatatatggataatcacaaaatgagtaaaattaaataaaactaggataaagtcctaattatcctttaatttatttaaaaatttaaaagttcttttttaaataaaaggggtaaccgccaaaaaaaaggaacccattaaaaaaacttttggggaattgaaaaattgtttttttaccgttcac

SEQ ID NO: 195919 - DNA, 927 bp, Cannabis indica
actactggttctcaatcgcaatgcgctcttaaaataatttttaatttggtgacttaattaattaagggaaagaaaacatttttttattttattttttcatttcattacattttcactttcttaaattttctgatgaaactttgagagaaagtaatctacagtgttaaactttattagtaataattagctatcattataggtatctacataaataatctttatataaaaataaatgtcggactaaattaattgtatattttaatttatataactaaatagtgggattgaaaaaagaaaaagaaaatctcaacacccaaaagtatcaattttaaaagaaatgatatagtaagaataagaactccctaataactttttcaaaaaatatttatgtaaagttgtttaagacattgatttactatctcgagatctaaaaagaaaaaagaaatattaatttttaaaaatattttatcttgtaaataagtaatctcatgatacatagtaggtaaggatgatgaaggatattattattattattattattattattattattattattattatataaaagtatattttcttaatatggctcaaacataattaaaaagtgtataactaattataattgtttatcaagttttttggcaactaagaaaataagtaaagttttggagctaaaaaaataaacaaaaatatatataggttataatttttatgtagttggtgtgttaacaagtcttagtccacaaatcacttgacaaagaaataaagttttctctctaaaatttggcaatgtataaacttaatacccatgatcttatttattggtagccatgaagagtttagttagtctaattactaatggaagaaaatacaatgagagatgactataggcattaaatgttgtcatatggtctatttgagagg

SEQ ID NO: 195920 - DNA, 964 bp, Cannabis indica
tattataattgagatggtatctggactttgttccttgctggcaaaaaccaggctgagactgtattttaaaagtgaatacttgtgtcatttgctattcctgtcttgaattagtatcctgatggatagatgacaggctcacatgttcactggttaaagtgtacccttcttgttaaaaggacacactattaggacaatgggttgctgatgataaatcagtcttattattggaaattgtttgtgatttgcaagattacgtctaaaacagtttgcagttacaaaatgcttacatcagtagagcaatttttgcctcttaataaattttatgtgaaaatgttattgcctattggttcatcattttctcttttaggccaaaatattttcctttagaaccttatgattgagttgattccattcatggaaatttagattgtatttgaaaaaggatcccaatactttactatccataagattttagagcttttttttattatttttttccacactaggagggagggagattcaaacttgggacatgaggagagatatagtagcactaggctgtgctgactacgaaatttcttcatttaattgtttcttttatatatatatttataaaaattatcaacttcctcatgtgagtaatcggaaatttctgtacgacaaaatgattaggattggtttccagttataggaatattaatatgaagataaaagctttgttgctttcttcactgcagtaaattattgcaaattctgtaccatataattaagatgtagttgtaactaagtgttttgttaatatcatttgtgtacgtgcagtgaagttcgggttgaaggattagagaccctagattattttgacaacttgaagagtagggaacgctttactgaacaaggtgatgcaataacatttgaatcagaagtaaggttttccatcactttgtttctgatgccactcttaatt

SEQ ID NO: 195921 - DNA, 595 bp, Cannabis indica
aattagaccttaattttgtgagggaaaggttccgcaaggcctagtcaaagtgaaacatgttccaacacatgatcatcttgctaatggcttaacaaaagacatctcgagctttttaaggttcaaccaatttcattccaaactcacaattgaagaaacttcaattatgagcttgagggagggtgcatgttaggacaattagcttgttgggaagttaggagtttgttagaactaactatttagttagttatttatcctaagcttagttgtgttagttaagctcgactgattctattatagattactgtgtatatgatgttgtaattctttcaagatcaataatgagaattcatcttcttcattcacactttctttctcttttcttgcctttctcttgcctttcctttggtcttttctctatttttctcaactctatcatagtgttcaacaaaactaacaatgtgtattattttagtgtacatataatattactcattattaaattaatgtataaggcgtttcttatagaatttgggcttggagggggtaggatattagaaggtttttagattaattataagaatacaaaagtcaaagt

SEQ ID NO: 195922 - DNA, 484 bp, Cannabis indica
ccatctactcgctttccctattagggatgtaggaatcaatatgcaacacaagttattaaacacattacttaaacgcattattgtgttaaagttatttaaatgtacaaccgggtttgtggtcctattatactgcgcaataagagagttcttaaatccttttataaattacgaattcaatatatcagggtggaaaggttatgcatcgtcatttgagtcgtaccttattagaagcttctcatactctccatcctgacatttcttggattgatcttcctgttgaattatcttttgttgaatggagttattagcaggttgattggtttgttcattttcccgttgagcatttttatttaatctttctcgaagatcttgtgcattcttatttatctgcttgtgtaggccaggacacctttgatttagatagtcttgcagatcaggttggtcacgcatgttttggtgtcgatcttgtctattattgtaatta

SEQ ID NO: 195923 - DNA, 1908 bp, Cannabis indica
gtgtttttctaagtggtgaataaaaaacataatataagtgctcttaaagttaattataacaatacaataatttttcaaacgatttaaaaattacatgactgattatttgatttatttttttttaattctaattctatgtttaatagaaggatatcccaattgaattgctaaataaataatatatttggattacaatagcaatgttatttaataaaagtccaaaacttgacttggtccaaacaaaagaaatactaagatagtaagtgttaaactttggtttcttactttaataaatgcaaagcgcgctttaaactttaataggcaacttttctatcttatactaaagttttcatagtgtacatatcttactaatttcacatacaagtacacaacacaactatttctaccaaaacaaaatctgttctgtatattatctatagaagcaactcaaatcttttacatggaacttttgtacatgtacaaatcttataagcaaaaagacaatatataatatttatatttatatatatatagacttagacattcaacatctttttactacctcagatttcaggcagtttcttgctaagtgcaacaaaaatgttaacatgaaatgagccacaaatactaaggagatgtgcactcgtcgtcggatgagctgttgtgtcgcatattgggtggtaccggcacaggtaagacttgagccagcaatggattcaccggaactgggaatttatgagcagaactaactattgttctttcattgatcatgcctacttccttgcagactctatctaagacagtaagaaaatcccgaaccactgtaaagattctgaaagggtgcgcttcttctttcgcagagtttccatggaaatactcggtgatctccttaacaagcgataaggcaacgctttcttgagcttgaattctgtatatttcctcctcagccattttcatgaatctttccattgattcagaaaactttaggcaagtttcatctgatcctgcagtcccatttagtcgcattacttctcttatgttgctaattcctctagaaagtttggagacatcgctgctaagaacatcagaatccatggtggcggatttcttcacattggctagctcagaactgagactagaaacgacttggaggccaagtttcctgcacttggcatcatcactcgaggtagagctcggtgtctggttagaaccagagtaacgagcaccttcagtccttatgatttcttgtacaacgaaatgcagtagcgttgttttaccatcggctccctttacatcaaccaatttgagaagtgtatcgagcttgaaagcgtgagcctcgccacggttggtcccaacattcattctgtttccagtttttagtacagcttctaagagcttcataaacattctactgtttctcaattcttcacaggcagcctataaaagagagaaaccgaaatgaaggaaactgataaaaggaaaatccaaagcaaaactaacaatgctgaatgtattatacctctaaagtatcaaaagacttcttgaggtaatcaacctcagtgtcaaaattagcaatgtaaagcattgcatcgacccttttaaatgcaaagggtacatcaagcacagccttgagaaatttctcggcgggaccaagcttgactggcgaattatcgttatactccttcagtttacgttcctcttcttttgttggagccatcttcaataaacttatataaatatatatataccttctataagggcttcacacacttcctcaattgtcacattgagtgctctcaatgaaatagcaatattttgtgatttcttaggatcaagaactctattctctgaatttggagaaggaagaacagatcttggagttgattcctttggtcttgaattaggggt

SEQ ID NO: 195924 - DNA, 862 bp, Cannabis indica
accacataaataaattaacttatcttttcagcattgtttagagattgtatttacagacaagaaaactaaagggcattggtgacctgagttattatatcgatattggtattatttaatatcagactcattatttattattaatgtaataattatcataaaaaattatcatctatttgaaagacgtctctataagcattaaaagtatctaataagctaattaattgacatggtgaacaaaatctaaaaaaaaataaaattatttccatggttttccaagttattgagaaatactaataataatcaaataattgtaataattaattggacaatagtgatgggtagttggaaaagtagctagatttccaattaaaaaataaaataaaataaaaaatcttaaaagtataaatgtgatgatagtgatgatagcgtgttaaacttaaaatatatatacaataattaagtagtatttgtattttttattttattaaaaataataaatatattaattatgattaaaaaaaactctgagacgattatgtattggtggttttgaccctgtttctcttgttttggattttgatgaaatccagggctttaaatttcactctccaatccataattagagtttttcacattctttcaaatatagtcttaaaaaaaagtcctaataacagacttttgtgagatcacacagccaaccaaagtaattcaccattagagcaatattctattttcgaccttcataaaacccaaccccactatacttcttgggtaagcaaacattttcccaagaagtaagataaagtttacttctattcccattagcacccccaaaggaaatctacaacatttgtcaatcgca

SEQ ID NO: 195925 - DNA, 1180 bp, Cannabis indica
agtatttttttttttgtttggatcgaaagttcaaagtccactctagtaactcttgaagtgattattgatgatccaattaaggtagattaaagtataaaacctctataattgacacatggtccccaaattatcaaaatgatcgaaagaatggagaaaaaatctgcactacgtgattttctttatagttgagcaaaaagaagagattgattaggttttttataattgttctcttttctctgtacctcttaatctctttctctctcaaactcgaaatttcctctcgaaacttgtcaatccagcgtgtcataaaatgataagttttggtggtacatataggctaaggataaaaatcctaagatcggtggctgcaattgataagttgttaaattagttatgccataacaaacttaataacttcttcgaaacaaaattttcacgtcagcacaagatggggtgcttctcgatgagacatacacttttttggataaaggagcgcagcatatgctgaaggagcttccaaataggaaaagagacaacttgagtcgactattcagaatacccttccaggaggaacaactagccattcaaaattcttcttcgatggaggattaactttcctgaagactacacctggagtggacatgatagtcattcgagaatgtctttccagatggtaactatcattcaacgagactccttctaaagggacaagttagctatttgagagcctacttcctggagacaattaacttttcaatacttgaacagtcttatggagattttttcatttagaggaactataccacattagttaacaattctctatagtttcttattaaagtaaaattatattgaattgcactaataatgatattacattttataagggtgttaagcaccatgtgtttttcaagtttataaggtgtgtgttgttttatattgttattttgttatgtatagtaatattgttatactatacaaagttttatttaaatataatgttcattgttatttaatacaatgcaaatattatacagattactaatcgagttttaatgtttattaattactatattcaaattaaattttacagagttgatgaaaatttaacaggttcaaatgagtatacttttaaagtattcaagtttgagataaaattaatattattttctattacttt

SEQ ID NO: 195926 - DNA, 2189 bp, Cannabis indica
ctgtgggtcgcggtggtcgtggaaaaaggagtattcagtggagaagggtgtgagggggtcggcgttgtaggcggtggtgaggggctgccgttgtaggcagtggtgaggggggttttgatttggtgaagggttcggttgagagagaaccgagagagatagaggaagagagagagttggggtattattatgagaggggtattcttgagtttttgataaagtggtcatatattttcaattttaaaatgatattttatgcatattttttcaaatttccctagtacaatatattatttttatattttctttaaaaagtgaaaaaaaatagtacaatacattaatatcatgtcaactaaaattatcaaatccaactgcccactttgttgctaggcacgctcggtctttatctggtcgtagcattcttgggatttctattccccttgatcttcaaattattttatactcgaaatgcttatttaatgaagttgtaatttcacgtaaaaaaaatatcatgtcaattaaaattataaaattttatacttattaacatattggcacataagaaaaatctatcatatatatagacacaaatagatttagatgaaattatatttgtaatatgacatgttactactacaaaaaggggtattcgcgatagttttaaaaatactttttttaaggaacctttgctaaaaaaattaagcaagtgtttaaaattatagagaaaaataaggtattttcgacggttttaaactgtcgggaagtataagcgacagtttttaaatgtgccttaaaaaatctcttgtatttgtaaaaggaaattgccgacggtttaaaatcgtaggcgtttcccatgcttcaatttcacgcgtttcagatctaaaatttcatttcccacatctctctcctctgcgaccatgagtcgcaccgtccctctcctccactctctctctcgctatatccctctcatccactctctcgtggcaacataaaggtaagcacaacattctcttatttattgtttaaatttctattagtcatgagttggtttgttgatcttgatctgtgtatgttcaaaataaattcgaaacttgcaaatcgaagaaagtttcaaagatcgtcaagtgaaaagcaattcgaaacttacaaaagaaaattttgaggaggatgaagacgagcacaacgacggtggaggaggatgaagcttgtaaaggttttggagcaactgcgcatatgcgagaagtaatttcgaggagaacgaagacgataatttttttgggcaatccactatagcaacggtttataaccgtcaactatattataggccacaggccacagtttaaaactgtcggctatagtatcgactattcgacaattttaaatcgtcaaaaattcttttatactgatatttttctattgtcgcctattttaccaagtctagggtaaaaatatgcgacgattttataaatcgtcgagaatttttttacctcacgctgtaaaaatatcaggaatttcggattttttaataatgtgtactctcaacaaagtttgtacatttaatttactttccttgatttcacacatagatacacacacatataaaacaatggaagcaagatccaaaccaaattaaataattttaaatcctcatgttgctaaaatacaagttgggcaagtgtttacaaacaagagaactctaaaacaagcagtcaacctacacccaataagacacaatcaacctttcaaggtaaaaagacaatcaacacttgactatgaactagtatgtctcgatgataactgtaaatggactttcttagtatcaaaacatggcaagagtgagttgtttataataaaaaaaatagaacatacacatacatgtttattggtccgcatattattagttatgaaaatattataaaaataatttaaaattgtaaaaataaaacaataataaaaaacttattattttttcttttattcttcttttgaaagaaaacccctatcgtattctaaaaaaaaaaccctacaaccgctaccctacagtcgcctgttttcatcccagaaccaccatcttctctgtccctctctctggcgtccttttcacgcgagcttctaccgatgtcttctccatcctcctctcttagcatccctcctctcttagcatccctttatcctcatctctctctctctct

SEQ ID NO: 195927 - DNA, 1342 bp, Cannabis indica
tcttggagcgtcataaggttctcaggtgtaccctgtccaatgctctccttgtccaatcagtgatcagaaaaagatttcatattgaggatttgagctgccctctctgtgggtttgtggaagaatctgtggaacacttatttctttcctgtgatgtggcttatcatttatggcgatcgtctctctggggtatttatcctgtttgtgatactggtattcacatgtgggactgggtcaaattcatttgggacctaaaacataggggtattcttattgaggacattttttggtatgcatcgattgttgttgacaccatctgaaggactcgcaatgacaaggtacacaatagctgtcctgtaaatgtgaagaagtgtattgactctatttgtacttcttttgcagatttacatgcttctttgttcccttgcttgccctgctccgtgcttgacggaggtttggactcctcctccgtaagatcaagctaaattgcaatgttaaagtaggcctaaaaagcatgtgttctgcagttgtggcaaggaatcatcctggtagggtgattcgggttcaaacgtcttggttgaatttttctaatgctttatgtggggaactggcggcctactgtttggctgtgacggtggctatagacctcagatccaagtttgttattgtggagaatgactcgagggtagttatcaatgcttttaatgggaaggagtcccattgggtaattgaaaagtatgtctcattttgtaataagtcttctccttcgtttattaattgtattttttctaaagttagtagaacttgtaactttgttgtccataatattgctaattaaggtctagttgcttttcttaaaaagaaaaaaaaagatatttaacatcaatgacccacgttccctagctactttttttttattctttcattctctgtagttctcttttgaagttttgaggatgaaacccaattttcttaaaagaaagaaatatattattgcaccgaatgattgacaaattattggtatacctcagaatagtcaacaaaaaaaatggtatcgattgagtgtaacacctgtaagaaagctattacaagaaagaatcacacaaaagaaaaaccttattatagtttaggtttaagagacgttttacagtgttgcagaatctatggtaagatatttattagcgttcaaaatgtaaaatctacaccgttaatgagaggaaggaggatcatcgatatagggaaacgcgcccaacacgcgttgactccatagtagtgacatgtctgccacgtcaccaaaatttgtgcaatcccaaaaaatggaaccactctctcattggacgatact

SEQ ID NO: 195928 - DNA, 589 bp, Cannabis indica
gaactgaagaaaattaactatatttttaataatgatagctactactgaaacaaaataatatcaaatatccgataaggttactataattgtgaacctctcataatgaatgtaaggcaaaaccatggcagcttatatgtaaacacaaaagaaaaagaaagccatcctgtgcaaagattggggaacattgaaaaagaaaatagaccttgttagttcgctcgagaacgtcagttttggccttgttgcgccatgaacgagaccagcggaccagctctcccacgccaaccggactgctctgcggcgatcccttgtccgctccgaggaggaatcgggaagtgggtcttggtctccgggaagcgaagtcgaagcaggagttgctgaacaacggagtgagagtggaggggggggggcgagtggatgcggtgaagaagagtagatttctttgtaagtggaagataaggacggtgtgtattggtggaattagaagggaagttggggtttaggaaagatgacgatgagggttccaagattaaggctgccattgttagtacggactacggcgtttgagagagttctgttttgttatttggtt

SEQ ID NO: 195929 - DNA, 1021 bp, Cannabis indica
gtgtatataatgtgtaaaattagaacttgggttggggcctcaaggggtaaccaattttgcccaccgctgtccgaccgactgagccgatcaagcgggtgtggtgtcacttaattattttttttttttgaagaaaattcatttattaaatcattattattttttaattaattaaaataatttttaaatgtgtttaattaattagtaaatagagacattttccactcctaatttttagcattgttcccatgattccacgttctaacgtttccttcagaaacgtatttcttcccgttactaccttctgtgtattgcctatataatgcatcaaaactaatgggagaaatacatctttttcacacagaaaaatatacgattatattaaatatatattttgggcagtagtacgattattgggtgtggtattttaacaattttctattgtgcaatagaattccgatacagtattctcgattgggctatgatgacgagactgatcgtctacttgtgcaattctaggcagtgtcgtgaatgtcttaaagggaacgacctattctgcgactcaacccaattttaattcggtaaatttgtttctttatttttttgtctagcaactatttaaaacagtgatcaaagaaaaatggtgtcagaataacattcatgtctaacttttattcattaaggctacttttctaagttagagaaaaaaagagtaaagaaaatattggaaaaaaatctattgaaaaaaaaaaaaattcaagtttttatgtttggtatgaagaatttattgaattatttttttatctatacaatttttattgaattaattgcatcaatatactaaaatttaaaattaaattgtcaataatattgttggtcaattaattggcatatataccgttacatgcataccgttataaaaaatgtttatttttcttacactgacattgacgcacacacttctcttaatttttttctttttttcttttttcttctggcattttattattttctctctcaatgc

SEQ ID NO: 195930 - DNA, 1143 bp, Cannabis indica
aagagagtcacatggagagtatcttgaagtgacaggggcaaaattgacataatgtttagaaaaagaggtaaaaataatagattttaaaaaagagggtaaaaataaaagatgacaatataaaaaaggtatagagtgtaattttctctcataaattcccgaatgagttttccaatcaagcccaatagaaaagggccactatgatatgtaaggcccaaaatactctttccgttcttaggtccattaccatctttcaaatcatggtccagcccaagcctttcaagagctctcaagcccaaacatttcaagctacaatattttgcaactatgtatgtcatgatttacaaaaaaaactgcaaataatacatacatgtatgtatacacattttaaagggggatgtgacaaatgacaatgttttggattgtttttacatgtcattgaaaaataacaaaacacaaagttctttgctccaaaattacaattcccaaactttggattagtaaaaataataaaaaatctatggtgagtgagtctaatcaaatcaatgtttagtgtaaaaaaaactataattggacaaaattccctaagaaagagagatagataggacccttgatgctcccaataggtgagacaaaccatgatacaaaggtcatgatgcatgtctactaaagagagagcccaatctctatcaattgagattccattgtcaaattcacactctctctcatagggatgacaattacaacctaaagtagctttcttataccatcaaccattcacatgccattggtagaaggtgggggagtggagtcatgtcttttgaaaggaagaaaaataaaagtggtgaaaaaataaataaaaaaaattgagaggaaatttgagaaggaaaggaaggtgggttttggatctttttttctttcttttagttgttccatagtactacaaaatgaaaagtggatttttttgttgatgcattaaccaattcttagtttgggtttgcttgtctatttgtgaaatgaaagctccaagaaggtcccattgattcaacatatatattgtgtgtgtatatatatatttatatatttacactagaataattctagggctcattcatatataattattgattaatattagtttcaatt

SEQ ID NO: 195931 - DNA, 681 bp, Cannabis indica
catcatgatcaggtccacgcttccccggaaaacttaaaaacaaaaacaaaaaaaaaaataagaaagaaaaaacctctgacccaccggccggccggcagttcaacggcaatgatcatctccgataaccccatctctcttgctttttctttttttctctctctcttcagctcaatcattctctgaaactcactcaactgcattaacagtagtagtggaagccttattagccaccaattcataattattcccaccttcatcttcatcatcttcttcttcctcttccatatcttcatcttcctcatcttcatcatcatcctccaatcgcgtattaatctgattattattattattgttctcgggttgcagcggagcaggcggccattgctgctccggctgaaccataagcggaatcgaattctccgctttatttgctgaggccacagcagcagaagcggaggaatcgtagtacttattattcttcattctatagagagcgtccaattggtgaaagtaaggacatgtcttggaatcttctggacgttttttgttgctctctttaactttcttgaagtatttgttaatgttctcccatttttccttgcatctcttgggattgcgattgtacccgagtttcttcattgctgaagatatttcttcccagagcggtcctttgggaccgtt

SEQ ID NO: 195932 - DNA, 758 bp, Cannabis indica
tttttttttctttctgtaaggaaggtttacaaaaatttatgtacagattgttaagaaaatcaaataaaattaattgaaaacccgaccacccacctcaatcctgaccaaaaaaactaaaaaattgaaagcccgtgtaatcgggtcgggtccaactcgaaaataccccacacgggtatcgaattcgtattttaaaactgtgtattttttaatcgggttctaacctgtaaaccgaacaatagtaaataaaaaatgaaaaatatattttttattatactaaaataataatattaatattaaaacttaaaacttaaaattaaaaaataaaaatattttttttcactttcactttcactgtacagtacactattactattcactgtcatctgtattcagtaagtattcgaccaaaaaaccttaagagaattcaagaaactcccagcggcggcgactacttcttcttctccggtcatcccagcggccggttcagtccggcgagcctctgactgccgatgtatgtttctccgttctggactcttaattcttgttaatgttatatgattttataatttatattattggttatttaattaaattttatataataactatagtattatactataaatctgggtaattattaaggtagaagtgtagaatgattgaatttgagaatgagtgagtactcaatatataagaaagaggaaaccacagggatggtttttgattcaggttcacaatgaatgaaacaaaggttcttt

SEQ ID NO: 195933 - DNA, 5431 bp, Cannabis indica
tgctttaattgtggttatttattccatgaaagtaaggaatgttcaagacaaatggaatatgcatatccaccgataggggatgccgtgcctctatccgggacgtggataaaaaccaactcagtggcctgaagctgttttcatgggaatggcaatggcggacctagaagagacagctcttgctctgagaggatggctcgaggcctgcaatccctcacgattcaggaggacggaggagacggaaccaagacggtgggaagagtggctagtatgatcgggggcccacaaaagggaaggacgttgagtgggaggaataacattaaaattcgtactgatggtacagggggtaacgaattggggaaaggtgctcaggagaatgtggtgaagatgacaagtcatagtactaacaatggggaccaccctatggctaacctgggaaagaatcctagagatgaagaggtaatcctatctttgatgcccaatgttgggccttcggcggcccaaatgcttgattcccccccagaaagtgtgtaaatcaaggaccccgcaccaacatcctgaaccaattcctattaagtggaatatagggttgggccttgaggaaaatatggcccatattgtgaaaggaagtggtgacattcctacggctgaaaaaattgtttttagtcagaatgaggaaggaattcaagcccaagctttacctgggccaggccagaagaaacgaaaagcctcagtccatgtgatccccattgacgaaatgggccatcctctcccagacgccttagtgagaaacatggactcagacagaatttttgccccagaaggatcacccgtctttgtgattgggaaaaatgataaagagactctagcaggaggtgggaaactcatgaacaattcttcatctagtaagaagagagggagaccaaggaagagtgctacgagtaaaagctcccagaaaagccatgaaaggggtgtcggggttgagagtaggggactggaggaactatgcgaagcgggggaagtttttgtggacatttccattcaataggattttcagatgggcgaggaggcggcccttatcaagcccccccccatgcccaatgattatcctttcctggaattgccgaggtttggcctggaccaaggcatcccaagctctaaaggcttggacaagtaagtttcatgttgattgtatttttctaatggaaactaaaattgggcgggatcatatggatttagttcgaaagaatttggggtttgattacggggaatttattccatcagaagggttagctggcggtttttgtttcctttggagagctgaggccaatgttaaagttctgagaatacacaattctgcctttgaatgtcgtctgtgggagcctcaatgtcaaaagttctggactttgtttgtggtgtatggacccccttatgacgatgagaaggcttggttctgggaagaattcaccagctatgtttcgaaggaagaagaaccgtgggcggttatgggcgatctaaatgtgaatttgaatagagaagataagatgggagggagacgatttttggagaaggatgggaagatcctccagtctttcctcgattacacagggggagtggatttgggttttaaaggttgtaagtacacttggctgaacaagagatttaacgggggcttaattcgagagcgaattgatagagtcattgttaacactgagtggctctccgggtgtcccaatggtggagttcacaatctgcctattgtggcctcagaccatgggcctctaattctcgatacgaaaatgaaaaagggcagaggatcgcgggttttccacttttacgaggcatggttgcgtgaaagttcctgtaaggaggtgatcatggatacttggaagttgagtgagaagggcggagggagaaattctttggtgacgcagcttaaaggtgtcaaaggtgccctccagaggtggaaaaagaagtcgtttggtgataacgaagccaacctgaagatcttggaaaatagattggcctggattcagtcgcacgatgaatttgaaaatttctatcaagaagaacagatgataaaagagaagatttctgaagaatggacaaggaatgaaatggtgtggaaatagaggtccagagaactatggttgaagcatggtgatcggaacaataaattctttcatgcctccaccatggtgcgacgcaaacgaaaccatatttgggcgctctatgacaatgggaacaagagaagagagagggacagagagaagggtgacattcttaatgaattttttgggaatctttttaagtcttcaaatccgtgtcttcccgaggatcttgaggatctgatctccccttcggtctctgtggaggaaaacattatgatgtgcggtatcccttcaagtgaagaaatctatgatcatgtatctcaaatgcatcctctaaaagctcctgggctggatgggatgtcaggtattttctttcgaaattgttgggatacggttggaactgaggtgattgaatgtgttcaagagttttttcgttcggccactttggaccatcacttaaatttcaactatatctgcttgatacccaaggtttcgaacgcggagagggtggaattgtttagaccgattagtctttgcaattttgtttacaaactcatttctcggatcctatctcaaaggttaaaagggattatggatagagttatctcgccattccaagcacccttcatcccgggccgttggatagcggatgcaactctgttgggtcaagaagtggtgaattcggtgaggaagaagaagagcagtggaggtcttatggctatcaaaatggacatgcataaagcttatgaccggattgaatggaacttcttgagaaaagtcctgggagctcacggtttctctattgagactattgatcgaatcatgacctgtgtcactactgcctcctatgcggtcttgctcaatggaaaacctctcaagaagtgtagaccctcgcggggtctgcggcaaggtgacccgatatccccattcttattcctgttttgtcatgatgttctatctagattgttgcagaaagcggaattggcttgaattattaagggcatttccattgccagaggagcgactctgatttcacatctcatgtttgccgacgacactatggtgtgtgtgagggcaagcaagaaagcggttgtttgtatcaaagattgctgacataagtatgagcgttggtcgggccagctttgtagcacacagaagtcgggcatcttattttcgaaaaggtgttctagtggcagaaaaaaggaaattgaagagattcttcaaatgaaaagttcggaggcaggaggtttttatttgggaaacccgatggttctgtctaagaatcgttctagtgactttggttatattgtggaaaagttaaggaaccgtcttgaagggtggagactaaagactttgtcttatgctgggagaatgaccgcgatcaaggcagtcgctttggcaatgcctgtgtattctatgtcaactttcactatccctctaaatgtttgtaggaagatggatgctcttgtaaggagattttggtagactaagggtttgacaaagacacactttctagcctccagaagctgggactccctgtgccagccaaaagctaggggagggctgggttttcaaaaatttgaagacattaatcaagccttagttactaaactagcttgggaaatggcttcaaatgatgagaagctgtgggttaagattttttaggagaaattttgttttcggaattctttctgggcggtggaaaaaacggtgggtgatccaagtacagggaagtctattctagatgcaaggaagactatctacgaaggggcgtgcactattattgccaatgggagagacattgatatatggcgacaaccttggatcccgtggatgggctatgaggaattccgactgactatggaggaagtaaggatgaaaactccaaatctgagaaatgtctctaatctgattctgagcggtcaaggaaaatggaacaggggatatgtgaacttcctttttgggcaaacggtgggtagccaaattaatgttattgatattgttgaagggcttggtaaagatagggtggtttggaagagatccccaagggaaatttctatgttaaggaggcttactggttgaagaatgagtataagttcggagattctcatgacttgtggaatttgatatggtccaaggagctgcacccgagagctagcctgtttctatggaggatgtgcagtggggctttgcctaccagagataagttaggaattgagaaccatttggattgcttgctttgtgatgggaaggtcgaaaatcctcttcatgtcttttttgagtgcaatttggctaaaactctgtggttcagagcccccttaccagtcagaatagagctgatcgagggagaggatgtaaagacaaggatcttgaacctgtgtttcaatctcagtaaggatgatttagtgaaaatcttgttatgtggctatgttgtctgggatacattatggcactgtagaaactcctccttgcatgggggaagaaaccgtgacatccctggacttctgaaggatatccacagtcagtttgcagagctggctgctggtttgtgtggcctgtcgactcctcctcggatggtgcatcaggtctcttttggggcccccttcaattcaaaggttataattactgatggttccttcaaagaaggtcgatgtggtatggctgcaattgccttggatatgaatacccgggagtggcatgagatctgtagcagtggtgaaggggcttcagctttggatgctgagattaaggcaatggctttaactatgcaatgggcgatcaacatgaactagtcttctgtaactcttttctcggattgtttggtggcagttaacgctttgaaggtgaaaaccttaccggattggaagctagcggttgttttctttaaagtaattgaacttgcaaaatcttttaatgtttgttcctttttacatgttaaatgtgattgtattactggtgtgaatgatctagctgtccaagctagagtgctgagagttgtgaactcgttcagcgtaggggatggattgccccctgtcaatcctaatttctttctttaaatgaatgaactaaggttctctttcaaaaaaaaaaaaaggattttagtaaatttagtttattttatatatttgtagatgttaagaaatatgagttcttagtaaaatttgttattattatcattattattattatttgtaaaaatcctatatggattaagaactacataattactatatctctaaactataaataaagtattcttacactaacctctgttggaaaatatatggtcagaaaatgtgtggcatcatcctattatttattat

SEQ ID NO: 195934 - DNA, 981 bp, Cannabis indica
tgtttatgacagtgagacgctcctaattttctttcttcctcaagttgtgaacttcctcttatcacttcctcaggttttttatccccgtctctctatctttctcgccccctcaaccaccctatcttgttctacctctctcggtttaatcagaattctctgtatgtaagcattttaattttgctgctataaacatcttttgtcagcttgccggctacattccatgcccacgacaccgcttgcctcggtaattttcagtcaagactatgtttggaaccatatcattatgcaatgtctttttttaaaatccttcatttccttttttacttttcaggtatgatcctgtaaccgataaactaactggtacaaaagacggaacactggttaacttctttcttagagtgttcggaagcatgtcagagaagtcactctgcatctatcttcttgttctccaggtgtgttactttctcctataaccatataacccgaaatactaattgggttcatttgaggccaagttttttcgatgagttatgtgttctttatttcattcaaacaggcgctcgcttgctgcttttgcttcttcctgagatacattctcgcgggttggtacaaataagagagctgagaacaaagccgaaagcgattttatatatcttcgatttaggaaaacagaacaaaagaagcttaacaagccaagatcatttgcttattgggttggtgttttcttctttacacaatttcctggttcagaaagtggagcttaatgccaggaaaatagaaatgatgattttttttttcagaggtggagattatttaaaaatttcagaagaaatatgatacattgagattttattttgactatttaagttgagaaaagttgatgatcatttaaccattttggaatctaggataggatatgtcaaaacttgaaatcaaaatcaaatctaccatgtactgataagtacctgctacctgctgtag

SEQ ID NO: 195935 - DNA, 2056 bp, Cannabis indica
ataaaatttaaaaaaccgtaaaattattaaaaattctgcacagactgtatttttatatttttttattatttattttttatatttttaatgtaaattactaccctaaaacaaatgaatgtataaattcaaaatgattataatatttattatatgtagaaatagtcatccagcactagaaggtcctaatgaatgctagtctttctttttttttttttcctcttttctttcttgaatatataggtatattagatattggttaattaagatttttgcctcttaaattttaatatgtactaaattatgccccttgaatttttctgttcgttaaaaattctctttgaactattaagattgttgaatttaaatatttttgtccaatttcattcaattttactaattcggcaattatttatgtactaaattatgctctccaaactgacatctaccaaattatacctatcgaactttgacatgtatcaaattatgctccctgaatttatccatattagactttttttactaaaattagataaaagtccttaaattcaacaatttcaatagttcatgaaaaaaatttaacgaccttaaaagttaaaggacatgaattggtacatgtcgaaatttggaggataaaaatcttaattagccttaataaaaggtttattacgtactcataaatatatattattagtataattaaatagtacgtctcttatggtatctaatagtaatacctgtagattttaagatataaaaaaaattaagtcaatgaagtcattcaactccatcatagaaaaatgactattttataaagtaaagaagcatacttgattgaactgatataggtttggattccattgtcataaacctatctattctctatgtttatttttattttttttcatagttggaccaattatcttttctcctaatattggcatatcctttcaccacttaaaatgaccacttttcaccttgaaataacatcaccttccattactctccttttgggtttctttattgggtgaaaaaggcaatagagttcaatgtatagctacttagtacagctatgaaatttgctttattatacttgaaaatattctaaaaataaataatagaagcaaaaaaatgaaaagggattgcattattttattttattttccttctcattataaaataataatgtatccattataacttattatataagcactactactaaaacaaagcatatgcatcttcaaaacacaggtggattggttggatattttaaaaaaactattaagattatattttttgcattttatagttgcatggcatggcatgtttaagtaaaacataaagagaaagccaaaactaaaccccaaaccctaccatttgattttttttcttctgtattatcatctcttattacaatttttttaattatatatgaggcaacttgtgatatgccctttgctttttttgagttggatgatctatcaaatgttccaattccttcttatccaataccccaattgagtcaaaagaaaaagaggtttttgcttaggtaggtattattaatattatgctccaaaaattgacttgacttctcttcaaagtattactcaaataaaaattaaaacttaaaaattctacagctatagcagactagttttataagcatattcgaaccttaatcaatggaaatgttctcggccaatttgtccaattgatgtctttttttttataatgattctttgtccattttctcttttgtcttatttccttttcatacaggcttcaattagagaaattattataaagtataaaaacaatgtgaccctcttgataaatacataacagaagtattatggagctgtcttcttataattttaattaccatttattgcaaaatttgtttctagaataaataaataaataactaaactgacaacatcaaaaacagaagagaaaattcaatatctttgtgtggaccacttaaaagatctttacaatcttataggagagaaatttgtggtcttcagtaaacagtttttttagtccttaaaaatgg

SEQ ID NO: 195936 - DNA, 973 bp, Cannabis indica
  modified_base (698)..(698): a, c, t, g, unknown or other
ttagtaaaaaataagaaatttctcatcggctgattttaaaacttgttgcccaagtctagctttttagcgctggccccagtactaatttaagttttttgttatattccaagtagtttactttaattcaatcatttttcttcttcagttatgttccccacttatcaatttccattataatcatttcaagaagacgattaaaaatattttggaaagcttgaaagggcatatattttgggatgagagggtcccatggcttgtcctttctcttcagatacagattcgaatcaaagaagtgaatgtattaaattcttggcaacaaacaagtgggagaagaaatttgaataaaaattatgaattttgaaacttttacttggcccacatttcaggccgacccgtatcattaatttatatgagtactgaattttgttcacttttgcaatcaattcactataataactgaatatcacaattttctttaagtcacttttatcaatctattttagattcagttatgctccccacataatagttctacattgatatattttccccaaagttagaaaatctattaattggtaactgccgatttcaactgcttcttccagccattttttttgaggattttttttccagccatttttgtaaggccaaaataaacttattaattaaaacgtgagttagcagcgaaatttttttangtttttacacttcaacttttttattattttttttggcgaaaacttcgttatattacttttctttataaatttaaatacttgttaagtatcactattaaattaccaactcgaggaccatatttcagttggtattgaagataatatctcatatcaaaaacaaaaaaaaaaaaacatctaatgtgcttcaaatttataaaaaaaaaataaaataaataataagaagaatttagtctaaaaaaaattaaaaatagtatagaatacaataatatttcacg

SEQ ID NO: 195937 - DNA, 1131 bp, Cannabis indica
ttgaaggcatagtatttgttgatcaagtatttttattgcacaagtatttgttgcttttgtggttttttctttcatgattagaacagcatctttcattttttactttctctctctctctgctttttgttacctttcacgggaatgctatttatgcatttgatgccaatcttgagggatttgggtaggtatggactgtttggccacaaaatttgtagctgtatgactgtctattttcgaaatgggatattctatttaatgcattctttcattttgtagtatttctgatgactattataatggctatcaagtcgtagattgttgtttcaaatactgattgtatattctttatcctgcagaattgtggattaatggcatcaagtctcttcctgtttcaagtccagaacccaatgctgcaattgagtcctatcacttgaggttgaaattgaagcttttcgatgagctgcatgctaattcttgggcacgagttgattggttaattcacaaactttcaacagaacttcattccttatattggttggatcaatatagtatagaaactgggtgttttgaaaatttgagggacaaatctttttcaatgaatgcatggtgccaagctttgaacatcccagatgtcgatgtcgtactagatgagcacaatctccagcttgcaaaagtcatctctcaaacagacagaaacctggcatactcgatttggaaccctggctctgaattttcactatgtaattgcccctggtcaaggctgggaaatctgtgtaagcatgtcatcaaagtggcaaatttatgtaaaagtcggcaggttgcaaggccactactggctgctcaagtttataggcagacaatgcttacccttctgcagaataccccggatgatcctctagttcttgatcatgccattttacatgcaacccgattgcagcatgacatcaaaagcttagaggaattgtctaataatgggttgctcaacctttcgactgatatagttctcatgctgcagagaacatactttctcccttatctttattaaaatggactctgaaaggaaatgctcacgtgcctttggtgtttcgctaagtctgcgtaggtgagtctttggtctgctgcacatagtca

SEQ ID NO: 195938 - DNA, 1332 bp, Cannabis indica
tattacaaatgaaactcaaaaccattcctcaaaaaataacaataattgtatgagttatcatccattatcattaataataattaaacaaaggactttagtattatttttattgttataactatatattttattcttccaaaataagaatatgaaaagaataacaactaaagaaagaacctaatgactattgagtgtatgcatattaaggtaagcatttagttatatatttattggtttcatattaaactaagaaaacgttttatattgaatggttacaaaaatatatatcaatgccaataattgttttttatacgagtagtgtacatttttattaaaataagaaatcaactattaatttatcatgtgttatatttgtttatatgttaactaaaagagatgagagctgatttgacaaagcaaaacacaaatatttttgagtttccttctcaagtggctctagatttgtaaagatatacagtatatatacatatataatcataagagaccacacattatgttagtaataataatgatcaatttttttttcttttttaaaaaattcttcttatatttcttcttatgcatttgattactttggtgtgttgtgtgaggagaatgaagaaagccaggagacaataagtttgttcacgacatagtaaagtaatgatatatgaccccatttagcacattattcttgggtgacattcttattttatgccattagtataattttagttttaatttatgtatatatctgtgatctatataaatttagatgaagtggcattctctcctcttaatcttcaataatctttttgttggagctggtggggatgacactttaatatttcttcattctaatttatctatttactttgttttttaatttttcaattctaatttctccattttaacatttcttcacaatttcatgcacaaccaaaaaaaggtattgaggtttaccctcctcaatatattaaagaaaaatttatgtattttctctttgatactattttggaggtacgctaaaatctctaaatatatatatatatatatatattatttttttttcttagattctgaaaatatctatattgttgtacttatatatattcaatgttatatatacatcattaaatgaaagtttgttaattaattgttaatttctatattatcaaaaaaaaaacaattgtttcattctcatagagctagagcttatttctatagaataaggtgtaacttctaacaaattatcttcaaatattcaagttagaatcttcctaactcaatcacatttttttctctatgaaagcgtacaagtgagtggtagtc

SEQ ID NO: 195939 - DNA, 1297 bp, Cannabis indica
attggtaggaggtgcaatgtgcctaagtgctctattggtaggaggcgcaatgtgccaaggtactccattggtaggaggtgcattgtgccaaagtgctccattggtgggaggtgcaatgtgccaaattgctctattagtaggaggtacaatgtgccaaagagctccattggtaggaggtacaatgtgccaaagtgctccattggtaggaggtgcaatgtgctgctcgaatggtaggaggtggaatgtgccaaagtgctcctttggttagacttccatatctagaacaaacattcatgcataattatcttagattttttgagggaacattttctccccaagtttatcataattttataatattatgatggacttgtaggaaaaataattcttgcacttttggactccatacccgcaaatattggtaccaccgaaaataaatatgtagaagaccaccaatatttccaagcatcttggaaacaatttgtgactatttaagatttaggaaataaaaccaaaataaaagtaaaacaaatcctttaatacatatgttatataaatatatatatatatatatacgttcgttctttatttttgaaaactaatcatgctaattaggtcttttttgaccaaacatatcttttgcttttatttaaggagctaatagagccatttggctcctttgtgccattcggcttcccttagtgtcattcagctcctttggtgaggagtagaagcattcaactcctttgttggagctaatcggctcccttgttttttctgtctatcaaagaggtcctttgaggagtttgagcacacacatttttatataacaagaacaccaataaaattattgtttctaatttttcaaagtgaaactttgatatatccaaaatatctactaaaaaataaaatatttctcttaataatattcaattagcttaattaatataaattagatttgctcctatttaatttaataaaattaaaaattttcaatttgatttaatcaaatttagtttgtagctagtttttttgcaattaaattagtttttatccaatttattttaattaactagcctaaatactatatgaagtgaatttaatttattatttagtatttattatttatttttgggttacctcattccatgccagtatgctcactttccccacttgtgtttgtagatttatgctcgtgaccactgaggatgtgacaactgcattgacgacgatcctctagctctcgtttggccttggtgttagcttcgagtaacatatttggtcgtgcgggtcaaaa

SEQ ID NO: 195940 - DNA, 854 bp, Cannabis indica
atttctgaccaagcaatactaactgcatcttgaataggttcctaggttacgatttcattttatgctcctagtttaacttttgtgctcacaatctagctaagacggggtcacaatgcaatattatctacagccattcctttgcattatattccctctacagtcttttctactcagttctgtgttgtctttagtttcctagagtactttttcaatacgacaatttctacctaaatagacctactacaatgtttttctttttttgcagactgtaccctagcatggtttcaagttcgaatcgtccctcccccattgtcaaacaaaaaaaaaaaaaccgattccccatctagcatacacaaagaagttctttctagcataagcaagctcccattctaggaaaaagaaaataccacggttggtgagctgatcaccataaaagtcagaggccccggtatgacaaaacatcaaataagtttaaaacataaaacacagggaaaatcccttttattaaaatcaattatgtaaacttgtacgcatcaaagaattgatgatgcaataatactgcttgttcatatgcagtaacatatatttttattttaaaaatatctttacataatctttattcttcagaaaccttgaagaaggtataagacaaaatcaagttattaataccatccattctgggatctgtttcgaactccggatcaatgtaaaagaacacctgaaagagaaaaatatgcttgataaactgattctatttctgagaaaaacagtgtagtgcaaagataatgacttacaggcatgtcaatctgctctccaggaagaaggcgctgctcctcaaagcaaaagcattgtat

SEQ ID NO: 195941 - DNA, 1836 bp, Cannabis indica
atttaattattatttttatatattttaattgtatgatttattatttattttaaataatatttaattagtttctattttattatatacaatgatagtatataattttgttgctataatatataatattttaattgttgtatataatttagttagtataatatctattagcaatatattattatcattactattattgttagtatatttattttggtgaatggtatatgtatttttgttatacgatatattattttattaaacaatatttaagttctatttctattgtattttgttgaagtgatatataattttattaacatgttatatatatatatatatattttttttttttttatgaatcaagaaattttattgcaaattatctatgaattgtacaaactataagcaccataacaaattagttatggcctaactcttttctatacaagatttacaaagacttaaaccattcctcatctttttgactaattttcctaggccacactaattcaatcctctacttcacattcttcttaattctattgactaaccgagccatgttttgctattttccttgccatattacatcattaattcctggttttccagagattatatacgaggctagcaagactagtagccattacatttttcttgaatttgcttgctttgactctttgtatccacccaattattcgaggcaatgttgtatcagtggctctccattgcatccatgctataattttagtaaaacataccatagacctgctacagccaaaaaacaaatgattatttgtttcctcatgattgctgcacagtacacattgagggtctctgacaatgccatatctatataatctttccttagttctcaatctttcatgcacaacaatccactgaataaagctatgcttaggagtattgaaccttccccatacctgctcacaccacctttttttgcttgagcagagcaaaggagattgtaacctgtagaaatttggtatctctctgccaaaaattgatgagtatcaatgaaagagcaaacctgaggtttttcagagctactcatttcctctagtaccagctcccatggcatgggatagggaagctccaccagttctcctctctgatgtagacactatgattccacttgacccacatgttttcttctttttttgtaattgcccacaaatatttaatcatttaggtttcttccattctttgactctgttgaatccaattccccctgctatttttatttggcatacaatgtcccaagcaatggcacctacatcttggaataagtgttggccctgaaaattgctttaatgtctttaattactctcttgggaagaagcataacttgactccaatagacttgaatagttaataaaacaaagttgatcaaaataactctgccagctaattataaaggcctagtactctaagttctaatccttgcagtaatcttttcttctaatatttcacactctttactcgagatcctctttgcacagattggcacctctaagtatgtaaatggaagctcctgctgagtgaagcaggtgctgctagaactcaagataaatcttgctttggcatgttactgcaatatattgcagacttagaagcattaggaaaaaaccctgaagtgtgagaaaatagcttcaggccttgaagtaggtatatcacactcttgtaatcaccattacaaaacaataacacatcatcagtaaagctgagatggtttagttgcagctgttcacacctgccatggtaaaagaaatcatatttcctacccaccttcttcataattcttgtcaagtactctattcc

SEQ ID NO: 195942 - DNA, 839 bp, Cannabis indica
tttttttccctcaatcaaatgtcatttatgaactgatttggtatatgataatgtttttttatttagtgactacccattatgtcatttgtcctagttttatactctagaacttcttgcttgtgatgttcggttttaatgccactaggattataaattgcttttatacatgtttatgcctatctatatatgatcccctatttagggaaatgatgtactaaattgccttcttttcacttattttattggcaaatgataacatgttatgaagttgagaagatttaacatgtgttaatgggtttaaatttaatttctctatctctgctatttgtgggatttgattttttgtttgtcattagcaagttaataggcttgactatatcgtttgactattttctgataagttgaattaattagtaagaattttttttccgttcaactgtgatcctctaattgtctatgatattgagttcttgtggagatgttggcagttaatactattttgtctctgaaatgaatctattactatttttcttagtccatcatgacaatgtaagaaaccttacaaataatgtttggtttagaatgcattgttgatatttattgacctctaaaaagaaacaattggtgtttccacgaatagctaaccaaggcattgtaaaacttggataaggctgtccattttcatttgggcctcttgataaggtcttctaaatttacaaagttattaatgggattttttctaggctctcattgtgatcttgaattttagcacaaacacagaactttaaatgggtagttgagtttttgtataacaactagagtgtgcatttttttttttt

SEQ ID NO: 195943 - DNA, 1962 bp, Cannabis indica
tattaagcaaataaagtttttgaaaccttagaatccttccattctcttgaagctctggaacactctattagagcatgggtaacagattcagaaacctagagcaacaagaacacacagggctttgaacaatttttttatggtaaaagatttaaggctgtaggaagactatggtgaaaggttctccaaagaaagtgttttattttttgttggcagttttaaattccaaaggggtttccaccatttgacaagagtgatattactagaagatgttggcaaagaataaatagaattggccaaatgataagccgaactcacagtgagaaaaccagaagggtgatgctcccaaatgagagtgtcctccatagaaatatcactaataggaacagataaaatggcatgcatcacctcctcatcaaaataggtagataatctctccttattccagcagccatcagtgttgataaaaaaggaaataatagggtcagggggggcaacattattttgaaagatatgaaccgccaaccagggatccaataagaattaatggtggagatggactggccatctccaaccttccacaaaagacctcttttaagaagatcccgaccccaaagtaagctacgccaagtgaaagaagggcaatgacccttagtagcctctaggaaagagttttgcttaaaatacttggcttttaagaggcgagcaagaagagaatttggcatggaaaacactcgccaagcttgctttgaaagtaaagcctggttatggtgcacaaaagaacgaaaacccaaacccccagaaaatttagattgacaaagcttctcccaagatttccagtgaacttttcccttattcccagaagagctccaccaaaacttagccataagactctcaatctttttacatatagaaatgggaattctgaagcaagacatagcataagagggtatggcttgaacaacaactttaagaagcacttctttgccaaccttagagaagaaatggttagtccgagaattcatgttagagctaatcttctgaagaaggaaattaaaatgatcagtttttgatctaccaaaacactgaggaatacctaagtacttgttgatgaaaggcttattatcaagactaggagttgtgcgaaaagaaatccgaattcagaagcaatagtgttggagaaaaaaagaagcacaagacttagagaaattgacaacttgccttgtgatacagatcaagagcatttttaatggccaggcatgaacgggtcgtagtagtggagaaaaggaggctatcatcagcaaaaagaaggtgcgaaatgacaggagctgagcgacagatagaaataccttggaaaagcttatgatgttcctgtagcctaatgacagcagataaagcttcagaaacaagcagaaaaagatagggagataatggatctccctacctaaggcctctagaggaagaaaatttattagtgagggagccattaataagaagttgaaaagaaacagaagaaatgcagttaagaataagattaatgaatctatcaggaaaatggaggtgctgcataatagccttcacgaaaccccattcaacgcgatcaaaagccttctccatatctaacttaagagcaacccagccagacttacctgatttcctatgattaatagcattaacaatctcattagcaataaaaacattataaaaaataaccctattctgaatgaaagcactttggttttgagagataatgccattcagaacatcttttagcctattagctaagactttagagacaatcttataaacagtagaacaaagacttattggcctaaaatctcttattttagtagcattctttttcttaggaataacaacaataaccgtatcattaatagtagaaatatcagcattataattgagaatagaaagaaccgcaacacacaggtccgaaccacgagtaga

SEQ ID NO: 195944 - DNA, 1060 bp, Cannabis indica
attcttttttcgttttgttgttttcgtttttttttttttttctaatttttttgtctttttttttttaatattctctcatatgttatagtaaatatatatagtgtagaaaattatacaagcacacatatgatattatattttttgtgttattattcttctattttttcattaattttttgttattattttattttcttctaaaatttgcttaatagtagataatagtagaaaaaattacatgagcttatattagacatgacgactaatgaccttagttttaataagtgaacctataccacactatgtccttatttaaatataattgatgaaagtaagtgttaacggtgattttcgttaaccaataaatgagccttgattttataaattaattttagaataataaataataatagtataataaatacaaacaaaaagatttttacgtagttttgaagttaattgttcatagtccacgagtcaatcttattatcaggatttgatgagtttttacaaaatacgatgtttggtttttttctctatgattctcaatttggtcgtaactaattctaggaagtcttcccctatttatagatgtatgggatagatgattatttccctatgatcctatcctcaaaactgctcatgaaacgtggacaattcttaggtttcatatttacaacacattagataaatagataaatgccataatcgcccttgtctttatctaaaaacagttgtgctgacttagcttatacgcctcgcaatattgataaatcaccttttgatgtttattttgaagacaatttctgtgctgaggtattatttctaaagtgctcctcgtattcttttgtaatgttagagctgactgaatatatttacgtgagacactatcaacctgtgtcgtctgttagtgaatcactttttgtgtacatcccttagtctttcaacatactcacgagtatgtgggtcaataagttacaagctcttaaagaacatattatctatcatttccagctaactgttgttttattatttactttgtgtatcctgagatggactt

SEQ ID NO: 195945 - DNA, 1263 bp, Cannabis indica
caaacaatctgagaaaaaaaatatatttgatttctactatataaaaatatcatatggagagagaaaaaaacattatagaaaaataatcagtagcatgaatttaaaaataacaataaatcaagttaaaaaaataatacagatctcatttctatgtattccataaaaaaataatttctatataacaaatgcataaaagtaacaaaaaattactcaaaaatattataaaacaaaaaacaaaaactacaaatatcacaacgaaattacagttgcaaaaaattaaaactaaatcacactagaaattttgctcacaaattaaaactaaatcacactaaaaattttgctaacaaataatttataacagattatcatagcatatacatcactcataatatacactatctgattattcatcactcaaacacaaagaaacatcaatgatagaaaaaaaaatcattatcatgcacatattataatcataaaaaatatcattatctctaaatattaataactgtaaaggaaaataatggagtaaagattacattaccttcagcaaatacaacggcgtgtacgactatgcggagcaataatccttgtttcattttcctctgccattaataagaataagaaaaaatatcagtaatggaacctctgagttttgcaagcaaagaaaaaatcaaagaataagaaataaaataggtaatctgaagagcttacctagccattcaaccgtgtgtgccgtcgccgattgtgtgtcatcgtcaaccatatttggcagaactggaagagatcagtcgatctctcgaccatggctcaagctcaaacctcaaacgagagagaaagggaaggatcactcggacgttgctgagacctcagacgaaagagatgaggaaggatcgagatcaaatgagaaagagagggaacaatcgtgtttgtggcttagacaagaaagaagggtgaggaccgaaggaggcggatgagaatatgagattgagatgtgtgtgtgagagactttagggttgcttagggattttgtttgatttcctttgtataaaatattatatatatatgataagctatagtacacgggttgggttgggttcattgggccaaaaaaagcccaacccatttccgacccatatcatgcggcctggttatttttcaacccaatatcatttcggcccagaaataaataggttgatcggcccattttcgggttgggttggccgggttgatcggcccatcgggttaaatgctcagccctat

SEQ ID NO: 195946 - DNA, 855 bp, Cannabis indica
tttttagaaaaaaaagggaaaatatattttttttagtgcaatcttactccctgaaaatattacaacttaggataaatttaatatgtcatttattaaaataacacagaagatataaattttcttaataaataataacgtgccattaataaactttaaaattatattaaaatattaattttttttttaaaaaaaatttctaaattaacaattatttgtttacttctttcaaaaaaaatattattattccttttaaaaaataaataattatttttcaaataaaatatcacaacattttttacgcagacagattttttgtttagtttttctttttttttttcttttttacgctagggttttatgttttctaataatgattttctaaaactatttaaacgaaagaagaaaaaaaacgtgttttctcaaatcctatttgacttagtattaatatctactaataatcctactcaacttagtataatctctacagctactacctataaattaaagcaaatgaaaagtgataattaacattttcattaattgatgcttagttattaattagaaagaaacaaaacaaaagacaatcatgaaaaacaaaactaaagtagaaaagaaaccactatgtttgaagtttgttcttaagaaaaaacctctaaagatgcgttgtgcttcattttacatacccaaacaaagcaaactcaaactcaaacccttaggagaagatgctcatttcgtgtcttgtgatgaacaaactattggagttgcagatggcgttagtggatgggacaaaagtgggatagactcgggcatatatgctcgatctctaatctttaactatgccaatgctatcaacga

SEQ ID NO: 195947 - DNA, 4054 bp, Cannabis indica
tgtttggaggttttgatctttttactttgtattgttcttgggtattagggacattctgttcagagttagttacaaagtcgttattggtagttacagagtagttggattgctgttagtatgttactctagtttatttcctttcctctctctgctactattgtctatataaatatgaccctcttgtatattctgaacacttgaacaaaataatcaagacaattgttttctttctctctctttctagtcttttagattctctttctctttactctttcttcttcctctttctttgtttctccattgtggtttctttggtgttacaactatgaatagaaggattaacaatcctaatatggtaccagagcttgaattcccccctaagtgctaaaatgccccttctcctcaagctaatctgatgcacactttgagtcacaatgacactaattggtaccccaattttggggccaccaatcattgtacccccgatgctcaaaatctggcttcaatttccacttatgaagggtctgaacatctgtttgttagtgaaggtacaggtttgtctatcaagcacattggtcattattttctctctaattcatttattacttctcctctcatattgagcaatttacttcatgttcctacactaaccaaaaatttgtttagtgtgtctaaattcactatgaataactatgtgttcttcaaatttcatcatgatgtttgtcttgtcaaagatcgggttcatcacaaggtgctgcttactgggacataccagaatggcctgtattcctttcattcttcacaactaacttgatgaactcttccatttcatcaactgattccaacaggtactttcttttacagcatatgccaccacaaactctcactactactgcctcaatttcctcttcaaatactgattctacaccttttcacactacacatcatatgtttgattttgatatttggcacaacaggctctgtcatccttctaagaaggttgtaaagtctatgctccatgcttgtaatgttgaaaatgcaaataaaaattccaattctctgtgttcagcttgttgtttaggcaaaatccataaatttccattcccaaaaacctctcaaacaacatacacagtgccactagaattggttatggaaccctcttatatcccctctataaatggctataaatattacattcacttttgttgatgcatactctaggtttacatggatttacatgcctaaaaccaaagatgaggactaaaacattccaacattttaaagctcaatttgaattgcaacttggcacaaagtaaaggtttttcaaatagattggggtgggagtataggtcatttacgaatacactaaaagaagcaggaataatccgtagacatccatgtcccactacacatgaacaaaatagattagatgaacgtaaacacagacatatagttgaaaatggtcttacgttgcttgcccaagcttccatgcctttaaggctttgggatgaagcttttaggacagctgtgtacatccataataagctgcctacacctgtccttaaacataaatcacctattgaaactctttttaatatctcaccagattacactagtttcaaaacctttggctgctcttgttatcctaatataagaccttacaataagcataagcttcagtttagatcctctccttttacttttcttggatatagtctaaatcataaagggtacaaatgcatggatcagtctagtagagtctatatttctagagatgttatatttgatgagtacacattccctcatgctttacaaaaccatcctcccatcactgtttatgtcatgtcttctttctatccatcagcttatacctactattcaagcacaaaggcatcatcactcatctattcctaactctcatactacttgtagctcatctttacatgtgcaagaacctactattgtgcttgatacacctacagtgcaatctactgcaacaacatttatttcttttatgcagaaaattattcctgctgtcactatacataacagtgctgttccacctgctgctgctatgagcaacactactgtgagtaaaattcctactgaaccaactatcactgaggtgtccaattgtaacattcctgctactgttcccatcaactctcacaagatgcagactcatgccaagtctggcatccgaaagctgaaagcctatcttgtttttcaagaacctattagtgtcaagcaagctctctaaagtgaacattagaaccgtgccatgtctaatgaaatggtggcattaaagaaaataaaacatggacatgtgttgttctaccagaaggaagagaggaaattggttgtatatgggtttataggaagaaagagaatcttgatggaagtacctccaaatttaaagctcagcttgttgctaaggggttccatcaacaacccagtttttgcttcactgaaacttttagtccagtagtcaaattgattactattagagttgtcatctctctagctatatcaaggggctggcatataaaataaatagatgttaacaatgcatttctcaatggtgatttgcatgaggaactttatatgcaataaccccctgagtttgttcttccctctgcccctcattaggtgtgcaaactacacaaagccttatatggcctcaaaaaagcccctcgggcttggtttgacaaactaaacactagtcttcttgctcttggattctcctcatctaaatcgaacaggtctctattcattttccacacatctacatctactactcttatattagtatatgttgatgacattattatcactggaagtgactctaacctcatcgccaatattgtcaactcattaaattctcaattttccctgaaggatcttggggacttgagctattttctaggcattgaagttaaaaccactccacaagggctgcatttatcccaatccaagtacattagagaccttctcatcaaatcccaaatggaggattccaaaccacttccaacccccatggtgagtagtttaaagctatcagctcatggccatgaaccgtttgacacccctaactatataggtcgattgtgggtgtcctacaatatctgttaatcactcggccagagcttgcctacagtgttaataaagtttgtcagttcatgaaaaccccattacaaccgcactagaaagcagtcaaatggatccttcgttatctcaatggaacaatagaatatggcctaaacatacacaagtcctcctcaattgatcttgttggattttgtgacaccgattgggcctctgacattgatgacagccgctccacttatggtttttccatttttctaggaggaaatctgatcacttggcaatgtaaaaagcaacaaactacaagtcgatcaagtaccgaagctgaatatcgtagcttagccaatactgtatcgaaactcacttggttgcactccctctttactgaggtttagatacctcaatctcagcctccaattgtttggtgtgacaacttgagtactgtgcttcttgttgccaatccagttttatatggccgcaccaaacatattgaacttgatctttactttgttcgagaaaaagtcctctgtaaacaagttcaaattaagcatgccccttacaatagaacaactttcagatggccttaccaagtctattcctagccatagctttccatgttttcgtaccaaactcataattgcaagtccttccaattgtgagtttgccgggagatattagggacattctgttcagagttagttacaaaatcgttaatggtagttacagagtagttggatcgctgttattttattactctcgtttatttcatttcctctctttgtttctattgtatataaatataaccctttcgtgtactctgaacacttgaacaaaacaattaatacaattgttttctttctctctctttttagtctttttgattctctttctctttactctttcttcttcctctttctctctctatctgtttctccattgttgttttttt

SEQ ID NO: 195948 - DNA, 1574 bp, Cannabis indica
tgccaaatttgggataacaggcttcgctgcttaaagagagacacagattagggcgttagaacattattaagaagtcatgcatgtaagaacaaagcaataaaactaatcctaccctgacggtctaattttgcctagcaaaagcatacatgaaaaggctggtgtcgtcgtccccaagaaagctgtccgaggggaggaaccagctggaagataaataggccaaataatccaacgtgataggtgtgggaggaccggaccccatccatgactggcctaaaaagtgacctaggttgaaaaataaaaacccttagcatgatcgccccatcgaaaaaggggcatcctaaacctatggagacgttcatcaaactctactagcctacagccgaataatcttgaacggaaggaacgtgatgaacagttagtggagacttaccagatccaggggtactggcatcaggagcaccggtgttgggaaccgagaacggaagcttaggccggaaggttgcctgctccttaccagcttcaatccgaagaaccctcccagcggcggcttggaccttgatgtaagccaattcttgttccctcctgaagaggtacttcttatatcggtcctctacggaagcaatgatatccgcccgaagcgccttctcagagtcaggactacgaacgttgggacaaagaaccttggacagattgaaatcatccactgattggttatctgtgatcaacttggccctcctccagtgtgcagttgtgaccaagtccccaacgttcaacccatccttcttgtacgtggaaaagaccttggggtgctgaaggaaaagttgtgtgggggctgtgcggtgcattagaggtatcttgacccactctgtaagcagttttgagcgctcgttgggttgaaaccggaggagaagaaaaactgatgatggtattccttaacattcttttggaaatcaaaaggaactggaccctcattagcaggatgggcccggagtgtgaaaaactgtccttaagtttgtctcccttctttgggacagatacaagttcataaaagtacaaaatttcagctgggctaggcgaagcccagcctttggcaacataaaaaataaataagcctgaaagaaggcagtaggcctgggggatgagttggtaaggcgcaaggccaacaaaaactagaaaatcgatgaagtaatcctggagcggcagattgccccggacatgaggtgagtctggctccaggctccgaagccaccatagttatgcttgggggtctcctcgtctctgggaagacggtgaaaaactttggaagcagaaggcttgatcgcggccacaatgaaaatcttctctagctggtgggcgcaggttagagttgagtgcaacttgtccgcctccgagccattggatcgacgagtgtacttcttctggactacatgtcccttcatcacctcttccagggtggccagggtagtagatactttgcttgaggatttcactccggttgtgggaacaaacatgtcttgagaatagcgagactctgaaaaagagaaatccagaagttagcccccaaccaaacccta

SEQ ID NO: 195949 - DNA, 3173 bp, Cannabis indica
ttaacaccacccctcaagcgcaagggtgattccatcaaaccaagcttgtctatgagaaatttgaatcttgaatgtgaaagtccctttgttaagcagtctgccacttggtcatgtgatggtacaaaacgtatttcaagtttgttctgtaacaccttatccctcacgaaatgaacatcaatctctatatgctttgtcctagcatgatagacgggattcgatgcaagtgcacttgcactcatattgtcacaccacacgactggtttctccaccagtttgaactccatttcattcagcaactcttgaatccaagagatttctgcagcaaggtgagccagagctctgtattcggactctgtgctagatcttgcaacaacagtttgtttcttagacgaccacgacactaaggtttcaccaaagaatacacaatatccagctactgaccttctatcatctggacaagacgcccaatccgcatcagagaaaccagtgagagttaagtgattacttggcacaatatgcagaccataatggacagatcctttcaaatatcgcataatccgtttggcagcattccagtgtgtcgttgttggtgcctttagaaactggctgagtttgtttactgcaaaagagatgtcaggcctggtgtgacttaagtattgtagagccccaatagcacttctgtacataaacggatcgtttagagcttcaccatcagttagtgacattgttttccctgctgtcattggtgtaggacatggcttcacattcaccatgttgtgtttttgtaggagttcaaggatgtatttagcttgagatagatagatacctgtattatctctgaaaacttcgatcccaaggaaataactaagtggccccaagtcttttagagcaaaggctttgttaagcttgtggatgaacacatttatttcttgattatcactaccagtgactatgatatcgtcgacgtacacaagcaccataagcactgacttctgtcgttgaagcataaatagggaggtatcagcccttgaatttatgaatccccaattgataagtgtttgcttcaacttatcataccaggacctaggcgcttgtctcagcccatatattgatcttttcaatttacaaacatagccaggtttggaaggatcctcaaaacccggtggctgcaccatgtacacatcttcttcaagtgtaccattcagaaaggcgttattgatatcgatttgccttatttcccagcctcttgtcacggctaaagtcagaacaacacgcactgtagaggcttttattactgggctgaatgtctctttaaaatctactcatggcctttggtggaagcctttcgctactaatctagctttgaatttctgaaaactgccatctgcattatattttattttaaaaacccacttacagccaacaatagagtgagcttcttctggtgggacaagcacccaagtgccatttttaaccaaagcaacaatctcgatattcatagccttgttccaccccttatgtctaagagcatcctcaactgaacatggctcatgaagagataaatccattttatcttgaccaagatacaccttcggtttgaatataccagcacgagctctagtaatcatcgggtgttgttgctgaacaatctggtgttgagtattttcttcatcagcaggctgcatagtttcattagtggtgcttccagccgtgtcaggtgtgtgacaaataggtgaaccaagttctgtgtcaggaaaatttacctgatctggtgttgtggcagcgactggagatggtggatcttcaaggtgtgcttgttgttcaggttgtgatgaagtgttggaaggtgtagttggtgagataaaaggcagtacgaaccaggaaggaggtgtttggacagtgacagtgttctctttttggtaattattcaaaaaacctgacttgaagggaaactcgttttcgttgaataccacatgtctagaaatataaatcctaccatggggacttaaacacttgtatcctttatatgtttcactatagcctaggttcacacacttaattgagtgaaattcaaacttgtgtgtttgatatgttcttaggcaaggaaaacatgctgacccaaaaaccttaaggaaattatagtcaggtgtcttagcaaaaagaacttcatgaggtgattttcctgataacacagtagtaggcagcctattaattaagtacacagcagtgtagaaagcatctgaccagtatttcaaaggcatatgtgcttgtgcaagaagtgttaagcccatctcaacgatgtgcctgtgttttctttcggctcgaccgttttgagctgaggtgtgagggcaagagtgttgaaaagcaatgccactttcattgactaaatcagtgaaagcctcatactcaccaccccagtcagttcttattgctttgattctcttatcaaactgattttcagccatgtttttaaaatgtttgaatgcagccaaggcatcagatttgtgctttagtgggtagagccaagtgtatctactatgatcatctatgaaatgaatgtaaaatttaaaattagtgtgtgatgcaattggggcaggtccccacaaatcagtatgaactagatctaacacagatgaggctctagaattggaatttttaaagggtagtgcatgagattttccaaactgacaagcatcacaaaataaaagactttcattcatagcagtttttacattagtagatttcataacttgactcaaaatgactgaagaagggtgaccaagccttctatgccatagatctgacatagaagtgggcacattggttttatttgactcgacattggaaaaggcagtaaaggagaaaggtgaacagtgactggttttacttcttgcacaattgtttttagagatagtagaagtgtttagttgatacaagccatctttaagcactccttgaagaaccaccctctttgtcacctgatccttcacacaacaaacagtagggaaaaattcaatagacacattattatctgaggtaagttttgacacactaacaaggttcttagtaatcgatggaacaagcagcatatttttgaggacaagaggtttagataaatcagtatttaatagaccagaaccaacatgagagatgtttagctgattaccatcacc

SEQ ID NO: 195950 - DNA, 1301 bp, Cannabis indica
gaaaaagtcaacagtcaaacctcttagaaataaatatcattattaacagttggattgaaattgagagaatcagatttcatttcagatcaaccattttctctcactcttttgttttctctctcattaaggaaaagagccttaaatcaaaattcgaaaagcttaaacccttcttgtacggacgatctccattgaagaagataagattaagctatgccgagcaagtgcgaaatctgctgcgaattgctaatcgctatcttgcttcctccacttggggtttgtttcagacatggttgttgcagtgtaagtctttctttttcttttcttttccattgtttggttaccgagaaaattaatttgataattgatctaggtttcttcttttggggattatgtaggttgagttttgtatatgcttgctgttgaccattctcggttatgttcctggaattatctacgctctttatgcaattgtgttcatcgatcgcgatcagtactttgacgatgaccgccgtcctctttacgtggcttgatctgtattgtgatttctaaattacgtttattgaatctgttttttaatctgtgatgtagtaatttatggtgtttgttcatcgattctgtttatatacattaaacttggatctccttatctcatgtgatattatgcacgagttctgttttgaaataatgcccttttgcttgtaatgtagtttttcgagttgacttttcctattttctttttctaatggaaattgacatttttattttcttagcttatggttttcataatctggatccttatcagtactattgaatacttgcttttcttttgatttgtgtatttactatttaggtatatgattttgaagagggttagctttgttttttaaataatttatgtccccatattggtgtgaccaaaagtttcccttttctgctcttatttattggtaccagcatgggttgggggacccttttgcttgataaccattccttttttagaaacatttatggcactgtaaactctctcccaccacttactgttacactatgaaaatatcaggacttgttagtaatttgcttatatggaatgagaattagaactttattcattttggaagattgaaattgtcgagtgccttaaatcttgagagttttgaatttgagtttggaatataattcacactaatccttttttagaaatattcttatagggaggctaggattttacttttagtttgctaagcttgaggagctaaaaagtgacttcttgtaaaagggttttacggagctaaaaattgaaa

SEQ ID NO: 195951 - DNA, 1419 bp, Cannabis indica
tcttggatatatcaaaaaactatttttacgactacctttttcccaagaaactagatgagagaacataagacgattgtctgttttctcagttgccccagacttgaacttaccacaagaaatggcatgtctgcagattgccattttaattcggactcattagctggctctggctctaaccagtttaggagcacattgaacccgggagagtaaatccttttgatctgagcatagaaccttggcatggcattgaaaacatcataagcagcccatatctgcccgactgcaaaacaccctgctttcctgtccttttcaaagtcattaaaatctggatctagatatttatggaattcctggtctgatgtctcctccaagcttgaatcaatatcaacacaattttcagaactttctataggctcttcactcttaccggccttgtctccattaggtacaccttcttcttgtttaacccctttctcatctactttcccattagaagtagtatcatcagacaaacttgaaaccttcgctgacttctctttagattgatctccatcctccccctcaaatttcttcccttttgccctctttggactcacatagccaccttcatcatcacttaaattttccttgtaagagacatgttgtttatggcgtgaagatcttcgtcgattttgctctccagaaaattcagacatgttctcatcaattgacatatcttcttcagagtcgctgctactttcagagactgatacatcagattcagagagctcgctcttatctcgagcacgtttcctttctcttttgtcattcatctttcttctgtcaacgcgtgaagtaggtgatgccttcttacctgctttttgaacagattctggattcaaactcccagtgccaaagtttcgacgaacatgtgattcccctttctgagtactgtcttttcgttgagggaatactggtttactaaaattagctgctgctggtgtatttaggtcacatgccacaaaagacctctggcaattattacatcgaagagatttattaagaacgtctttatagtactggtaccttacaaaacaaaaggtgcattcagtccaaaaagttgttctgggatctaggttccctagattaacaggttgttgctgctgctgattatgagcattcacaccagagaagttgcctctactactgtgtggaaccacaaccacatttgaggtccgattgacctgacgagcaggaaaataagttgcagcccttctgctcattgaacacttgcgtctcatattatgcatgaggcgcttatctttgtccaatagtattctctgagcttccccaatcagcttaaaagcagcttcagcaccagcaaacttatttttatcaggatgaagttggagagcaaacttcctatattgcttcttaatt

SEQ ID NO: 195952 - DNA, 1075 bp, Cannabis indica
aatagtgcattcataaggaaaggtgaggtaggagattgggtgaactatttaacacccgaaatggctgagcgtgggaagaagcttattcaagaaaagtttgcacaatccggtttatcgtttgatttctaacttgtttgttttcattgtctaaggatgtaatatttatgatttgcctaagtcatttccttttcatccaataagttacttatttattgttggtgtacgtatatcttcttatgaagagatgtcagttgttttcttgtcttaagattgttgtaatttcgtttttttccattgtcttaataaaattattacaatctttgtttgtttccgttaaataaagggatatttgtgtcattagttcctatattaatgaaattgtacgaattctgttttaatgtcttaaattttataactacacatggtttttgaatttattgaaagattttgaaatgaactgatcctatatatgtacctttttatccaaacccattaatgatttaaaatttaggaacaaaactgaatagaaatttgacatggggcacattacaattatagtatcctttcaaacacaatttgtagcaagagatgatgatattctgttaattagcttcttgcccaaaattagacactactttctattgtaaaatgtaatgatgaaaataataacaaccatttgtttactgtcaattcacactatcttgttcatttgcttgaggttgagtcttcattacttgttgaaattgttgagtgtataactaaagtcccacattagctagaaataaaaaaaagattataggtatataaggatgaacaatatttccattagtttaaagccaaatatcatattaatgtggagatagataatgtccaactaaaaatttattgtatgtattccttcttattggcatgttaatgataactttttgggagataagactatattaagtcgcttagaagttagaagagtcctttaatgttttgtaatgaaattgtggcggaccatttttgggagataaggctgccttatcttagggcttaccctattctctctacttttagatcaaaaaatcat

SEQ ID NO: 195953 - DNA, 1973 bp, Cannabis indica
tttataaaaattattaattgtacataaaatagattttataaaaggtaaaaataataacttaagttttagataatatttctaatatactaatttaaaaataattattaaatacgaataaatacagaaaatataattagttttattataaaatttatatattattattaaattttaatttaataaaagataatttaaaatcctattataatatattattatttaacgaaataaaactatcagtaaattttacaagtatttttcctaaaaaattatagaaaatgggtcacagcagcattttagcatttatcttttttgttaatgggagactcaaaagacacctttttcagcgtgtataaatacgaaaactgaatgaaacatgaaaaaaatcaacacagaacagagatagtgagtgactgagagaggtgacggtctcaatctccgacggttacagatctcccggcgaccttcgaatcctcgccgggtaacgacggccggcggtttgagaaatcctctcgacgatgatcaagcatcgaaacagtaaaatcccgaaggttctggaaaatcgagctgaatctcagaagatgaagatcacgaaaacgaagacgaaaacgaagagacagagacctcaattggtaaggtacgaagacttgcctgagtatttaaaggacaacgagtatattttggaccattacaggtgcgaatggccattaaaggacatgttcttaagcctcttttcttggcacaacgagacattgaacgtttggacgtaagtgaataagatcaattgtatatattttaattaattgttgatgattttcttcttctttcctaatttgatttttatgttccgtacacacagacatttgttagggtttctgatttttgccggattaatgacggtgaccttcacggggaagacggagttaggaggtgtgcttggaaatttctcaaggtattaaatatatacatatatgagatttgtaaagattattattgtaatttctccattaatttctgtattaattattactgtttttcaagttttgagagagagaaaaaaaaaacaaataagttttcttttccggtgacagagcttcggtttcaggaccctggacgatgacgacgaaggaattcaatgtttcaaacgacaacattcaggtgcttacttcatgtcgttttaaatttttaattaattgttataaatttataattttgtttctcttttgaaatgttataacgactattataattgcacccaatataaaaaattataaacatttttttttttttttttgaaggaaaaaattataaacattttagttcaaagagagactattatatttgcacccaaaagtaaaggcactcttcaaaaaataaataaataaataatgacactcactccattaagttaaatatttttttttgttttaattattctgaacagctttttaatttcaataagaaattttgtcaactttttattaaaaatataatattttcataattattagtttaacaagttctcatttttttatgtttgtttttattatactttaaaatatatttgtattttaaaaacaaattaaaaatatatatttaatataaaaaataattaattagttgttgtagcatgtattaataaaattttaaagtgttaatacaacaaggagtgctaattagtaattataatttttttccagttttcactctaaaatatatattggagtttttttgttataattataatattaattctgtaaatttataaaattttaaataatttattgtgttaaaaataaaattaaatttatttgaacacttaaaagatgttatcactatttgtaaactattgaaaaaaaataatagtgataacatccttttatgtcactaaaaataataatctgtctgtgtattttttgataaaaagtgaaaataggcttccttaatacaaaatattattattattattattt

SEQ ID NO: 195954 - DNA, 1684 bp, Cannabis indica
taactatttatagataaagacaaggaacaattatgcaattattttattatcatcccatgtgatgtaaatacgaaacgtggggctgatccacgtttcatgacagttataaggataagatcccaaggaaatatctgtcaccctaaaactccaataaataggaacaaaacctagggaacaagggacgaccaatttgagaaaagagagaatcatacaaatattttcttgtattctgtatacgatttataaaaatcctaaaataagatgaactcgtggagtgtgaagaattaacttcaaaaccatgttaaaaatcttgttgtcatttattataattattatttatttaattctagagtgtatttattacttcaaggctcattcattggttaacgaaaatatgcattaacagtttggtgctttcattgagagccttgtaagaaaaaactcagaaaaataccctctttgaaatatattcaaactttctatccatggcagacgatactcctcgaaacgaagatactcaaccaggaagaacaatataacgtccaggaaaagaacatctgaatccccataggacaaatacgactgagactccttgctcggggggaaaaatggtgaagtatttgagcaaactggggaggagattccagagagacgtaattaggacgcttatgatcccattggatacgtgccattagtagaattagaaaatagacaactctaacatcgattggcttaatcgaattagaggaatgcaaagttagagcgtgaggctgctgctatacgggctgcacgtagtgatgcacctcctagccaaccaaacaaatccactaggcgaccttatgagaggcctagaggctcaaggaccagaagacatggggaaattctaagaggtgataactacgaaattcttactaatccctaggatgaacttcagggaatataagggatattcaagtggatgatggaggcccccaaaatccaagaaatactggcattagagaaactcgacccaacgatcctggaacttcccgcggaaagacaaatcatgggaatgtgcatatacttgaaggtcagtgagagtaaaatttgtttttttattttatatgtgagcgatattcttcttagatccaatgataatgggttgttatgtgaagtaaaataatttctttcaaagagctttgagatataagacatgggtgaagcatcttatctcataggcattaagatttgtagagatagaaatcgaggcatctcttaagtttatctcaataagcctatcaataaagtcttagaaaggtttcagatgaaagattattcaccgagcgttgctcccattgtaaaggggtgataaatcgaatttgagccagtatccaaagaaggattttgtaagacaagaaatgaagataattctatatgcttctgttgttgggagcctaatgtatgctcaggtttgtacaatactcgacattacttattctgtcaaagagttaggatgattttcaaagtaacccagggataaaccactagaaatttttaaagaaggttatgaggtaccttcaaggtactaaggattacaaacttatgttcaaacgaaccggcaatctagaagtagttggctacttagatttaaattttagttgttgtactaatttatgtaaattaacatcaggttacgtgtttatgt

SEQ ID NO: 195955 - DNA, 621 bp, Cannabis indica
ttctagggttagggtttgttgggattgggccatggctagagtagaggagagatatcggttggaatggaattataattctactaaataaaaaatggaatagcaattccattagtttgggggaataacattactatggaattctattccaaaatttttatttttcaaccaaacaaaataatcaggcccattagtattccattccattcctttctggcccattacctgcaaccaaacgggccctttgagattaagagattaaaataaaatgtaagagaatgtgggaaaatacatatacagtcatggagatgaggcgcaatggcaaggatgtgggcatctaggctttgtcccagtcgtctagtgaagtgggagacagagaaagttttttaagattaagtaattatcacctacttctcaaacatataaattctgccaggtgtcacttatttatacgctgtagaatacccccacctatgggttgtttttagaaggtcctatagtagaaaattcctatatgtatatatataaggttgatgttacatgcaatgcacgtataattagtttttttttaattaagtttaattggtgatgtttaagtgtacaacatgtatgtttaattttttt

SEQ ID NO: 195956 - DNA, 1916 bp, Cannabis indica
gtttttgggcatccaaggactttatatgtagagttttttcttccttcatcgttgtagtacataaagggttcttggccaggttctcttgagcattacagtactcttctcttgctgatttgtatgtgctggtgacatcttcatgcttagtgacaaaataatcctttaagacatacttcactctaaacagctgctgagataaactcttcagatctgtgaccttctttctcctccaggtacttaaaacagtgtctttgtacccatctttgagcatccagtggttactaaatctaaacggtttagtaccacaattgctgatcttgacatgtttgataatacagtcactgtgatcacagagaaaccccccatctcaaacttgcttatgtattcagaaattggtctagccaactctcattagtaaacactctgtcaagcttcgagtgaattaagctcccctcctcatgcttatttgaccaagtaaagaaggagcccaaatacttaagctcttcaacttgtccttgggccaaccagtcttggctatcttgtatctcactgtcctttatccttctaccaccacatctatccttatacccaaacatggcattaaagtcacctaaaataatccacggttccttcaaatgcccaatactcgctaatttactccagagctccttccgtttatttagagagttactaccataaatagccatgaggtagaacttatctttgaacccaaccattttaagcttgcaatggaaaaattgtttgtcctccaagagcacatccactttaacaattttatctatccagatcaaaaaaatcctatacgaaatcacatgactagaatagtacttccagtccaagttattcaacaacaaactagaaatcttatcatggctgattttggtctcaaagagagccctaaaaccaactttattgattttacaactttcaaaaaactcacgatgcttctcttttttattcagccctctaacattccatccaagcatattgatgttctccattaatctgaattatcaagtgtagtaaccaatgccccctcagcctctttcaaagcatcatacccattactcacagtagcttcttgttgagttctaataactagcttggaacctttcctccttggagttagccaacccccacactctttaccatcatggacactaacactcttattttgatgtgtccgacttggttctgaattcctaacacagtcccctttttcttcattgttactatgattagtctcagctaagcccttttttgtcattctatcttgggtagatcatctacattttcctcatttttttgttggattatcccaggatttgaatcatttttcttaacatcattcttgtttttatccctttgctttttttcctccatgtaaattacagttagaaactatatggccaagcatgttacaagcagcacatttggttggcagccattcgtactcaacttgtttttctacaagttgcttcttctcatttacaaaagcaattgacctcggggttcatccttaatctcaacatccaccaaaactctaacaaatttgatcatagacctttctagagttactttacctgccattataggtttgccaatggtgctaacaagagaacttaggttcttctttccccagtactgaagacataaatcattcaacttgacccacactggaaccgatcttatgatctgagtagtatccatatcttcagaccaaggtctgagaattactggtttcctatcaaactgtgtaacccctgtttcaaggatgatatacctagtaacttcatctttaaagttgaccaaagtaaatcccgattgcattctaactatcttttccacacccaaattccttcgaattctcttgagaaaatgtaacaccctaacta

SEQ ID NO: 195957 - DNA, 1418 bp, Cannabis indica
atgtgccctttttgtcacctagacgatgagactgtggatcatgtgcttgttgattgttcatttgctcgtcaatgttggcaacagttttcttctctctttggttctgctggtgtgtattttgtcgattggtttttgagcatggccagcagcttttcctcttctggtttgggcagtgttgcagtcatctgttgggctatatggaaagcaaggaatgggttagtttggaacaataaacagtcagttgcaaatgttgtggtgtaggctgcattagcgtattttgatcaatggaaaagtgcgaaaactcaatcttttgagagtgatttgcctactggtgtgatcacttctccgcgctgggatcctcctcgtttgaatacgatcaaagtcaatgtagatgcttcattttttgcttctgataagaggcttggaattgggtggttggcaagagatcatgaggggtggatcatgtatgctttagctgtggcacaccaggttgttgtcgagcctgttatggctgaagccataggacttaaagaggttctaaattggcttaaaactactgattttcaacaagttgtggtggagtcagattgtcaagtgcttgtcaatgctattcaaaacaaagtaactatgtattctccttttggtttaatagttgatgattgtgtctctttgatgaatgatttaaggagtgtttctcttaattttgttaaacaatctgagaacaaggcggccaactttttggctaggaatgcctgtttgtactcaggtcgtagttatagtaggggtcttgtccctactgaattgcaagctattattgtagctgatttgctttaataaaacaatcgttttttttaaaaaaaaaatatattatgtggactactaaaaaggtgacatgtgtacaattgtgtacacatggacaatccatcatggcacataagtgagactcttagacggaagtgtaaagagcaaaacagaatgtgggtttcgttttgccgtcaaaaaattaatttatgagattaagtgttaaaaaaatataaagttcgagtgtttgccgccaatatccctaaaaaaaataatattttagtgaaaaccacattttttttataactaattgggtaattaatcaattacccgtataagtaaaaataaattaaaattaatattaaatcacatcaaagtaaaataaaataagagttttatttataaacttcacgagcaatatctaaagtatttttaaacaatgtaagattatttactaaattagtaaaaaagataagacctttttctttacggaaaacttaaagcaatcaaaaaattaaaaaaattatattgaaaaaaaaaaatgccacctcatcaatcttaaagtcctttatataaatatatagattagggaaggaataattagtatttttgcttcc

SEQ ID NO: 195958 - DNA, 1379 bp, Cannabis indica
tggggtggtagcgaacttgataacacatgcgtcaatgaaacatatagctcctgcaacaatatttttcaccacttatgtggaaaaaattcttactttaccattgaatttcttcccaaattcaaatatgctcatttggcatcatcaccacttcgaccactacattgttaaatcaaactttcatttggcaaattcaattgaagatgcacatgcttcgtcattatgggactatatttggtctcttaaattaacgcaaaaaaaagtcaaaatctttgcttgggtgtggtttatgatgctctccaagtggctaaccttgttaaaaggaaggtaataactgataatacttgtttggtgtgtagtcgggcttgggagtctataggacatgtcttgtttagctgtgagtatgcttgatccgtttggcatagtttaggcttggttttcgattggcatccttcttcttccatgatcaaaggagactatcttgttcttctctctacactttataccaaggccgaaatagaatttattatttgtactctgtggtgcatttggactgaaaggaaagttgttattcatggaggaaaggcaaggccggctgcataactcgctaagtttgctgcaatttatctcgacaacttcaaatctgccagcctcaaatattatccggctattcctgcaactcaagacaacaccctctttgcaacaactctactatcgactgcttcacctccgtgggtactctcgggtttaggagactataaagtagctgtagtgctgccttgaatgctagcaggcagggacgaagctactttagctccaaagggggccatgacccctcccaaaattttagacaaaaaaaattataaagtaatttaatgttaaaaattttatttttttccaaaaaattatgtatttggcccccttaatgatttttttttatcatttggccccccttattctgaacttctgcctccgtccctgctagcaggagtatcatatcattggtgttggtgcaactattcgagatgctcacggtcatgttatggctgcgctttctaaaccgattatacgaaatttaaaatcgcatgaaatagaaataaaagccattttttacagtcttaattggtttctttagctacaattatctattacacaaatattaatttatgataacaaagtattatcctaaaaaaaaaatagtttgacttgcaaagaattatttattgcctatatgtttgacaaataaaaaaaaaaaaaaaaaaaaaaaaaaaaccaatacttcaaaacatcaaggttcacaagtcacaattggtgttaaggtgtaagcttttacaagaaaccaattgatcccaatacagcatctcattttttaaaaaaaaaaa

SEQ ID NO: 195959 - DNA, 1238 bp, Cannabis indica
tgaatataaatgtgacgtatagtaacggagaaagcattatttgttacaactatctcttgtcattctctctcctcaaaacaaaaaaacatattttattttttgaatggattgactaattagaaatatttgccctcgaaagctttcaattttagatgcagtttaaagatttttaaacttttgaaatggttgaatttaaagatttctaactctgatcaattttattaatatagctattatttatgtattaaattatgtccaaaattgtaatgtgttgtgtatgatattatgtttcccaatttaatatatattaattaaattgtatttatatctatttgtaaaattcaataaaaaatttaaatttaataattttaataattcaataaaaaaaattaacggccccaaattaaaaaatacaatttaatacattagttgctaaaaattctaataagtctatttttttctttttgaaaatctaataagccttatttttttttttttttaactaaactaataagccttaatttaaatacaaagtaaaagatatattctgaccctttcaaaaaaatatatattctgataagaagataaaatgaaagtaaataaatttggccaaatttattctatattcctcagctccgtatccctttttttttcttttgtttttgttcataatttttctggagcaaacaaaaataaatagagatttttttgagtttttttttttaacaaatgctaaacatctcttctagcgaaaagatgagctctttccaaattcaattttttctaggaaaacaaagaaaatatcccaaaaacaaggtaaattccttctctccattttccatttttttttactttttttattattattttattttgctaaagcttatattcttttctttctttttgttcataacttttaacttataagtctgtacaaatgaagtatcattggtcacagaattagaaatcttaccctaataaagatctaaaaggttgtgggtgaaggagaagatcagaagtaagaattgcatatatatataatatatatatctttcaccttcagtctaatatttaactatttatcaattatggacaaagcttttacaactttcttagttgaatgtttttagttagtcttgtacgatcctgtaaggaaaaaaaattaaaaatattatttaatattaaattattggagggtaggcatttacgaaatgttttcttcttctttttattaattt

SEQ ID NO: 195960 - DNA, 1205 bp, Cannabis indica
caatctctttaaggaattaaaaaagtccacagattcccaagcccacgacaattcaaacttagtacattcataactcttggcgacccagtaaaccaggaccctcccctaacaagtttttttgcaaattatcacaagtggtgcccacctccatatttttcttaacaaatatttcttcattatcttggcccataactacatccacgtgtggagatctctcacaattatctaaggacaatcttctccttttttaatcacaaattaaatggttggtttcgttaaataaattctcctcatttaagaccatcgttgacttttctgtgtccttaatcttctctcctactacattaatcacaccaatacaatctctgattttctcccttgatcttgcgacattaccatccgaatttcctctctgattgatttccctcaaaggattctcattaatgattaccatttgtctagttgttgttgtcactccgacgaaagatgatccaacaccaccagtgtttgtagccatttttaacttcagccatcttgcaccgatatgatgtgttcttcttctcggtgcaaccttcatttgaaggccatatgattttgtaagtaagtgacttggcgtatcaaaagttttttcgcaaaaatattctgaatggcctaatataccacaaacaaagcaaaaagttgtcaaattttatatttaaaattcacgtgacattgcagaccattctttatttgcaacttttttccctttttcaaagtcagatcagcccaaacttgaactcccacccttaagaattctctccaaactcctgtaaaattatttggatccctcttgacaaactggtcaatataattctctaaatctcgaaccactctttctgatatgaaaccagagatcatatcttgtagttgaacccaaaattccaatctatatagagtgatgaaatgtggattctcgccagttttgagcctctcaaagactagaggtattaaacgtccatggactaccctccataactcgttcaatatctatttcatgatagaattagaaaaaaaaatcaattcggttctaattctttcacaaataagccgcgaacaggacaccacaacaaagccatcttgtgttgcatcacttgaaaatcaatggtgcgatccgtaaggaacctaccaaccaaacaccaatgatcatcaaattcaagaaggtctac

SEQ ID NO: 195961 - DNA, 1711 bp, Cannabis indica
cccagagtctttagtagctagagcgatgaaaggtttgtactatccgaatagatctattgtggatgttgaggtgacaaaacgagcttcctttctttgtggaagaaaggggtgcattggcttgtggggaaaggtgattctattaggattcgtgaggattgctggatacccaaggatcatgtgggtcgtgctttctcatttagtggtggtgttgaaattcaaatggtgagtgatttaaagttagagtttgggagtggaatgttccttacattttagatcattttgactccttggagtcatagtctattttatctactcctactcctactgttgatcgagaggatagagttttctggaacttctctacttctggttgttatacggtgaagagtggatattagagcacttttctcgattgtgttaggggcatgaggcgtcacccactggttcctctcggtggtagaagtatttttgggttctcaatcattctcctgaggtgaaaaaatttgtttggaaggactctcttaattttatccctacttatgctaacttggttcgacatggtatgagtactctagatgtatgtctgatttgcttaaaatttaatgaaatgactcttcatgcactttggttgtgtccctctctcaaatgaatttagaaatggtggggaattcaaggtttggataaggttggagtggctacgtctttttatgatcttgatgttggttatacatgtttcttcgtaaacaggaaattaaaaaatttcttataatttgttggaggatatgacatcatcgaaatactatggttcatgatcatcatcttctgaaagatgaaatagtataactttggactttaaattatcttatgcggtatcaagaggcctaatctcatggccttaatagtgattcaacatcgactattgtcacatcggggatagtgttgcttgtggaaatccagttggggaaattcaatctattcgtagatgctggtgttcgaacagaagcgggaacggtgggacttagggctgtgttgtctaatgtcgccgaatttgttttgttctcggtggctctcctttagtttgccattttgaaccccttgttgctgaagtgggtgctttactctatggtctccagctttgtctttaaatgggttatcgtcatgtgaagatattctcaaattgtcttcgtcttgtgcaaagtgtgggttgtaaagaataagttttttgtgagtttggtattgtgctttatgatatcttttgtgtgtaggattatttttcttctatcacattatctcattgtaagcggaaaaataatgccaatgttcattcacttgcacaactagctttctctcttgagtcaccgcttatttggtggtctagtttgcctaattatttagtgcgatgtgcgtcttttatttgaataattttcttagtgatgtgccttataatattgttttttttaaaaaaaaattataaaaagaagaattcattgtgatgaatttaagtttggtgataaaaaaaaaaaaaaaagagaatccctaaaacaatgcatgatttctataattttaatatacatttttttttattacatatctttcttatatataaatatctatgttatatgctttcaaaaaaaaatatatgtatctatgttatattaaatgtggttatatgacaaaaagtgttgttcttttttaaaatattacaattcaa

SEQ ID NO: 195962 - DNA, 655 bp, Cannabis indica
cattcaatcacatagcactttgatgaatgtgaatgatttgttgtaatatattctgctgtgtcaaagtgaagatatgtgaggtgaggatgtagttaaagagagcaaaacttttggcctttttttctttttaaagcaagataaatatagataccatctcggtcagtcctcccaccatatgatgatattcaatggtgtggtttagttgctgaattcgcaaatttctagtctagttttgagtaggtgtattcttaggcaacaatacagtcttgaggccaaggtttccttgtagaagtgaataaggctaaatgtctatttatcaaaagaaaaaacaatgagagtttttttcttatactctcccttgtttggtcacctttttctttgtaagctcaacatagggccaccaaatgtagtttcttctttaatatgaagtcattaacacagatgaaaaatgaaatgacaatatagaagcctttgcttgtggccactcgtgtggattagaactttaaacttacacgacttagatctactatttcacaatgaagtaggtcaattatgatgcatagtgaagcattgacaatttattagtaaagaattatcaattcaaaaaagaatgtagtgtagtgtacaaagtgttttactaattaatatataattt

SEQ ID NO: 195963 - DNA, 835 bp, Cannabis indica
attattattattaaattatagatcaaaagaataacacttatttaaaaaaaaaagactaattcccaatgctcttcaactcagtgagtcaactcgttcctctaatgcaactcctcaaccttcgattccgattccgatcaccaccacctccattccacttcttctccatacccctcaaaccttcctcgttctcctccgtttctctgaaaccctatagcttctcgaatggggatcgctttgcaaatagctctcggtgtttacatcgacatcgatgggcttctcaaccgcacataacgccaaaattccctttggctgatcactcggccaatagtttttgattacgttgtttcaatttcacaaccgttcttttattagtttcgatgtaatcgaaagtacgagtttctacgcatatatacatgtggtataatcgtatatgtattatgccataagtcaaccgcccttgacgcttttttcatcttccacgggatcttgggagacaaagacgatcacttccaagttctttattattggaagttacaaattggaaaaaatttctagatatagcctaatgttaaacatgagaaagagacaaaagaaagtaatgaataattttggtggtgatggtggtattttggctgtgacaaaaaacttgtttagtatagtatagtattatactggttatcatgcataataatcttgtttggctagatataaatattctatatttcgttggatatataatattatactgattatcatgccatgtttagtatttatttgatgaacaggagatgtttagttgtatgacgttattcttttttaatgaatttattcattg

SEQ ID NO: 195964 - DNA, 609 bp, Cannabis indica
  modified_base (561)..(561): a, c, t, g, unknown or other
cccgaacatgacccgtttataaataaattaacacgacacgacccgtgtaacccttttataagcatattttgtttaacatgtcaatcaataacacgtttatgaagtattcaacatgtttataacacatttatgatacgttaaaatactaaaataacttttaataggtcattaacaggtcaatttcatattagtcgtgtcaatccgaacacaacccgtttattaatcgggttagacgaattaatccgaacacgacctgaatccatttaaggcaaacccaaatccgttaactctcgtgcgggtttcgagtcatattatcgacccgtttttccagccctaaatttgggtattagtgggcttatttcggaaaattttacaaaattaccattttttttctccatatattcatagtgtataaaatttttgggccctggactataccaggctcgccttagccaagactgggcctgtcactaatacgatcaatacattaggtacctccttcccaccaacccatagttttggaatgttggcaaatgtggattagtttccaaaaattttagngtttgctcttaaggcccaattgtatttatacacttaaaagtgttttat

SEQ ID NO: 195965 - DNA, 600 bp, Cannabis indica
ttttttttttttttcttgttgtttaataaagaaacatcatcaatacttatcccaaagctaatacaaaactaataagtttgattatctattcattaacatattttgtgttttagtcttacgtacttcaccttaataggtggcttttgtattaataatatatgtatacttaattaataatactcagtaataataatttaataatagtcgaattaatttgatctagtgatggtaggtagataaaaagtagagaacaattatgatatagtgtcttaaacaaaagtatgctgtagagagaagagtcttaattttatataagagttagaaagctatagattacaaatgatcaatgattccatataatatatgtaatataattaagtagctcaatcgtattttgaaaggtgatgatcatcaattaagctttctaattaatttctatttgttaaagcccccagcttgacatttttttccctttttttcttttctttttttttttaaaggttactatagtattaaaagtccaaaaagttatttaaactttctcattgatcacctttattttataagttggaatcggtaataaataatcatatatataag

SEQ ID NO: 195966 - DNA, 1285 bp, Cannabis indica
tgggttgagtcatggactaggtcgctctctttacgacgttcgttgcactgcccagaaatgtgcaagcagtaaaaaattatcagtcgttcccaagataaaataacctagtcaaaataccactgtattggagctctactgcacaatagaaaactgttgaaacaccacaatgaaaaactactgctcggactatataatataattatcgtaaataataaactataaatgattttttttttctgtgtgagaaagatgtattttctcctattggttctaatgtattagggaacccattgaagatcctcttactccaagtttggtgcaagaggaagtggttgaccaagatggaacagaagcaatagagtatgctatgtggcttgatttttatgggccattgaacataaagtattatgaagagctaagagtaattccaacaagatcattgccatctattgagaagccacaataattagagttaaaagtccttcctgatcccttgcggtatgagttcttgggtgagaacaagacacttccagttattgtttcaacttcactttctgatgtggagacgaggaagttgttgagagttttgagaaagcatatgaaggccattggatggatattggccgacatcaactattatgcatcaaattttaatggaggatggagtcaaaccgaccattgatgcacaaagaaggcttaatccgccaatgaaggaagtagtgagaaaggaggtagtgaaatggttaaatgttggggtggcttatccaatttcagacattaagtgggtaagtccagtccatgttgtgcctaagaaaggggcctgatgggggtaaagagcgaaaagaatgaattaattccaacaagaactgtaactggttggagaatttgtattgactacccataagctcaacaaggccacaaggaaaaatcactttctcttccattcattgatgagatgttggatagattagcgggttaagagttctactatttttgaagaattccattcgggtgatgtaatgcaccagcaacattctaataatgtatgatggctattttctctaatttaattaagaattttattgaggtttttatggatgatttatctgtgtttgggtcattgtttgatcactacttgagtaatttggaactggtcttgattagatgtgaggaatctaattcggtgcttaattgggagaagtgtcatttcacggtaaaggaggggattgtattgggacgtaagattctaaaggaaggcatcaaggtggacaaagccaaggtatca

SEQ ID NO: 195967 - DNA, 786 bp, Cannabis indica
attaccaaacattatcttcttgagattcttgagtaaagcagccatctaatacttagtaaaagcattaggagaaacagcttccttcaaatagtttgggaacttataaatgtgcatccagctttacaaattgagagatatacataaatagagcaaataattaatacgacaatattgcaaagggtaaaatttcatctacttttttgtattttattatatatataacatcaatgtgtcacacacacataattgtctaatgcttgtttttgaaattttcaattacgtttttttgctgttattctgagaaatattttccaacagtagagcaatattcacactttactgcaacctcagcatatagtaagaaaataatccaagtctaatttactttaggtacctataaatcctaatagttatagcaagttccattttagtgtgtgagactgctcggttttatatatatatatatttttttgctctaagtgactaaacaaccattgtcaaaagaaaaaagtgacagaacaacgaagaactagtaggctttttttaggtatgtgcaattaatcaaagagcatgtggagggttgctgtaaatctgttaatagatagtgagttgttgttagaataataatggttagtttattttaataagcatgtaaaagcttgcttgattctcattttttcaaaattgaaatcctgttttcattgctaattatatttttgttttattatttttaattgctttataatattagaacattccacttgattatgtaaatattccaaattg

SEQ ID NO: 195968 - DNA, 1341 bp, Cannabis indica
tattttttttaggtggacgactactccacttcggttatatgtagatcgcacctgtatataactatataatgtaaaatttctataagtgtgctagctttatatgattttccataactagtgataaattttactaataactagctttattgtacatataaattaacattcaacaactcatcaaactaaagtctaatcaaaattcagaagaaccattgaactatataaccagtagctacagctatgtttcatgttcatacacagtaaagacaaataatatcacatggaccgatggacgtgtttgcattaaagtgtggttgaataacttgttactacctttggctttttactctcactacaatacataaattaaataaattacattaattttatttttataatggctcctgatttgatgatggtatcgtagaagataatacaccgacatatggtgcggtcaccaatacacatgcactcttctcataccatataccaaatccctatatagctaatatatattgccatcacctttcctcatcatctcccatctctttctctccctttctctttctttttctctctaatcaaaagtagtgactagtagcaatggcaaattccattgctacacaaatctcactcctaatattttccattattctacttcttctaagccattcaaacaatgcaacagatcaagccacgtccacaaccactactaccaaggaggcctcagttgtgtcgaaagagcaagtagcatgcacgatgtgcgacgcgtgtgaaaacccatgtgagcccttgccaacaccaccgccaccagtcgtcgaatgcccgccgccaccagctcctccgccgccttctccaccgccctacaaagaaccagaatgcccacctcctccaatgcctaaacctccttgccaagagaatatttgcggcggaggcggtggtaattatggtcctcccggcggtgaaggtggcagtaataacagtccccaatatccaactcctattatgccacgtcccccatatatgccggtgggtgatgctccgccggcttcatactatcccaactactatatgcctccaccttcaagctctctaagaatcacaatcacccctattctcaattccttgttcttcttctgcttatttctttccttaattattatgtagtatttatacaagttttagaattatatatgaagaacaatatttacaattaaaaccatatatatttacgtgtatggtttatttgcttctaagaggcaaattttagttcaaaacaatatttaatgtagaagaataaggctatagctatatatgtataactagctaccatatatatgt

SEQ ID NO: 195969 - DNA, 1398 bp, Cannabis indica
tccatttcaactatcttttctagtttcttcttggccagtaatttctcatctctaaggactttggagactttttggtgcactaggatccctttaatactttctctccatagtgcgaaatctcttgttccttcaaacttctccaattcgaatctcgaccttgatggcgttaattgttttttcatgatgcaacgaaaagaatcttgattctgcgatcttgatcaataacgtagctctgatttgtggggaaattacaactaatatgcaaaatcaaatcaacttaaaatatatcaacaaaaaattagcaatgacaagactaacaaatcacgaactgagaacgtactggagaaaaaatagggtagaatggagtatttaaaaccacaaacaaataaagcgaaaaaataataaaaacaacacaaagaattatactggttcaagtcctatagatcgatgggatttatggctttactctaattttgaaacaccgtcaaatagtctttattgattgagtaagaacaagggtacaatgcagtcgagaggattctctatttggtttctctcaaagtgtttatctctctaacactcttacccaagaagcttcttcatacaaatctcaaaacccaatctctctcttttctttgtacctctgtctctatacctctcaatatcactcttgaaattatctctagtattctatatcttctaaatatgaggatggtggtatttatagatctgggataaggatcccaaagtcggtggctgaaacagctaagttgttaagtcagttatgacttaacaaacgccttggaacaagatctcatcgtcagctctggaaagagctctccatacgtgaagcacgcttcttggacggaagtcccaggcagatgaaacttgttcctggaaggatgttctggatggatacaaagccagctggagtagactattcgaaaccccttttaggagtgaataactagcctttgaagactacttctagagtggccaagttgataattttatttatttggcatatattttaatgcatttcacatagtttttagggattatttcataaatacccaaaatgatgatttattacatatttacgaatctacttttatatatatttttttaaaaaatatggagtattattttttcttgtttctaaatgaagttgttttgacgttattgctacaagaaagaaatgtgattttgttttacaacaatacaaagtgttatttttttattatttcataataatgttgtttcgacgttgctactacctacgggaaaacagaatgaaagtaatgtttttctcttaaaaaaacaagtaaaaacctgtaaaccaaaatctgtaaaaacgtaaataaataataaaaatatccgtaaaaatataaaaaaaaa

SEQ ID NO: 195970 - DNA, 859 bp, Cannabis indica
agtcaaatgttatagttatgtttaagaaatcaatttgtggcgagaggtgaagtctcctaaaaaaagttgaaaatagtcaacttaaattggtgcatgtctttcaaaaaaaaaattaggtgcatatggttatagcaaaatatctactattactagtattatttaatattattataatgtttaaattatccgattaattaaaatatttaataaaataatattaattgaatagattaagatatctgttagtttctctgttaatatcaacagaagcagaataaaaagagcatcattaaactaaaaattggtattaaataaccatttttaactataaagatacatgctttttgtttaaggactctcataactaagattattaatgtctacaatgacattatgttatatatataaatataaaatttttacatgaaaaatacaaattgacattgtaatgccctaacgagccgccatatgtgtgctttttattaattagtttataataataaactaacagtttaagaaaaacatggtttaattaaaacttttagtaaaattatataaattataacttaaacttttcattcaaaataccagtaggttcggggatcccctcagttacaaccttttactatgtactacaaaatcaattggttacaaattgttgatacatgttcaaaacataacaaaaagtaggagtgttcacatattagtttggtctgaattttcaattttttcaaaccaaaccactattatggtttttttaaaaatttaaaaccaaaccagaccaatgaaatgatcaaaccaaaccactcaaaaacggattagtttggttcgaaccgtggtttgtatttcgtagttgttc

SEQ ID NO: 195971 - DNA, 646 bp, Cannabis indica
tattttacagataatcatataaattaagtattgtttgaatatttacttataaatatatttaaatttttatagatattttcataatttttactataaaattataatattcagtattacatttaagttttattattattctaacttatttataattaataaattcaaatcttatcattattatcaataaatgataaggtttttcaatatatgtcctgttgtgcttttcggtcttgtcgtgtgtcgtgcctaatctatttgtgcttacgtgttgtgcgctttgtgttgtgtcgtgtttaaagacattattttttgtattgtgtcgtgccaatttgtagcatcgtgtcatgtcatgtccaagcctgtattttttcgtgcctagtcgtgctcgtgccatgtcaaaaagcctggcctgtatttacagcactacacacacatagtggtagattttgtgtgtttattacataccaaatagcaacagttttttgtatgtttcaaaaaatatttcattctacttttttaacaagcgtgtatatgttgtaattaattaagtttatttttaaattttttttgtaataatttatttattgaaaataaaattacatacaattatttactaaatagtacaataaaacataatatcgtatgc

SEQ ID NO: 195972 - DNA, 3428 bp, Cannabis indica
tacacctccctcttgagctcctccaccttggacttcttgttcttgatgtccttcttttagttatccgtcttctgtcacaagtttctcctccctgtctttttgctcttggcatcctcctcaagtttgttaagaagagtctggagactctccctctcatctttgaggatattaacctcttgggatagagaaacgttgttcgcctctagctgcgcggttgaaggcatatcttacagctccttagtcagcttgtcgaccttggtgttggcagaaagaagcttcttgtttatctcccaaagttctttcctaacaacctcgagctggttccgcgcatctttagcttccctcctggccaagtccatgtccctctgcatcgtgttggtagtgccaagattcttgacagcagctgatttggctcgggagtaagcataagccattttcatatcattttgcacagtaaatatgttaagatatgaattactcaaaggtgaatggataaaaaaggaagaaaaggattcacccgagtaactttctttagaaatcctcctaaaactagttccaaggataactcgctatctgcccttgatagctgttcgctcacttccagaagtgatcgagtcatttagtgctgaagcatgtctttgcctctcctggcctacatgcatagcgctagagttgtcgaaggggttcaaacttattcgaatctagccctggcttattcaaatccagtcctaacttgctcaacacgtccaaactccctcttcaagaacttttggacttcgtgaccttctgagttggagggtccacaagcgggtcgctcctcagagagatcaatgaccatgtcggtaggcaccttctccttggacaaaatctcaccacccctagacttcttggctggaggagacttctttagagcatggatcatcttttgagacatctctgcacagataaagcaatacggttagaagaaggaataaaatatgtgcaagcatgaaaattaaagaagataaatgcaagttgaaatactctgcacgctggcaggggcattctttcaaacaatcatagatagagcatcatcatctaaagagtcttctttccaccagaacggcttttcctttccccttcacaggggtcgatggctaagcaggcacaccaagttccctgatctaaatgccatgttctattggcgcttgctcggtcaggagagttttcttctttttgtgtggcctctttttctctgaatagtctttagcgtccttctcctgctctgaatattcttgagcatactacttggctccaacacctcccttcgacttagcctcacgcttcagttgaatgagctctttctcttgctcgacatcctcagctcggctcagctttcacttcttcttcttttccttcatgggctttggtaaaaatcccctagatagagtttttagttcacaaagttggcctcagtggtcaacaaggtgatattccgatcatcctccagcaattggagaattttttgccccctttccctaagccctagcgtgaaaggagggcagaaataggcaagaatctgctggaactgagtatggacagtctccatgccagtcacgaagtaatactcatccacaaaatgccctattttgctgactgcagggtctactgttccctttatcaacttatcgtccagctgggagtagtagaagtacccctacctactctgcttgggcgttgacttcaaataaaagagctagttagtgtcgtgcggagatggctcaccccatccttgagttgcatagaggatgaatagggcggataagtatttgatgcccttgggtgtgaactgggtcagaaaaaggtggtagtagtctgcaatccttttgaagtatgggtgcaaaggcatcatcgcaccttgctttgtgtgagcacccgaccaggcacaatatccctcccttggactagttgcccggtgatttggagaacggaggaagcactcgacactacccaagtatccatccttctccgaattccgtaactggacctcagttacgatggacggaggacacacccaccaagctataaaggcaccttgcctcctgtgagggaccgcctcggcatactcctgggtgacataatcttctccctctaccaagatgtcactgacatcgaacaccgactccccagccttattgtagcctccaaagcacagaggtcgagtagccccctcctcctcggcctcataaaggctatcaggaaggttgtcatcctgatcctctacctcctggaattcaacctcccattcgtagtcctcttcctcagcggcaaatttggcctattcagtgcttggcagcgcgacatgccgagccacgtgaggctcaacaccagcaatcttttgcatagtctgtttcgtgtgggcaatcatcctactcctggatggttgttggttggtatgtcattcaatagtcacgacaagaccagctataggaatgccaaaggcaccaaaacttgggcggcctacgggaacggtattagctacatttggctggacgatatatgtctagttagacagaagataacgtctccaccccttcctaagttcccaaataaatcccccatagccttctcctacgatttgctaggagtaaaaattgtgttgtacctcgggttttggagtgggtgtaccttcactactcacttcccagtcctcgaaactcgagttagaaagtctgtaactcgaagaggacggactggaacgaagacgaggttgatcctcgtacaaaggttgaagaagatcctggtccatatggtgttctcctcccaaaaactcatcggggttcatctacaaaagacaagacacaagatgagtatttggctgggatatcgaacaaaaataagaaaaatataccgaccaggtctaatcaaaagattaaaaagacagaaaatttgtatggattaggttcgtaaccaagaattttaaaaccttaaattaagggttaatctacactaaacctcgaatgagcaaagtgagaaccaaacatcgcaaagttaaagtcgaaatgccacaacaatcaagttatatgatctactacagtaaaagtttcaaagttctaaacctagattctttacagtttttctaaaacatgtcaagaactatagaattttctacaatggaaatccagaaaactaaagattcaagtataaacggatgagaaacttactcattgttcgaagccattaggttgcttcgatcacgctgatcggctcttttagctaattccccgaaggattcaagagagaaaagtgtttctttgctctgagattacttgagaaagatgctaaaagtagttatttaggattttctgtcatatttataggcagatcagtggaaagctgcaattaagggaaatttcaaacacctccatttccccccaaaagcaaatatt

SEQ ID NO: 195973 - DNA, 685 bp, Cannabis indica
ttgcctgagcttatgattttagtttttgattttttacttaatttatcttttagtttaaaattaaacctcaaatttacagttttaatggacataaaagtttctaccatagatgtagacgatgtattattgataattatgattaaaacttaaaatctttaacagaagagaactaatttgagattatacaagagtgcttactgattaatgttagttttaactttgtagttttaagaatttctttcatctttgactatggctacaaatatgcaatgtaaggatgtccaattttacatacatttatcatcataaactcaaaagagtttctcaaagtaataattttatttcgtacaaaatttaaaagtttaataacaaaaatgggtataaaattgggaaattttttaaaactggtttttatttatttacaatttgtaatttgtggtataaatatttaagtttaacactcacttacaaataaatagttaagtttgatttttagaggtaataatacctaaattatatttatggaactttgtaggtgtctggttgttaatgtcacgtgtcaatctttgattggtctaggttataaatttttaatttttttttaaaaaaattaatttatatacacaaataagaaaatagacacatggataatgatttgacatttaacgaccagatacctacagtg

SEQ ID NO: 195974 - DNA, 2037 bp, Cannabis indica
cttaaaaaaataattttttttaggggaagggtgcccattaaacagaaagaaaatcattgagattacaggagtcatcaccaatccaaaacgctacttcgtctaaccccgtagcccaagttgccaacttatgtgcgaaagtatttgctgtccagctgacatgtgagacataggcgtcggggaggagagacaaagctacgctaatttgattaattaggtcaccaaagcacgatagatcttcttcgggatgctctaaagaatccgagatagatttacaatctgtttccacacagtgaatggggaaggtttcttcaatacaccaatgcaaggaggcgaggagagacttggcttcaagtgtgggaatgtctcctccccctatataagaagaagctactgcagctaccaccaaaccgtcgctgttttggatgacaccaccaaagcccacttttgacgtattctaaggaattgcagcatcaacattcagctttgggcgaccaggatccggaggtatccaggatgagacctagggggtccagttcacttaagcatgaggtttttgagctgatactgatgatttgtaatccgtcagaaaacattgctctaggttcactatagcatgagactggtcctgtgattgtcctctgagagctctgttcctgctatgccaagtaagccaagcaacataaagaaagcattctacatcttccttgggtaaagtaacataaatcatgtaaataatatcatggaaagtaatagtacaaggagaagaaaaaatataatcgtaaaaaatcgtaccttttcagactcttcgaacactcttgcagaagaagagagcgtgagaaacaaattcgacatggtttccacaacgatcacaggccggggattggataattttcctaaatgccagatttctatgggttggaagggtagagttggaggctaagaaagaaaagtgttttaccttaggcgggatactaagatgccagaggtttttccaccaaggtgaaggggaggaagaagaagggatatcaggggggaggtggatgagagactaatatggtaaccagattttactgagtaaacaccagattttttgggctcccatatcaaagtatcactagagggttggagaggaagtggatggagaggatttcctagacaatgtgaagggggaaacagttcctaaggagagggagatcccaagtcatatcattcttaatgaaggaagccaccctgtcaggagcagggctagaaggggtgacctggcgatacccggaaatccaataatcaagggtagtgaaagtgttttgcccatttcaaattttagagatgagacctttgtgcagcaactcttttccccgaaaaatgctttgccaaacaaacgaggggagtgacccaaagagcaattgatgaaagaagagtttaggtagtacctggctgctaagatctttgctacagttgagtttggatgtttaagaatgtgccaagcttgttttgccagcaaagcctaattgaaatggaccaaggatcagaagccgagcccaccgtatttttttgacttacaaagcttttgccaactttgcgagtgagtcttaggacaattgttatcattaaagccacaccaaaaattggccataacggactcaagggagtgacaagtggcaacagggagacaaaaacaagccatggtataagtggggattgcttggataacagacttgagaagcgtttctttaccacctttcgagaagactttgtgcttccagttgttaagatggccccaaactttgtcgtggagatagtggaagacttgtttttcgttcgaccaatgtgctggggaagcccaaggtatttttcgaaggaggttctcacagggatctgcatgaagtctgagatgagggtttggtccttcaaggcaacactcggggagaaatagagggatgatttttggaagttgacttgttgccccgtggccctctcataaagatcgagaacctctttgatggtgttgcacgaattaatggaggcctgacagaaaag

SEQ ID NO: 195975 - DNA, 1130 bp, Cannabis indica
aatttatcatatattatcccacaaaatgcctcattaaaacctatcaaaaaaattaaaggaaaaattctaaacagaaaagggtagttaggctaaattggaagtgaaaaaatcactataatgtctcaaataaccaagtagtaaatgaatgaagtctggtagactagaaataatgtcatcagtgatgaaaactattattggactcaaacaccaacaatgaccttaataagtaagtttatcttgcatctcaagatacttctttctgatacagagtcctccaatccaatggcaatggagtaactcccacagttctcataacctcatttgtcattgaagataatattatctcatttcggaaaaaagaattgttgtgtctgtgaagtgatttaagattgtggatgcagtctggaattacccttaggaagaactgtcattatatttggctcatatagttttgatgatccaagtgattgagtgaagtaagactcttgaagcaatctggaagacattctagatcatcaatgtcttttagagctaaccttggaaagaggtgagaaagaagacgttgttgggaatacaaatccaacaatacttgtcatcatatgaaaatttgcaaatggcttccaactactcttctctatatgaaaatttgtttccaaatatgggtaaagtggcatgcaagtcagctttggacaacactctattttcaatgaagaaaatgaagggagatgaaggcaaagagatgagcttgtcttcatttgtatttgcaacagaagaagaatggtcaacttctttaccatcccttcagattaggcaaacataccaactcaagtgtttgcagagatgacttatattgttatagaactaagcaagtcttcactgatatcattagtgttcgatatgtactctaaacataccaacctctcaagttccaaatgcttcaaacagtgtaattgtttcaaagttaacttcactaggtttgtatgtgatgagagccagttggacagcttaacacccccaatctgcctcccaagttattcaatctcatcaatttctttagcttaatcccctaatccacatggcatatactccaattgaccacaataggaaatttcaagatgcctaaggttgat

SEQ ID NO: 195976 - DNA, 707 bp, Cannabis indica
tgactgagatttttgacaattaagtaattataccagtgaaaatgattagaaaagagtaaatgcaagtatttttacgtggttgggacattaataagccttagtgcacaagtcactagtatttaaaatggaggtgtttctttatagagaatattttactctatttttttcgatccccattctaaatgtggttgagggtatttatagctattttaagagaagaagaatgcctctactatctcaagcgttcaccttaactttgcacaagttcccaaattagcgaaatagactatgtgcgtctacatagtaggttacataaggtttaggtgagacaagtctttatcctttcttgattgatgtgataactcattatgtagtcgtcacttacatccttgattaacgcgtaatcgccaaagaatgggtttaatgcgtctgacatgtcttttcatattcgtctgtaacgtttcctccatgctgcatttaatgcttatgaatagttcatctctgggaccttgggcccggttaagctgggctttgtccagctccttgagatggatagaaggttgatcctttcggatcctgttatagctctatgaggagctctttgactatgtccacttaaattgtaaacctgtttaagatattcttgagcacctccgaatcttaagatataatttccacgtgtctagtcatagagttgccacgtatat

SEQ ID NO: 195977 - DNA, 895 bp, Cannabis indica
atgatgaaatacattaattatttttattatgtttatataaatgttatataataaacatatattttaaataaataaataatatcttgtaaaaaaataaagaaataaacaaaaaatagttgtataataaagataatgttttttaaaataaaatatttaattatgttgtataataaagataatgttatattatttttatttttgttatgttgtatattgtattttaattattaaaatttgttttgtgatttcgagatggtacaagtgttccacaaataacatctgttatagttcaactagtaatcgtagtcgcgctttgcgcggttatgtaatagagtaaatatgaattttaattgtgttttaaaaataagtagttttacattttaaaacaattttttttttacatttttacgaaattttacatggaaattcttattgcatctagcgttacaatttaaattgcaacaaaaaatcgtacaaaaacctgcaactagtggtgcaatcactttagaaactcaaactgtaaaatttaaaaaaaaaaaattaaaaaattaaaaaaataatatatgagggtaattcctctaaaaattattagtggttctttctatttaattaaattataatttagatataacacttcccaaaataaagtattataatcctaacattaaaactctctttctaaccttcaataacaattgtgatctgattacgctgagtcaaattcaatccaactacaaaaaattatacatctaattacaattgaattggatcggaagtgaataattgtatttaattgaattgaatctattggaagaaaccttcaaagtccaattaaaaatcaatctaatctgattatatgaaatacatattaagaatatattatatttattcatat

SEQ ID NO: 195978 - DNA, 943 bp, Cannabis indica
acaataatacttacaccatctttcaaaccttctttcggcccatctactttaatgcctaaaccaagagagactgcgccacaaattatgagaacaaggattttgacttgtagcaaggctcgccaaaaaaagaagacaaaagttctactcagtggattctcaggaatgttagcaccaaacgcaatgcgtctatgagcgacagtttcttcatcaattccattaactaggtcacttttgagatgtttagctatagcctcaacacctcctattctttcaagatgtgcttgccgatcttccttttcagtgagataatttagagtagtcaatatttgatcatcagtctcaagcacattatgatttggttcaacatcaacaacagtatcaagggaagaatatccaacttccttgtggcttttttgtttgacatagtcttgagaagctgattgaaatcttaaagccgagacacaaagagtgttagcaactcgcaataaatagctagtaccagtattatttgtctcttccttggatgtttcattcttctcttcttctaataattctgtaagctctatttcttcatggttcagagaactgctacttgacatggttactgagctcgacagcaagcaaactagaaatgtgcctctccccctaagagagtcatatgatttctggaaagaaacgaatagaaatgattactcattcatgtcttgctcaaacaatacaaacttaaaaaatgagccaaattaatcctactatattatggttatttagtatatttttttccccaaaactatgatctatgtattatagtactcttaattttttagggtgtaaaaagtagtccacaaactattcagagtgttgttaattggtcattttgtgaggttttatcacatgtgacaaacagaatgatactgtgactgtgtagacaattgtcacgtcaaca

SEQ ID NO: 195979 - DNA, 1137 bp, Cannabis indica
atatattttcaaattttagggtgggttttagccctgcctcaacactcctaagtacgcctaatgcaggggccatattttgaaatcccaaaaaatttagaagaaagttagaatggaatgattttgactgtcgatatatgagtaagaaaaaccttttcaaccgtcaggttactaatcctagtgatatattagataagtaatatatttcaacattatcataatagttgtgtcaaatgtcctttactaaaaagtcatcaaatatgtagttttctttatattgaaggccttaaattttcattctgtcaaaggcacaaagtaaatgttgagaaacaaaactagagttgtagcccaagttgaaatgtaaaatattctgagtagaagaagatgatataaggcataaatgataataatatttcaataaattagaaagattacatggccagaaagttatttagatattctgaagcactcaaggcttcttatcaccataaccaaactaaacccaataaataatatcaacttgtggaagtagctagaatgataaataatgtaactattgaataaaaatgcagacatttttgtactaaaaaatgcatatataggtaggctggtagagtagagaggactaatgcttgaaattccaatcaggcagaggttttcttgttgggttcaaacacatacttgataagtgaatccttgattgataacaactcagggaactcatttttcaacttagatgcatccatttcgttgttgctgcgaggtgcaacgatcaccttcgcctgttcttctagcgtgaaatttgaccactgaaaatttggatccatgtatttcttgtacatctccaggatctcattgtggctcacaacacctgggtttgtgaagttccaaatgcccctgcagttcctctttgccatctcaactgaaatgggaagtagctcatctaagatagtcatactgtttggaatgtcaaccactttgtcataacgtgtaatctttgtgatgaagttcctaggattgtttagatcagatgatatcggcattcgaactcttagggtgcaaacattgtcatattctttcaatagttcttccacctggcacaaaatagtaaacaagagaaaaattaactaactgctattc

SEQ ID NO: 195980 - DNA, 2397 bp, Cannabis indica
accaccgtgaaaatatatacatagaatagaaatatctccaaataaacatgcaccaaaacgacgtcggagtagtagcagcatatagagattacacaaaacgacaagcgttttgcataaacgaccacattgacatcctcatagaggtcctgaagcgactagacggggcctcgctgggcgtggccgcctgcgtgtgccgactctggtgcgctctcgctcgcaacgactcgctatgggaacacctctgctttcgccacgtgtcatctccgccgcctccgtcggtgcggcccgtggtggtggcgctgggcgggtacaagcggctgtacatggtctgcgtccgacccgtgctgagtcgactcggcggagactcgggcgttctccgtcgccgaatctggactcgggacgaggtccaactctctctctctctcttctgcgtcgactactacgagaggcttggtaagctcggcggcggtggcggtgatgcctctgcttcgtctctcatgttcctgtgcaagcctgtgaacgtttgatatgtttgactttttgtctgaactttgactgttgatgagatggcaataaaaattggaaatgaaataacatcgaccaatgtggctggcttgcagtaatagtagtagtgatattatttttttgttattgtatacatatatcaaatattctggaaaaagaaaatatttaataagggaaagtgatgacgtgattattcttttttcttcttttacttattattgatttattagttattttttttttgcaaagtagatttattagttatacctatttttgttaatttgtaaggaaaaaaataagaagtttggcacagttatattcatttttgttgtttttttttttccctgggtcttgtttctttttaagtggtagaaaactgagagggacgtatatgcacgggcggagccaaaatataaaattaggggagccaaactattttctaaatttaggtaataaatatttttaaaaaactttataatttaaattaaaatgcagaatttctttgttattataaattagaaggagtcatttacaacaacagagaaaatgacagaggggatttcctcgaaccacatacaatcattatccaacaccaatgcttgtttaaccaagccatgagcagcttggtttgcatctcttttaacatgagatacacaaacagagaagagataggataaacgatgtttaatatctaagactaaatcaccaaaataggaaatagcagcagattgacaattaatagcattaactaacaccagagaatcagattcaagatacttgatagaccagttgtgtgaggcagcccaatctaatcctgttagtaatgccttagcttccatttcttgcggattgtacctaccagtgagagattttgaataggcagcaataacttgacccaatgaattgcgaacaatcatgccaacaccaatcttgttacaggagacatcacaggctgcatctatgttcatttttaattcatgggagggaggactttgccatttagaaatagttgcagcaccagtagagactttaatggaattatgggaagaagcatgttgctgataattggaaaagtaagctacaaatttggcccaaagctgagatggagaaagaactggtttgccatgtatagaattattccgatcggtccataaaaaccacatggtacataatagttgttccatttcagtggtggttttaagggtagatagcaaaaccaaactgtcattaaactgcatctttgaaaccagatcataatcaagagagaaagctgccaattgccatacttttttagcatgcttacagagaaacatgcatgttctacagactcccaggcattcgaacaaaggctacaagctgcagagtcgattattttccgatggcacagagagacagcagtaggaatcgctcgatgaaaggccttccagacaaaattcaactttggatgggagtttcaagttccagaaatatttccaccaagtgctctaattcgtggaaggggtagacatatcagtttcttcaaggttaacagccagatgataccccgattgaacagtatactcactggtattagtgaagtgccatatccatcgatcagtaacattagaagtagatagaggaattgataggatgtactcaatgtcaacagctgagaaatctcgagtaagaagaggaagattccattctctatcggctgtaatgtaaaaagagactaaattttgaggatcacccgagtatcgaagaggggtgaactcagaatgccgaggtatccatggatcagaaagacatttgataccagaaccatccccaatttttaatcttaagcctttcacaagaagatcacgaccccaacaaataccttgccaagttaat

SEQ ID NO: 195981 - DNA, 611 bp, Cannabis indica
ctggattgagttgctaactaggtcgctatctataagacgtttacgtcactatctagaattgtgaaagcagactattagcctcatcgtccccaagatataaaacatcccagtcaaaccactgtatcagagctctattgcacgatagaaaatcgtcgaaataccacacccaacaaaacactattgctcgaaatacatattgtaatataatcgtatatttttatgtatttaattttttgttagaaaaagatatttttctcttgttggttctgatgcattagataaagagaaagtacaaaagatagtaacaggaagaaagacgttatctgatcatgggatcgtgagaacgatgctgaaaatcaggacgagaaaacgtctctgtttactaattagttaaaccggccggtttaaaaataattttaattaattaaataaaaatactaattaataaataaattttctctaaaaaataaggtacacaccataccagctcaactcggtcggactaacagtgcgtgtgtggtgttcaagtgaatttttgtgtgacttcttcctcttctacaaaaatggatatcccttggggtccaagctaattgctcatatctacactatat

SEQ ID NO: 195982 - DNA, 892 bp, Cannabis indica
agaccatgcctccaagtgaattttttagcagagtgattgagtggtaaatgattacctttattacaaaaaagaatagaaatgatgcatagcgtgtatgagaggaacagtggttgaacagataggtaataattgaaatcacatataattaaccaaggcgaaagaggggcatcatcatacaaccgattgaggagtttccaagtaacagatttttgatcaggataaggagagccatagtacccagtaaagtgcaatttcatatcattaaaattacttataatacaatcaacctgattataagagtaagtagtaatagttacatcaatgcaattgttccaaaaaagtaaaagccctccccctaaacctttcctaggcacttctaaaacattatcaaaatgaagcttgttttttaaataaagtccacggcctggctgcaacttagtctccataacaaaaaataaaacgggctgatgctgcttgaccagcaggcagagattacggaacgctcgaggactccctaaacctcgagcattccaactgcagagactcatttttctcagcggggttgcatcgagacacccgctgtttggtcatcatcacacaaagagggaaccactgcttaatcacttgaaactgctcttgctctcttgaggatgctacgaactgagtcaccaacttcagtagtttgcctagtgaaaggccgcctggttccagaggagggagcagaggaggaaattgtacatggttcattaatgatgaggctgtacttctgtggcaatgttgaaaagatggacggggtgggcaggattcagtcatagcaatacctttacctttgtcaatatgagtgatgatagaggtggtcatgatcggtggaggaatagtggagtgggtaaac

SEQ ID NO: 195983 - DNA, 456 bp, Cannabis indica
ttgtcatcagaaataatgaagatgcaagtgatcttagggagtaaatgagatttcaagtgagccagaacagggccccagcgcccaagttgagatggcattgggccctgcgccctggttaacatgcaacctggtttgcatgttttggctcctcaaacacaaatcctactatgggaagttttcttaaaaaggtcaaaaaaaaaaggtaaaagcctcattcataatctcaaatgtcatagaagtatcaaaatgagccccgagaaatactcaacgccaaggttgacatcttaacctggtccactgggtttcgcttattggaatctgattttgtttcgagcagtaaactaatttttcattgtaaaccagagctaaaacttatgataggtcaaattcaaactttaacatttcaccctttcaacaaggtggaatatatcaaaaaaattggggagtttcgagtct

SEQ ID NO: 195984 - DNA, 3162 bp, Cannabis indica
catcgtcaggctggctgacaagatcttgggcagtggtattctccctagggggttcgaatgcctccatttcatgaccttaagctatcatccatcaagaaagccaggcttcatattgatatgatcacccctaggattttgtttctagaactcgtagaaggttctgatggcaaagttgccatactcttccttctccatagtcgggtctgctctaactccgttagcattacctcagactcctgcttaagtttggcaatctcctcatcccaagcaaccaacaggaaacccaaggcatcattctctcctgtcaattccctcacccgcctcttagcatcctccaagtcctcctctaactttgcagtagagggcatgtcttcaatttgcctcttgagctcttttatctgattgtcggtagtgaatagctatttgttcacctcgccaacataggcctcctgatcgtcaatcttcttcttggtgacggcaccagtccccttgaggcaagcataagtagcccaaactttaaagtcacctgaatcaatgaagaagcaaaagttaggtggtgtactgcaatatacaaatacgcttctggtagaaaaatattacttaccaaggaaagctactctagaatactagaagctaagacttcaacagactcattttttgagtcttacaattgctcatctgcctggaccgggcacctgtccaagtagttatggacaacctcctttgccttctttgctcgggttggagtacttgcccagctagatttttggcattctttgcttgaccttctgggagtagaaggacgtccgtccaagctttttaccataggctggttggctaaaggggcatagggggtggcaaaggaagacctgaggtggtagaactcgacccagccttctaagaaactttggaaggggactcttcccaaggggcacatgtaggttttttcttgataaactaccctaacttagaagccatgtctgcaagaacacaaagtattcgttagaaaactaattttgaaagacataatttcagcataaagtaaagaattttcaccctctgcctgcccggaggcatcactctggggagggatgtacagaatgtcatcatcatcaaaagaagagtcttcactttcactgacaataccctgtaccttgccctcaacaactgatgcctaggttgtcgtgaccggttcagactcttagggcctcactcaaagactcagcccacgaaactctcttccgagcagctctctccctcttagtctcttttttcttcttaaaatgattattagagggagctacaaacttgacctctttcctcttggttcctaattttttcttctcagaaaggttatcaaatgaaccttgaggctttcccgtagaagggttgaggccatactttataaaattctctcttgtcgccaatttgtagatgttatgtctttaggcgagtaacaaaaggatgtgattggctctatccttgagctacgggtgggtattgatcagtcaaacgtgggaaccctcctgaaggaatgatgcacatccactgcaccatagaccataaaatagtcctaggcataaccaccaatctttgacatggcaaactcatttctgccacccaaccaaatgaagcccaactggctaaagtagaagtatcttgacccgccctggctcaggttggatttcaagtataaataccaattgctcctgaagagcaaaggttgcgaccaacccatctgtgcgtacgataggaagagggaagataaatacttgatccccatcagcatcaattgtgctggacatatcccgtaatagttggctatattctggaagtatgagtggagtgacatgatatccccctactcagcgtggcgaccagactacgccatccagctccttggaggggcatgtgccaggcattcttcacctagcaggtcagtgtcaaggcccctaactaaatttttagatacaaggtttttaaattttccttagtaagtgtcgatgggggagatacccaagtagtctctggttcccctatttgagccaagggctccaaagctggcaactcctcctcaacatgattcacccctagctgggatagcaattcagtctcgttcaaacactctctagcctcgttgtaaccccaaggggttgtttgtgcggacgtcacagtccctgactggcctccaaccaggttgagctccttccttaagctcagcaggcctctcaacctgattggccttagcagtttgctcccttgccatcaactcaacaatataggggttagtttaaggggccgcacaatatgtagtttgtccatgccaaatttggatcctagccggtatactatacaactatagtagctacttcagtctcaactggtgtcttcacaaaggaagacctacatcctttttgcagggagtctgggacacttggctggactatataagtccaagaagcttgaagaaatttcctccaacctcggttatgttcccaaatgaatcgacaatagatttctcttccaattttcttagagtgatagtggtgttggatttcaagttcaggaaaactactgttgacttccaagtcagatgaattgctcgaagaggtggcaaaagaatgagatgaagaaccacttgcccgaggtatatggatagatcatcaaagagaagctcaagtagatctgagtctatttggtgttcacctcgctattagtcgtgtaggttcatctgtgcaaaaagaaaggggtgaacatcaagacagcacaaagagtatccagattgtgtaaagagtattcagataacataaaactagccgaccaggggaaagaccttcggataggttggccagggttcctaacagatctaaaataacgtattctaccaaaagaagccattaaaaccctgttgcttcatgttcttcaaaacccaaagtccaaaatgaggaaaatagtgccaagacttaaccttttatgtctaaaaaccctatatttatctatcctattgtacatgtgcagccattgatgttgggttctctctaaacccaaggtatgaagattttgcatccaataatggcttaaaaggataaaaaattacaaaaataaagaattcttaaagaaaaagagaatggttaaagggacttactcactgaagcatcttga

SEQ ID NO: 195985 - DNA, 744 bp, Cannabis indica
agagagagagagtttgagaaaagctgttgagagagtaaagaaagatagaagtgagttcttgaggactgtaatggtgtgatacatttctaatcatcatcaccactagtgaggctgtctgtaacaaaagcaaaccttcttgagttgtacagttgattcacttgtaatcctctcttcttcatcaactaataaagactctcaaagccaactagggatgtagataaggtgaatcaccatcatcttgttcgaatctcataaagtttgtgtgttcattgtgtttgattaactttgcttttcattgattattgctgcattcaatccactcaaactctaattggtttcattgttaaaattcttgtgttgaatgttcttgttaaattgttgttttcacaacaattaattttaaaagtcataactacaagacccaactcgtctaaactcgtagttgcgtctaaaaggcatgtgctcgcgaattctttgatatccaagtatttttctacttcgaccttgcttaatagaacgcgcataacttttacatataaccttgaatattcaaataaattaatttaagatgcattggaaagttgagaaagagatctaaaacttttatgttttaactttctccaaaatctgatcaaaacataattgaattaggcttggagtatcaacttttatttttcatgaatttttttaatacaaaatacaccagtataacaaatttaacactaagactaaacaaaaatgaat

SEQ ID NO: 195986 - DNA, 636 bp, Cannabis indica
gtacagaatataaaaacttaatataaaaaaattatatgtggtattagtgttctttcaaacacttctagtactactacaaacaaacctttagaagcagtttttttaactgattaataaaaaataaactaaaacaattaagacttatttttgggttcccgtccattaaatattgacatttaatggcaattatattataaaaactatagttatagagtatacctaatttatatagctacattttttttttcttttagtcgtggttgatattgggaaatcaagatttacacctaatgtgtgtcatttatgtcatcggttatttgctaataactgacgacatagggtgttaaaaccctaataagtgcattcgtctcttcattttcttcattttttagcagcaccaaaccacgaacctctcgctgtccaccaccaaatacaacccccatttcatcatttgtcaccgttttcactcatttttttaaaatcttttattttcatacccaaaaatatgtccctagtatttgatcgttcttttcttagttttttagtgtaaagcaagcttagaagtggtggttgtggtagttgtagctctgatcatcagatttggtgtagaatcattgaatctcaacatcagttaag

SEQ ID NO: 195987 - DNA, 2332 bp, Cannabis indica
aaatcaatatttagtaatttaatattttagtaataattcatcatagatatcattaactatattctctaagaatatctaatatctaataattactactattatccatattcctagatgcccgatacgtggtaatcacgaaaaggtgccacgacagatcatgcgcgcatttaccttccacctctcaccatcatggaagatattatattcaaggagttacttgaaggttttccatatcagtgaggacgaaaaagaatttcaagactcccactactaatcaactattaaaaagtatcagaagctataggtattcctagagggtagctggttagtctgattaaagaaggctattgccagatggtcctagaatctaattggatgcatcttactcggagctcaaggcgacagttacatatcttctgacacccaatcagatcttgtcccctatgtcagaccctggcagtgcgcgtacgtacctctaaagctcctttttgtccaacgacttggctagacaagaactttgcaagatgaatcctttgggcgacacatgtccctatccccacaaaattccttgcaacagctggacaccataagatgagaaggcttcctaccaaccaacagtcaagtcaccattttgtagtaccagccattgtagcgtgttgaatacaaaaccctaggtgggtgaaggatatgtcctcccccacatacatgcctatcaatacccttatttttcatgtccaaagggtgaacaatttcatacttacaaaacctctgccaaaattcctattagctttcttcttaaagagagaaacaataagaaaaaagagttagggtttatattgtaaatacttgtaatatttaaacactcgttggcgaggctaatataacggactcgtggactagggattattaatgcctaaccacgtaaaaattacttatctattatttatctatttatatctttcttaagctttatttagttcgaaaatctcagtaaacaatctggtactttcattaagagctgaggaaagttgttacttaccgcaccacttcaaccatggtgaatatatgaaggaatgtaagcaagaaaactccattggacaccgttatggaagaggcagactccctcacctctagtctcaagctagaatgtgtaaaagaagaaaatacgaccaatgctgagaattgaagggaggatgccgagaacgtgtttgatggcattgaacgtgacaaaaaccctaaagacagggaagaggaggacgatggagatggctatgtgaaagacagttattataaagatggttattactatgaccatgagttgaacttgcaacgagtaaccaaagagatagaagctactcagatagagttggtagagaagaggaggcttactatgaagatgacaagaatgatggagtgcctccaaaacaagttcaaagacttggcgaaatccgacaatgaccttttggtggaagtaatgggcgaagaacgtgctcgtaggcaaacagaggccaaaacctcgaatccatgcacagataaaggtaaatgaaaggtagatgagctcccataaaagtatgctcccaaaccttcttaaaaagatacaaatctggttggtcagctcttgaggacacagaaggccacaagtgctttcaagcctggatgcccttctgatcttagaagaaaagttgtgccaaaggggcaaaatactagagtacctaagcctaagggaacgaaccaccccaaaaattctatcaaccaggacagaaggatgaccatgggacattctaaggacactttgtccaatacagacctctaacgatgattagacgccaagtacgagaagtctaagagcgaaaaggcaaggcctcctgggggtaaccataggaaccatttaagcagtaaaatgaggggactacgattgacactaagaggatggagaagaaaatagctgctctaaccaagttggtcaaaaaatacaatggagccctctcagattcagaagatgaggatccagaactatgtgtaaggaggatcgtggagaccccactcccgaaaaactttaaaatgccccacattcagttttaggagggaataactgatctgcgagcacacatgacaaagttaaacaaaatgaggcatgttgcccaagttaatgatgatgctaagtgcttatgttttttcctaacgctaacaaagtctacagaagattagtggaagtgactagctacaggatcaattgacatttggaaggacttacaataagccttcaacaaacaatttatcatcacatgtcacagggacatggaagtcggctctctacatttgttaaacagta

SEQ ID NO: 195988 - DNA, 1004 bp, Cannabis indica
aagcctaaaggcttttattcaaaagaggatggaggtcactgctaagaccaaggtcaacaatgatgtgaaattaatggccctccaattgggattggttgttggctctttactgtgggagagatgcagagaaagagggcagaaactttgagttagctcattaacttggaggatgccttttcacatgcgcggatagcatttacctatttatatctttcttaaaaattacttgtctattatttatctatttatacctttcttaagctctaattagtcggtccttgaaaatctcgataaacaactactttatcatattatttaaattcaatcacatcgaaattcatttttctaaacattctcatataccttttgtaatatttgagaaacttaattatggaaaattaagatttattaaatattatagattaattatgtagtaatgagtaggattatgatcctgctaacataatttagaatatattttaaattttgtcattagttgataaataaacgttatttaataattacaaagatttatttgaaatgtgttgatataacgtaagttatttgtgagataaaaatatttttaggtttggcgaccctagacacctaattggaggccaaaagtgttgcaacagtattagttagaaatagttgggattttagtataagttgggtttaaaaataccgaggtattttactatactcaaagttgacaaaatacctaagaagtagagatttcttagtgactgagaaatgataagataattattaataataaaatttttattaatattattataactgttgttattatatattattattattaattttttatataaaacttatttgatcgataagttatagatatattatcaagtttttgaaagataacagaagaataaagtcaaaatgctctgccggtgcaacgaaacttacctttccttatctatttctttgatttttaacccaaaacgtagtaattcaagcttcgatagttttag

SEQ ID NO: 195989 - DNA, 684 bp, Cannabis indica
ctctctctctctctctctctctctctctctctctctctcttgctatttcttggtaaaaggggcagcgacaacaagaggcaacggcgacggcagaccagttgcagtatttaggtactatttcatgtgtttattagttggttttcattacaaatatcaagtttatcaattttaagtttggtgtatttggagctttttctaagtttcttattagattttgttactttttatctacatctaaatgcttttaagggcttgatacgattaggctctttctaatcatggtcaccttttccacgatggttgcatctgtgtcgaatattacaacttgctcttgattaaaggatgaagccttagactatagcagtaatttcttctataaaacgtttagttcaaacttttgatttgggtgggtaagtactctaaattaataatttcatatatatattaatcatatttctaagaaacatacgaaatttgtcgaacaataataaaaagtaaaatatgttttggacattttggcttgttgttgggtatagtgcaatgataaagctatggcttttgatttttctttttttcctttctttgtgccattcgtgattttgaacccctgcctaacagtcttttgattttgacttcacttatagtgtatattttttatttcaatttcaaccttatccttggcta

SEQ ID NO: 195990 - DNA, 775 bp, Cannabis indica
gaaattaaatttaaacccattaatacatgttaaatcttctgaacagcataacatgttgtcatttgccaataaaataagtgaaaagaagtcaatttagtacatcctttcccttaaaggggatcaaatatagataggcataagcatatatgacagccttttataaccctggtggcattaaaaccaaacatcacaagcaaaaagttctagagtataaaaccaggaaaaatgacataatgggtagtcatcaaataaaaaacattaacatttgatttgaggaaaaaaaacaaagtaattgaacaaagaatcacatatcaaagtccacaaaacattcaaaatagctatctttgtgtgttaaatattaaattccaatgcctaaataattttgcagcaattaaaaacacaaacaagtattaagtcaaataacactaaccgaatcagggtattgtatggttcgataacagcgaccacttttggcctcccagaaccgaatagtgtgatcatagctagcagtagcaagtatgaccgagggttgggtcatcttttaagttattccaaccaaacctagaaaaggaatcataaaacaaaattatgcaaggaatttagttgaatattcgaaagcataagatgttttcagagaaatctgggtgtccatggatgtgagtttgggagaattagggtgttgaagttgatgggttttagagagctccgacatgaaagaagcttcgttgaatcacttccttttaggtctctaatcaataaaattaaaataataaaa

SEQ ID NO: 195991 - DNA, 542 bp, Cannabis indica
attgcttctctgagtatgcccttaattagcaagataggttgaattgtgaagtggcacatgttcgtttctagacaaaagcgatgcgtaattttgctcatggtttggataattttgaatcaactttagttggaactgagattcatagggatgctttggttgaggcggctagagttagagagacctagggcatggaggagaatgtgaatagtctacttagagtgtaaagcaagccacgatagaaggcatggctcttgcttagggtccgactctggtagagggataggataagatggtcatagtgaaacttttccctacgcgcatggcacagaaggacaatcattggtagtggagcaagagaaaaacgtgtttcacgtaaggagtggtggtcccaacaacatttcaaatttcggagataagggtaaatggatttctgaggtggacaatcaacaagtggatcattttgttatggtcttccaaggctctttggaccctaatgctaaatcggcccataaaaaatcaaggccctttcttaaagggggaga

SEQ ID NO: 195992 - DNA, 3548 bp, Cannabis indica
gagtaggatcagtgcctaaatatatagtttcgttcttatgaataaaagtaaagcgaggtaaaaattcaaccgaaatcagtcatatatatataaactctcttacgtttctaaagtagatgctaatcttcaattagtcatgatcacacgatggatcgtgttcatgaggaatcctttatttatttattgctaatgtacactaatgctgcagtccctttcattagaccacatataataagatctcaatgaccaaataagttcccaacaattttcttaaagcaatacttgagattctaattagtcttcacaaaggagaaattttcagggatctcaattcatgcctagaggtgaaaaaaatagtcttgctacatccctttctgcgttaaacagagattttcaagcatgtacagttaaaaacgtgtgaacataacaacagttctcatataagcaaacgatacccagaaaagttgaatgaaaacagagaggcaattcaatctcacgtgagtacataactacacattacaaagtggaaaaagcaactgtatcactgaaagttgtctaagcatttttttactactataccacactatggacaatacgataaatctctcggtatgtattggttacaaaagttaccagatatagataatttaccaaaattaagctaccagagtttttttcttctcataaaaaaaatacacatttcgagttgcctgcccaaaagtgcagggccatttctacatattcatttaattaacctttaaaacgatgcttatatccacattccaagttccattttccttccctcatttctggattatgaacaacctgccaagcacatgattgtacaagaaaaaaatcagacaataaaggataggaaaagaattagcaggtaacaaagccaattgagagaccactatattgcaaggacttaaaactcatggtctaactgaagaaaaatacataacaatttataaggtttgtagacacaagtcaaggcttccagtgatgcccactaaaatccattcatgtgtgcttcttcagaagaaaagataataataataataataataatcataataagtaattctagatatgtgtattttaccacaatggaaaatgaaatatttttacgcatcatttgagcatgtttgagtgagctctgaactcagcatatggtgaagaagcatgtcaactctttggctccgagtctttgtgctgcacggaatcaaattaattagtttagcattgatgatgtctgacttctagaataggtgagtaacaacattgtttgatgacaactagttggaaatacatacccaagtgatcgacgtccttttcttgaatccgattcctatattaatgtaaattacagcaaataaatgaatcacagcgcaaaaatattaataaaaaaaattgaagacaagtttgttaccaaaaagaaataaggtatcctttcacagaaagtcactagtaattttgaatttattgaaagaaagttcagaaatacaaacctcttcttgtccttcacatctttctgatgtttcaatatctatttcagcaaagaaagcctccaaaacaaatgctacaacctgtattatttcaaaacagcagaagttaattttccttagttttcagaggagaaataagatacatgcattagtaaaaccatttttatttagggctaaataaagaagagttcattttcagtgtctcctaaaagaatacagctgttatctgagttatttttatttagtttttagagtagaaaccacgaaataaacacaagaaaagtcatttatttagatcataaggaccaagtaatgagaaaagttcaagatcttctaaagaatagtcatttggatactgttttgaaataatttttctccacaaccccgcctcctaaagagaaaaatgactatctagtccatgaactgaaaggcctaactggagtgatcgtcctaactgagcaaagccgacaaatttgatcatataaacttacaactattttctattttgtattgcaggactaggtttggtaacaagaaaatcttagagaagcttgcacattttatcagaaatacatatgattctcagtgaacattaaaaatctggtactggtacgcataactgtgatttatggctattgaatatgctaaacattgtcatcctcttttcagccaaattcttagaccgttaatagatagcagggaaaacttacaggtccagatgtgcatgtgttgttatagagagtgatgatggatgttaaaacacattattaccaaaagcatattgtcaattagagtagtaaaaaatagtgtagatcaaattgttagattgactatattctgttgtctctgaaacacgtgtaaaacataatggaaaacaaagataaatatttaaaaaacataaaacagtttaccaaattcagtagcagcaagatagtaattaggtagaaactgatgaagtatacaagtgaccaagaagtgcctgttaaatccctgtaactctgaaatgataaaacaacacaaaattagtgacttcagcattaattagagtctattcactttaagagaaagtttttaggaaaacatggtaacatgtgcagtacttttgatacaaaaactctgtcaaaactctcaacgtagtgtaatatgttggtcaaaataccgactttctcatccatcaaatccaacaatgtcttctgtaaaacaagttcctagacctatcatcatttgtgcattgtgctctaaagctacctcatctacttaaaagagactagcgtggactgttacaactaattaacttagaagatagatgataataagaataaaaggtgactagcaacaagacaggacatgggatgaaaagtaacaataatttagtacgatttaacacgagattacctgcatccacacttgccaatttcccatgactagcaaattgaagagtgtcaccatcccatttggataatcattgaagttgaagagtaaatagctgattttgtcaagaaatggcattttattcacatttatcattgcagggaaacttttttgggagaaatataaaaaataaacagataattagattattatacagtaaatgaaaacttaatattaaatccaagtatttattagtatcaagttgtttgtttgatcatggactaatgagattgatgatctagtgttcattttttgctcacatttcatcacccattacttctgattctgatggactaaggaaatttaagatacttttttccccctaagctttcacatttacattaatcttattcattgcaatgatcagcatgtcctccatttttgtattttgtaatcatattttttttcagcagctagttacaataccaaaaacgagactaataaaaaaatttctccaatcacagaggatactcatcttcagcaagttctgttccctccaacttaggatttccaacattaacaattcccccaaagacctacaaacaagaaacatataaaatagagggtgtggtacaagataagcaccaaaaccaacaggtaaggagtgca

SEQ ID NO: 195993 - DNA, 738 bp, Cannabis indica
ccttcctttgtttatagctgtgaaaaaatctctttaatttagatttcacatgaaatagcccaattaagtctaaccaaaagggccaaagtctccacttgtaatacagagatactacctgaaaatataacaaaccaaaaaacaccacaataaaaaactataagtaaaaactatagacaaaaactagcacgagaaaacgcatcccaaataaacgataaaaccaaataaactatagtctttgtgtgtgattttatataggcataattatgattttttccttttttttccatccatccaaagatgaaattatttattttggtgggcaagatctctatcctatctttgttgccaaacaatccatttttcactttttacccaactatttcgaagttaaatatcttacaaataagagtgttaataaaattggaaattaggcaagactgaagataagcaacatcacaattttttagtgtaaagctgctaaacaatttggtgggtgagatattatataaatatatatattattattctttgcagaaaggtgagaaattatatttagttggctttattttgtaacatacaccacattttttttaagaaaaatagtcacattaaaatttgtttgtaactagaagtgaatggaaaaagaaaattgtaaccaatacttgtgttctcatcaaaatatttgtggctaaaagtataattttttatgcataaatgttttttttcaaaaaaatatat

SEQ ID NO: 195994 - DNA, 933 bp, Cannabis indica
tgtgtaactagtaaacattaggagttcatatgtaattaccgactttcaaacacacactcaaatcaatggtatgagatgagatagactattgacattcttatgcaaagtaatcagttatttttactcatcttaaatggttattaataacatgaatatatgatccaacaatttatcatgtttaacaactcatctataagaataaacatgagaaaagttgtaacataaatttgtgctgaaaaaccaagttttcattaagtaaactaaagctaatataatcaccaacaaagaaaaaaactattaaaaaacccaattctcaaacatgatcaaaaaccccatttcagaaatcagaaagcttgagcagaattcaaatttagaaaagaagaataaaaacaaaaacaagagcagggtgtaaagagattaattaagagtcataataacaccattcaaaataacttctttgtcaaatcctaaagctttcttagatatgtcatgagcacaaacatttcattctctaggaacataacaaaggaaacattaggaaatttagacaaagaaagagatacattataaattaaatctgccaaagatgatttatcattccaattacacttcaccttattaacaacaacttgacaattggtctccaccaaagcaataaatgtattcttcatcttgttttacacttaatttttatttttattcttcacccttttcttaaccactattttacataattgccattaaaaaactcaaacaaaaaaaacataataatatattatgtgataatattagatttactgagagtcacaccttactctcacagtcataaaataagacacatggagcccaaaatatcatggtagcttgaaacaaaatcaaacagaacagcatgaaaacaatcagcgaataaatcaacagttaggaaaatgaatg

SEQ ID NO: 195995 - DNA, 1303 bp, Cannabis indica
attcaacttgcgttttgaagctttttcaattctctatcatgttatgtctcatacttcaattgcggttctaaagctatcggcctcaaattttaccccaagtgagttatgaaaataagctcatgcttatccagagcgggtctcgctgtcacgacctgcactccaaaaattaaagatcaacttcagaagttgattttcacagttagatcatcatctacggttaaaaataaccaacttgtattttccctctatttttgtgggcctccttcaccaataaaataagagctcccttagttcatttttcaaattcagaaaactacctataaggtcagagcttctctctctaaaaattgaagctttaacacttagcctttttctataataccatctcatgagaaataaaaactcgaagtagacatagtttcattactgtgcaatacagggagtgaactactataaattgatgtgtctctctttactttacttaacaaatattttattctcgccaatctagcaagcgagtgggacttggaagttagtgtctagatttccgagtcaacaagtatttaccctaaaaactattagaaatttctgtagtagacctccctaaagggccgttctaataaaactcaaactattttggcatctagaaaattttttgtctatattttttcgtgatcgcgcacgttgtagctatttaggaccacttgtatagttacaatgtcgatcagaaaatttcgaacagcttataatgttgaaaataacatttcaacagttatttaccgtgcgtataagaaaaaacaaaattgcgcgttcaataaaatttataaattttattttcgatattgtaaattatttagaattttttaaaattttatatgtaatcttaaataatatatacgatcataacaaaaattaaattaaaattttttcttaaatattaaaatagataaagagtttactaaaataccccttcaaaaagtatatggtagacttacccataactattaattattggtaataatgcatgtaattttggagcccttttattatttataaaagagaagaagcatttccttgaaaaaaaaaaacagaggggcaaaaaggggatatgagaaaggaaagtagtcataatcaaatgaatgacccattatgtctcctcagaagtggatcttcgcacgttatttcagaaaaaagaaagaaagtattttgatgtgaagaatgacactattactaactactactacttactatctatactatacttatgctactctcatcagaaaaagaaaaataataataaaaa

SEQ ID NO: 195996 - DNA, 605 bp, Cannabis indica
aagagtttttttttttattattttagttttttttttttataaaaacaatacaaaaacaaaaagaaaactacataaaagtaaacaaaaaataatattcaaacaatatcaaaacaacaacaaaaaataacattttagataacaaaagattatttttataattttttatttattttatctctaatttatttggtgaaatgtttgggttttcttatatatatatgatcagtaaactaaatataccggaaaaattgtcaataaattttctatttcgcaagagaaaccagttctgaatttgtagagaaaacgtcaaactaaaaaaaaaaaaacaaataattaatcctccacttctttatctcttatcactttaaagatttggttgttaaactttatatttaatccatatgtcttactatatatagatccataataattaggctatgccactccatcttccctctggacacagaacattaacacaacaatacttattaaatatctataattattcatcaatataatttctattttggaaaaaacaaaaatcacacatactcaaagttgttacacataccaatatgaaaatatttttttagttttttttcttc

SEQ ID NO: 195997 - DNA, 2467 bp, Cannabis indica
gatacttaattgaaccaatatcagtattgatatataggaaggtgttaggtactactggtaccctttaacatttctctattaaattacattatgctaaacccaatacttaagtactatgtagtatgcaccaccaatgttgtttagcattttttgatagaaactaatagtgtccaacaccttttatagatagtaccttacaattaaattaaccatatttttttttaaatttatacgagactcgataattaattatattaatagtatcttttaatattttttggtaatatatttaaaataataaataatttgaatattattataagttttgtcctttacataaattttttcttacatctgagtcctttctcacagtctctttctctcttttatatcacattcacacacacactcgtcacaaccattttcactataaaacacacaacacaactcaacttctctctcttcttctctttctctctctacaaacctcaaaactcagaccacaaacatggctacacagagatgaagatgaagatgaagatgaagaacaacaacaatactactgattatcacagtcattgaatagctttacctacctactttctatgttgttgttgagtttctacaagttcttactctgtacaaagactcagagcttttctcattttttgaggtatttatcacaagactcaccccttgcctctgccataaaaggtcagtttttgatgtttagtgttttggatttttgttttattgtttttgattttcattttgagttttcttcttcgttttctctgtttgtctctttcctattcttgatgataactcaaaaaacaaaggtagaaagggatagtacaagatgagatgatgatttttttttctctttctatatctatatattattattattatgtatatatttgttttcgaatttcgagcttaatcttttttgttttcatgtgcaatgtgtcttcaggttctaatctacacatatacacagtttcgtagctcggcaaaattccagatggtgaaatgcccttttatgatcaacggtttgatctctctcgcttaactcgccacaaccatcaccaccgactctctcactattttcatttaatcgtcttcttcttcttcttctgataatgataatgggtatagacctttcgtcggcggcggaaataaatgaaacgtttccaattttggaactcgcttcaattggcagcaatctcactttagttctagttttcctattcatcgtctccgctaggaagatttttgtatgtgcaggtcgaattcggtttcttaaggatgatttaactccgaatggtggtagtagtccaattcagaggaatagtggagttgacggagaaattggagatgttaggatcggtactgagttcaaaatcaccgtttgttgttgtttttatgtgttgtttgttcaggttgtggtgctagggtttgatggtgttggtttaataaaagaatctttgaatgaagagcttgtgaattggtctgtgatttggttaccagctgcacaaagcttagcttggtttgtattgagcttttcagctctgcattgtaaattcaaggtgtctgagaaatttccattgttgttaaggctatggtggtttgtatcgtttgtgatatgtttatgtacgttatactttgatgctagaggttttctagttgatgatggctcaaaatctctgccttcttctcatgctgtggctaatttggcctcaacaccagctctagcttttctttgtttcattgctatcagaggcagtacaggtaataatcaaagctctctcttttaattccttagttcaactttagcaaagaagaaaattcctttgttcaaatttcattgctgaatcaagacaaattatcataaaagttaaaaataaccatatattaaataatgtaaaattcataaaataaaaaaaaaaaaaaaaagaaaaagaataatgtaacgtgttgtgataaattcccattgttgtttttgtgatacgtttatatgtatacaggtattcaagtttgtagaaactcagagcttcaggagcctttactcatggaagaagaagcagggtgtcttaaggttactccttatagcgatgctgggctgtttagcttggccacactttcatggctgaaccctcttctttcaattggagctaagagacctctggagcttaaggaccattcccctccttgcaacgaaagatcgagccaagactaattataaagtcttgaactcgaattgggagaaaatgaaggctgaacatccaacaggacatccatctttagcatgggcaattctcaagtcattttggaaggaagcagcttgcaatgctgtcttcgccggcttgaatactctcgtttcttatgtgggtcctttcatgattagcttattttgttgattatttgggtgggtaaagagactgttcctcatgaagggtacatcctt

SEQ ID NO: 195998 - DNA, 1028 bp, Cannabis indica
caagctgaggaggaatttctccattcatttgtgtgtaagatagattgaggtaccttagttgagtaagagcaccaatgaaagttgggatttggttcccttgaaaatcaacaaaactgaggtccaaataagtaagaaatttcaactcaagaagccaactactgatgttacctcgcagaaaccgatcttcttcttcgtagaaaagccgaggaggcaatctatttgttgaaggagaaagatcaagagcagtgacatgacctcctgattcattggaacactgaacaccataccagtcacaacagtctgtgttttctttctcccatgatgaaagaaagccatccttgatttgataaagttgttgtttgaacttgaggagtgcttgtctttcatggtcgatgcacctcatgatttttgcttctccaactgatcctgcaatgtaattcacaccatggacacctctcaagaaagtccaaaacatcaccagaataacaatttgaggagctaatctattcattatagatggaccttgttcagtgaattcaattgatcaattcgcttctctctcactaataaagtattaaataaaaaatctaaagcatgattgattacattcatttatagtcgagcattgctattgggcactggtagtgcctagtgtcacgggctcaccttttcaggcagcggaacacccgtgcggcaccttgacttctctaagccaaggtcagccttccaaccatccgagtaacaatgggctcatttttcgcgcgaccgtgtgcctcgggcacactcccgtctctcgaacaactcccgccgagtcatgctcgcaagcatccatgagtgcattcatgtaccgagactctctagccaagatactcgcactgtccataggttcccaccatggtcagacaaatcccaacaccgacgctcaccttgtcactcgtgaccaaggtagcatgtgtggcgagatgccaacaccaagccaacgtgccaacgcctctatcatgccccattcgatactgtccgaatagtct

SEQ ID NO: 195999 - DNA, 960 bp, Cannabis indica
cttatatagaaaagcagaacaacacaagtattcttcattaattttttatagttcttctctttcttatttagaggggaaaaaactcttctcaaaccctgatcttcagtgcttacacagtctttcacctgcatttttatcttacacagtccaagtctcgggttcgagtctcaagtttgggtctcaagtccaggtctcgggttcgggtctaggtcccaagttcgggtcttgggcctcaggtttgggtactgggcccggatgtgggtctgagtccaagtccgggcttgggtacgggtctgggtctcgagtttcagtctagatcttccagttcggggtcagggtctgggtccaggtccaagttcgggtctgaatcttaggttagggttcgggtcctgagtccaaggttcgggtctaggcccctggtcccgggtctgagtccgagtttgggttcggctctaggtctcggtataggtctggctccgagtctcggtatgggtccagctctgggtcccgagtccgagtttaggttcgggtctaggtccgagtccatgtcccaaaactcgggtctcaagtttgggttcgggtccagattcaggtttggatttgggttcaggtaagattcgggtttgggtttcggaacgggtctaggtctcaagtctcgggtttgggtgtccggttcccagattcaggtctgtgtcccgtgtcccgatcctgggtctaggttcgagtctaggtccaggtttggattcaggtcccgagtccgagtcccgagtcttagggggtctaagtccgagtcatgaattaacttttttctaatatattaaaacttgattatatcaaattcgatttgaaaaaaaaaaaggtggggcgaagcgaatttgattagagatccaatactgaatgttttggatcattagtgattcgtcggattgaagcttcgacccgatccaactaaatagatct

SEQ ID NO: 196000 - DNA, 885 bp, Cannabis indica
ccgattgcgctctgtccatatcgtccaaagtgagcaaaagatttgctccatttcagcttttgagtatattgtggagagatgaagtatgtaatctcctttgtacatggcagcagagaggcgccaatcaaaaaccagattggaatgatgccacacagccttggcatacttgcaagagaagagggcatgtcccaccgattcccaagcttgtttacaaaccgagcaagtagaatccgtgattactttccttttcacaagggaggttgcaaccggaagggcatcatgtatagctctccaagcaaatattttcaccttcggtgggagttgcaatgaccaaaagaatttccaccaatgagagtctctattagagcttgaactttgatcaattatatcaatgtcagcagcaagatgatatcccgatttaacggtgtaaaggccagagctatgatggtgccatatgagaacatctctgctgctaaaaaaactcagaggcacagataaaattctttccacatccaaagctgaaaaaaactgttgaagtaaaggtaaatcccattgacgctcatcagtaatcaaattagaaacaaccccattcgacggcccagagtaatgaaagggcagaaaagtattgtgacctggtatccatgggtcagaacctgattggatatgtcggccatcacctactttccatcgcaaacccttaatgagaagctcacgagcccagtggattccttgccatgtgagagagggagaatgacccaaggatgcttcaagaaaattattgtttgggaagtacctgctcttcaggattcggccaagaagagaatgtggcttttcaaaaatgcgccatgcttgtttagctaataacgcctggttgaagtggatgaa

SEQ ID NO: 196001 - DNA, 707 bp, Cannabis indica
caaagaaccaaatcaattgttacgtaagaatacaaaaaacgagaataagcatctgtccaaatattctcagagatgccactcataacagaagtagctagcacatgggcaacgccattcacagactacaaaataacattacaagaaccaccaccaccagtagctaacaaattacaaacttaaaaaataattgactgatagacaacattaccactttgtttattaatccagttgacaaccactgttgaataaatatcaacccacgacagttgaaacccaaacctaatggccaattccaagccaagtcgaacagcaaggacctcagccacaggaaccgcaaaatcaccaacagctccaactgcccaagcagcctacacattcctcgaaccagctcgaacaacaccacccatcccgacaagcctctacctgtgaccactgcaacatctgtagccagagaaaaacccgaaaccggttgcaaccacctagcagagctcttcaagattggctcagctgccacttgaaagaaacctttaactctatgatcttgaaactcagacaatgcagcaagtgcaagctctaaaaacactacaacatgcgagagagaactgccaaaaggcactgaattcttgtcaaaacaaacccaccaaaacatcatcaaagcacgcccaaactcttctcgtgacagcatctctgataaccttcgtaacacc

SEQ ID NO: 196002 - DNA, 1873 bp, Cannabis indica
tggatgatgcccacccctagtagcatatatttcacttatttttaaaaagttataaatagtatctagtactgaaaatagagttaaaaaacgttcacttacagatcatgaatgcaatttactatttcgaaaattatttccaatataataaattatttaaaaaatctcaaaaaaaaaacagaaaagatataaaagaaaattaggttatattactctctaactgttgaaaacatagagatactcccctagtatgtggatataattaatgacaatattttcaacctatatatagtgacatcttgaatcttgatctcttatatttgacagtactgtacactagtggacaactaataaattatcaaatacaataattaaagtttggcttatttgaaaagacaagtactactgtaattaactagttgacaatcaacttaatatgggtcatcaacacgtgttttgagttttaaaaaaataaataaattcatggatcaatgtattaaaaaattaattatttctaattttacttaaatatccacatgaatattaagaaaattaataaattaattaattaagtactcacccaaacaatagctttaatattgtccaatgtcaaggaaaatccattaccaccattgttgtaatacttgagaagaacatcaaacatatcttcaaatgattcctcatcaatattatcatcacttgtaattgttgactttttctcttgatgttcttcaatgactttatcaaataatcttgataccctttcacgtaacttgatgagttttggcttagatcgactaatataactaaaaagactcacagaaggaaaataatcagcaacctcaaaccctaatgaaacctccacagatttcatcaacacatataagatctcttcattatcaacccttttcttatcaccacaagtagccctagaaataatactacacaaggctagactaaccttatcattgatatttatagccaacccttcattcaaaccaatccattctactaagccaaacaactcttgttttctaattggcttgaatatggactcaactcttgttgggttgaaaagctcttgcacaaaaatcttcctcacttgtctccaatactcaccataaggacaaaacccaatgtctgaataatcatataccatgacttgggagtaaatgatttgtggccttgatgagaaattcagatcatgtgttctcatgatctctttggcatagtctggtgatgaagctattatggttggaatttgtccaatttttaggtacatgagtggaccatgttgtgtggctaagtgtttgagtttgtgatggagtagtgtggagccaagaagttggggtatgtttcctataagaggtagtttccatggccctggtggaagttttgatgaagagcttggtttggttgtttttattagtattgtaagtaccataagaagaaagaggagagaggagaaaaggattgggaaagagggtagcttgaggaaatccattgaaattgataattagtatgctttttctttgtattgatattatagctagtaatgatgagtattaatttatgtctacatacatatatatatataggtgcttctataatgtactattttaaattgggtattggtacctgtatctgttttggtatttagaaaaaaaaaattactttaattttataatcgtgtacgtcattagttgtctaggagacatacatcttgtaaaattttgagaaattcagaataatttacaatataaaaataaatgtccaaatagtctatttcacacacatataaaataaaagagttacgcatgcaacagacagtttaaattttattttcaacgggattaaattttctgaatttcttaaa

SEQ ID NO: 196003 - DNA, 1597 bp, Cannabis indica
ccacgctctctttaaagccaaatcttgagattgttgagcattttttcaacacattctccaaaaaaaaaaagaaatgaagaaagaaagatcgaggtcaatgataaataaattatatgttcgcaccaaataatcaaaataagagtttgtgcacatatagtcaactcgacatgctatctccctttgtactcttagcactactataaaaataggtttttattctgatttttaagggaattttatctcaatttttgttaaaataaaaaccaagatatatgacagtaggataaaagctcttataaagagtgggataaaaaaaatactttgaatcgcagtaagagacctatttttatcccagttaaaaactgagattaaatgtcaaaaaataaaataaaaaattatataaaaaataatcagagatcttaatccataattttacaattttttgtaaatatacagagaccatccagaaaccacaaacatagtggaaaaccaccttcagcaaccacgaatcaccgtcgaagaccacgaacagtgacgaggcaaaaaggttcctcgaccatgaactccatccactgcgaaaggtaaagaacccagaaacatcgcggttgacgaacctccacaaaactccgtccacctaagaaaagatagaaggagagagatctacactatacgaaggagattatgttttcggtgaaaagaaatgagatttgataaggaaaaaatacctagaggtttcctcatttggtttaccgtcgccggaagaaggccactggattgggtgcttcacgaagataggtgttatttaattcgagaagaataaagagagagttgcgcaaaagagagagaaattgttagagaaagtgatgaaatcctaaaggttagagtgtcattcaatgcgataaacgatcttagctaaacccttttatcccatttttttagcaaaaaacctagacaaaaggtaactaagacccatttggctcccataaggtttttatcccactttaagggagaaaaacgattcttaactaacaagccaaacaagtcctttgatatacataagttatatagggcttgtttggctgcccaataaaaatttaatcttgaactgattttttattttttcaattttttttaattgttcaaccgaatagggcccttgtctaaaaaaaattagctgttgtctttaaggtgccaaatctaaaagtagggtagaaagtttcaactatcttttatctcacattttgtttttgttaagtataaaaagtgggataaaaggtctcatttctcgtagtgtagggattagtctaactatttgtcttatttttagattgtaaagtaatggtagagtctagagggttataacttggagggagaggaacatttttaatgaagctcttagcaaggttgctggttttggtgggtgctttgtttcttttgggtgcttcgccacctgaacggaattgcccatgaactcacggcttgcgctgtgtctgttgactgattttggttcttgagtgttggtacgtagaactttgtttccacattttgatgcttttaaaaaaatgtttttcaataaaaaaacaaaagaatttttttt

SEQ ID NO: 196004 - DNA, 764 bp, Cannabis indica
gttatttccattgttggaattggtggaattgggaaaacagcacttgctcaactcattttcaacgacgagagagttgaatcacattttgatcttaaaatctgggtttgtgtgtctgatacatttgatgtgaaagtgattatggagaagattattgcatacataaccagtacttacccagaaaacaatgagttaaatcagttggaaatacttcttcgaaatgaaatacgacacaagcgatatcttttgattcttgatgatgtgtggaatgagcgtgaagagaaatggaagagcttaatggcattgatgtcatatgggaatgggagcagaattattgtaactactcgaagtagaaaagttgctgagattacaagtgagaagaaggagagattaagtcatgagttgaagagattagatgaagattatgcttggttactgtttgtgaaagtggcttttgagcaaggagagcatccaagcaatgatgaaatcgaaaaaatcggacgagatattgtgagaaaatgtgaaggaattcctcttctgatacggacaattggaagcatgttgtttttcaagaatcctgaagaagagtggcaaagattctatgatgagaaactttcagagatattagaaaatgcttctgatgttttgaaaactcttgaattgagttatttaactttggaaaagcctttgcagcagtgttttgcttactgtggactttttcctaaagattatgaatttgaggtgaacacacttgtgtatttgtgggc

SEQ ID NO: 196005 - DNA, 688 bp, Cannabis indica
tattttttgtagtgccaaacgaaacaaaatctaactcgtaaaaaagattgtttaaaatttaaggaaagacctttctgaatatagtccaaatgactccctctgtgcatggagggattgtaagtgaaccaatgtatctgtaatactctttgcttccaaatttaatgatttctggattaataattcccaaatccttctcttcaagatctgtatccactgatttaatgtgctcaaacagctgccataaaagggtaccaaacattaataaattcatacattatatatatgtttatatatatatatatgagtttatgaccatttaaacctctaaactcattgccatcttttggtgttgctaaagctacatttcttgcaatgaaatcattcaaatattggtgagacttggctaagaagtaacgtttaattaaaggtggcaaaatgtatcatctgtcgtgtttgtgttataattatttaactcgtttctgtattatgtcaggcgtgtcaacccattttcaatctacatctaattattttaaccttaatcctacccgtaaaaaattatatcgtatttgtgttgactcactttaactgccaattttaatattattgaagttgtagttgtagaaagaaagataaattttaagattttattaaaaaacttatgcacatctatgtatatatagctttttat

SEQ ID NO: 196006 - DNA, 867 bp, Cannabis indica
aaataatttgttatttaaatatagtttttaaaatatatatcttttcttttttttttcggatatatctttccttttttaaatgcaatcgtgagacttttcctaatctaatcatattacaattttttttttttgtacaaacctaatcaatgtaattatattacaattaggacattttgggctctataaataattcgtatgacaactcctaccataatcaaaaatagagagagagaaaaacatttaagcaaagctatctacattattactattataagtctatatttaactatatagtattctactagagaggaaaaaagtgattgaggtactcctcttcttacttttaatctctaatatgattttcattcattacattttattattgaattcaaacttttcttctttttggcaataatgttgtttagaaaaagcttatacaaaaaaatacatacattactctcagattagtttacacattttatatatgttatgatatgtatttaatctcttataataaaaaaagtatgtgacacacttaatttaatctcaaatgtaactattttaaggaactttatatttactaatatttttttagaaaatttatcacagtaacataaaattgttaattgcgagaaaccacttaagtaaatccaaagtaagaatattaatcacatctgatattggttagattttatgaacacatatttctctcttttttttttctatttgtgttcttgcatgctttatcagttttgtgctaagaaaaggtaacatagtaacaaaaacaactttacactaatttaccattccaattatctttaacttaataatgttaatctcaaataggaaactgatcagtggtggaaa

SEQ ID NO: 196007 - DNA, 1513 bp, Cannabis indica
ttaagggcatcgggccacaccatcgggccccatcgggccttcatcttctttgatgaaaatacactaaatcacaccctaaaaaatcaacacaaaaaaatcacagaacctaaatctatcaagaaaaaacattttcacctaaatcaacaattaaaaaatgaaaaataccatgaaaaatgaaaataccgtgggtgcggagtgtgggtgcggtctagcgtgggtgggtgcagtggttaaccgtgggtggtgctcgatcggcgttttgggtggaacgccggtggttcggttggatttgggtggtgctttcttagtttggttttgggtttgctttgagagagaaaggaggaagagagagatggttgagaataatgagaggggtattttagggtttagtgaaaagtgatcatatttttttaatagttataattattagtttaaaaaattaatttaagtataaaagatggatataaattcaaatttccctttccaaattccaattgatttatgacctgaatcacttaattgcttaaaatataatattaatttgtgtttcccttacaatatataaatatatataaatataatatttttcttgtaaataacaaaattaccaattggttaattaatttagcaagaaaaacaaaattacaatcttaacaataccatttgaagctagaggtgataaggagaagaatatgatataattcttattaattcatttattttgttgtagatgagaaagtatattttttattttgaatgaccagtcattcattctctggaaatacaattaattagtaaaatgaaattctgtttacaatagtaattagtaaatacactatatcatattcatactatatatataggaatattaggaaatatatatatatatatatatttatatacacttatatgtcttaaaatcaattattgggatgaataattttcaagtgttaaaataacttgtggttcgggaacatgcattagcaatattaccatgaaaaccacatatatatgaatgaatcacgtacatattgtaccatacatatacatatatatatatatatatatgattatatatatatagctagtgcatgtttttgttccaaaaaggcaggaaaatgccaaacttaagagcccctaagaatgagaatgaacagctacaattccttatttgaaaatttatgttacagcatatattcttcatgttttgatcctctgtccgccttaaatataatgtttatatatatataccagccctagatgcttgaattgcataccaaggcagcacaaattaataaaaggcaaaatgatgtttgactttttcattgacccaccaaaaaacatcaaacacacagcacatacacaattccaactgtctattactcacttttaaacatactttacccttttcttttctctatctccttcctctacaattgaatgaatttagaatatttggaatcaaatatgccaatttacagattggaatgttattaaatttcaacatttaatt

SEQ ID NO: 196008 - DNA, 814 bp, Cannabis indica
atatatatatatatatctatctcgctctcaagaaactagcaggagttagggtttcttcagcatgattcagggtatactatttttggtgattcaacctaaggtaaacatcatagctcccttctctttatttttccctaagttcaagctatgtttctaggcatgattttaggagttagggttttgtggtgttaagtgatgtttgattatattttcagatgttgttttgaagttatttaagttgattaagttaggattgatgattgttgttgtgtttgagcaaggtttgaattttagagctcaagctttgctctttaatggtgttttgtatttttgagatttgtacctagttttattgcttgaattatatttgttatggcctaattaggtactctagaaggtttgagatgatttgggatagaattgagttgtgtaggagggaatttgtgtttttctgcactgaaccgttcgaccgattcagttggacctgtaggaatcggtctttcaattcgccccttggcagaccccctttgaaccgatcttccggttggaaatcggtctaccggttggggcattttagggcaccctagattttcccatttttacgatatttagggtatggccatgttatccatcgataaaaaaacttttagttttaactttaagtccccaaaaagtgactaagtgtgtccctcaccagttttacgaatattgtgatttaagggccagtaaatcgtcgagcagctgttccactctacttgaccagtacacctgaattcaaaaatgacgtaagatgagtataatgatatgcatatgt

SEQ ID NO: 196009 - DNA, 507 bp, Cannabis indica
actgtcctttacatctatactgagaggctcaattactgtgactcattggcaggcgggatagttgttcttagctggggtgctacaattgctagaaacctcagcctacacaatgttatttttcaatgcgactcggccgacgctgttgctgcggtgcttaggaaaagccatgagattcaggtactgcgtcacaatattccaggaagtagtagtgaaatttcagaagcatgtgaggctgctgaatccctatacggcttaacggtgtggcccatggtgtggctaaatgggcaattagttccaatcgattcaggaacattgatctgtttaattttgacaactccctgcttaatggttgagcagatggctgtggtgacttcgtaacaattagttttctttgtcagtttgaatttgttagttatttagttacttggttcttcttttctcttttgggtttggagtttatcctccctagttcggttttttgcttcacttttagacgtcgtgtttttc

SEQ ID NO: 196010 - DNA, 1123 bp, Cannabis indica
acactataatccttcaagtaagtaaacttttactcttgtttgagtacgccataaatttttttaccaccttatccaggcaccaaaataccactattttgggtgttacaattgtcatctgatcttaaactaagaatttaacaccgttaacaatacatccaggataacaatagcatgctagattagagggatttgtgatggtgtacaactcaaccgatacatccgtagggttatttgctatatgatttgattgatctatcattgagtgaaatatgtaatcaatactagaacaagaaactgtattttaatgaaaaaattaatagaaagtaataattactcgagacttgaactaactgggaaatacgttcttaaattgtgtaaagattttgatcacccctaagttgtagctcgttcttatgctgactacacataaatagatttttgtaaaggaatgtcatcggtgaaaagaactaaattaagaatgcaaaaaatatcttagtgatatacttctctacttcattacaattgtttagaatgtactactctgtcttaagtttttcttgcattgataaagaaatgatggtcctcttaccaatgggtctcccaacatgcttgaatatagagaattcccttttaggcttatttgagaggacaccagcatttccatctggtcggttaaactaagtttcaacttcctagaaggtcatggaacaaaagcttaatgcctcgtttattgcacaagcttcacaaatatatcttgcagattgagatcgatttttttacatattatttgtatatggatatggctcattcaattggatacaataatttgaagtgcactggtccctcaagcatcgcttgtttaggtaaatgcatcaccaagtgaaccattatgtcaaaaaataccagtggaaaatggtttccaattcgcaaagaatgtccaaaatactttttttcctgttctgcaagtcttcaacattctatgtcttcaagcacaatttttagaaaaatacacacagttcaattattgtaacccatacttctttctttaaaaattttctaatgctccccgacatcaagcgttataacaacacatatcaatcgtgagacttcaagccagaattgt

SEQ ID NO: 196011 - DNA, 877 bp, Cannabis indica
ctttgaaagtaatgaaaatttgtcacaatttcccccaagctcgcctcccttgtcatgccatcaacatgctgagccttctcttccaatgattctgacactcccaaagaacccccatttccctgtttcaaaagttccccatcttgttcatcaatagcaccacagccatctatgccaatggaattaacgggtttctcagaaaccacttcaacatccataggcacggcatcctcattctcatcatccaggttctcgccactcccactagtacaaactccaccaacatatacatcagaacctaatacttccaccattatgtcattcccatgacaagaatcatcttccaccccattactgaatgacccctcaatctgcccctgagctgtatcaccaccagaaccgactagggtttcacctgccacatgctcactctcagtcactgtaaactctggaacactaccgacagggatttccccgtccttatttacatccattcaaatcgctatctgggtatttctcaaaaccatcagaaaagagctttttcaaccgcaaataaataaataaagtaacaatattcaaaaatccttaatcccaaaaaaaaaaacctaatgcaagcttgaaagaatctacagcaacagaatcaagaagctgatcaatataatacaaaaataaaaaacgaaattgacacaaaaatagtggacgaaagattaagatcatggtcgtaccttgctagatctactttaaagttctactaaaatgaggattttgagagttggggcttagagagactgaacataaaaccttttttttgggcacagcaatatggttcgtaccctttaagagatccaaactaataataataattaatttaaaaaaaaaa

SEQ ID NO: 196012 - DNA, 636 bp, Cannabis indica
caaagtttccaatttcattttattgcacaaaaataaggttcgattctaaaccgttgaagatttaaaaaaaatgaagcaaactctcgtttttattcactcatttgcgacatgaacaatcaaagtaaaataaactcgaacgaaaaatcaagaaataaataaaaagggagagttaagcacatacctctgacatggatcctgaattctacttcctcaactgtttcagatcacaagaaatgaatagtaaattccagtctacggcttcgtcttcctctctctcactcttccacacgccaaaagggtctcaaaactcccaactcaacgagctattaatttaacatcccaactcaaatgggctaccgaaaaaacgattgaccttgcgaattgcgaaattccggaacggaacaacgcaaaattcttgggttgatagattttccggtagaaaaataaataaaaaaataaaataaataaaaagaaaggaggaattgaataaccggagagaaagcgtaatgggaattgagagatcagagaagattgtgaatagttttgcagtgaaggggtgaatagtaatggaatagaactagggtttggagttggggagggtttcggtctctggtttttctctttctctctctctct

SEQ ID NO: 196013 - DNA, 1103 bp, Cannabis indica
tctatccctagattttaatatgaactgaaaataaagatgtaaaattgtaccacatgactaacttagaaatagatcttcatgttaccacatgacacttttcaacagactttagttttttaatgtgagccacccaatacattttaaccatatcccataacaactaaaacatcctgtctaaagcttcaaaactatataattctaccccttatacattgcgaaccaatagcaacttcaaacaaagccttccactgattgggccagactcaaagtcagagacaattagaaaccctgagtaaagcccctaatgtattgatacaaatacaaatatacttctagtctttttttttttttttggtaaaagagaaagagatcagttgtcttacactacctccaccccagtacatacttcttgtctctaagttgtggataatcaccctcgccgcccgatacagcgcacccgtaccgagacccggcgcaccactattccaaacatcgtcatgatccttatcaattggctgctgatgatcactcggggcggagacgagcatttcagagaggatagggataacttgtgggagagagagaagagacaacacaccttcaaatcaaatacaatatagcttaaagaaaatacaactcaacaataaaagaaatttccataaatacccctaactatatacataatttcgaaaaaataaaaaaaactaaatttttatattttttaaccctacaaaacggtgtagtttaaggattggaataagttatatgcaagtatgtaacctaaagaaccggtacttttttctttgtcttacatgaggtatgccaaacctcaaacctcaagtgaggttttatataaaagccctataaatatatatagaaatatatataggtgaaaatttcaaaaagtgaaaaaaatagtataaaataagttaaccctaaaatttctcatacacactcgattggcttcatcatccttttttccattattctatttcaaagggtaacccgagaacctctttaataaaagagtattgttattagacaatagttgtacccaatattttttataggtggcgccccacaattggttaacaatatttttt

SEQ ID NO: 196014 - DNA, 4098 bp, Cannabis indica
tgaactcgttaactaacccttagagactgactggaaggacaccagagaaatatctgcctctccatatcccatggaccgggaaacttttttgaaagagtgaaactttttgtcgggaacataaacgttttcctgatatacctgtaatatgttcaccagacagtgtcacaggccacaaagtagccacagtattatacatttgttctacagaactgaataatgaaatcaaataaactgaaaattataacacataagacaattttggttttatatatctaaactccacctacctcatctgccagcaggactagaccttctttcttgcagaattccacaatgtcccgctggttgccttcagcaagaacctacaagcaaaacctcaaaatatcaattgaatgtcgaccccaagagtaaagacagctagacaagcaccaaattgaaaaaatccagtttgcacaaaaacgttcagaaaagccaatgagtctaatccttgcatacctgaccagttgggttgcctggatttataacaaccaaggcccggacactgatgcctttggatttggcgtcctctagttgtttcttaagttcagaagtctctagtccccacccagatgcctcgtcaagataataaggaacctgtaaaagtaaggccaaacattttagatggtcaaaccgtagcaacaaaatcatcaagtgatatcccgaaccttattccaacttccaaactcaaccacattgatcattaatcacgccattgtacaggatattccagagaattaattaactcagcttgccagcaaagttggaagctatttacaagagaacaatcaactgaaaattacactgaagtttctaaactattttcctatgtttaaataagaacgtaccaaagtgccaccgtgaagggcgattgaggcagagtataaagggtactgaggaatggggcaaagaattccgtctttctctgacgaaatcagcaattgcatcatcatatggacctggtatgcaaggaaattaattaaaaaaaaaagattagcacatgttttgatgtaggaagcttcaattgcttcaaacataataacataaactaactgcaaatatgagaagttgaaaattaccgcagggcttgcaccgtcagttaagaaaatatcatttggatcagcaggacaaccatcgcgagcttcaattccagcagcaattgcatcacgtagacccttgataccctgacattgggagggagaaatataagatatagaacatataagatgcttttattataaggttcttgacacataagcatagctggttaatgttacctgactgtgactataagcaccagttgctcttcctggaatttgatcaagaattttccaagctcgctcaatggaatctgcactgtaataggtcacaaggagaattaaaaaaagaaatcttctaattgcacaagaattagcagatgctatttttttttggcattttaatttgaattgtgaagatattggtggtattagagatttcgataagccccttgtcagatttgtgtaccgtagaaggaaagccaagtatgcttgactaggattttctcaaagacatttaatatttattgtacagttgcaaatttgtaattttctttaagactttaggctgtattgggttagtttaagtaagttgttgattaggcaggcattattgtaaacatagctatatatttggaaggaggagatttttaggggctatggaagaactcttgagagtagtctcgataatttgagagcccagttttctcgaatgtttggactagtagagtaaacatagccatatatttgtgtgtactaagataagatgattctaactaataaaaaacttatcagatttatacacgataaaccatttattagttctctttatcgaggatagaaacataagactagtgtactacagctgcttgaaaatcatattaagaaaaacttaatgtcatcagtcataaaaaaagtcagcccccaactattctaattcgttttcaaactatagatgctgatataacaagagagaacatttttcaatacctgaacaagccctgtgtctcacttttgtccaaaatggatggatagtcacatagcgcaagaacctagcaagtttacaataataataaaaatattaagcaacttataatgttgattactgaattcaattcaaagaaaaccaacctctcggaaaaatgttatcgggtgttggccaagagactggggatttccaatattgcaataaagtatctgcacaatacaagaggaagtcagtcactgagactgcattaatagctcaaatgcacacatctggtcaagactgcagaagagaacaattgtttgatataatttagatactatttctcaaacttttagtaaaatcttcccctgtaatcacataatttagtttgcctatctgttcattaaataaaattgcggattaatcaaggtattgaaatggagcacttaaaaattgttaaataagaaacacatacctcgtcaaatggaagagtaccaggcttgtccagtaattcttgttgcagcctctgaaaaataaaagcgtcaggcaaattgagacattaagttgacaattaatcaacaactcgtctctttcagggtgttccacatatgatgcaactataataatatcacacaaaactatttttcgcaagttctgaggtatatagagttgtacctgggcaatgttgacaatttcacctcgaacagcatactcacatttcagaacctaaaaacaagtaagaaggtaacgagttaatcaggagcatataactttctcagaacctctagaatgtggccattcaaaactgctaacaacaaattttaacagcaccttaataaatatattatatagaggagcatcaaagagtatctgttaattataattaacccttttcacacagcaagacttccatatgtttaggcgatgtattaaaaatttatttattttcagttttgtctttacaaatggattgtttcagttcatggtatcatataactagaaccaaacaattcgagggcttctgtggaatcagaagaaactacgcaatcttactctacaaaggtaaagcaagtatacaataacagtagcccaactagaaaagagatgcctttctacttaaaataaaatgtcttttcatggagcaaaatcaaaacagggatcttttcattatgatttatgacctaagaacacaatagagataattaaaaggacgcaatacccaacaaaaacaacatcaagtaaacccatcacgacattaattggaactattaaatccaaagttttacttttatttttttcaattataatttgattcaataaagttaggaaggatcatttaagaacataaaaaactattcatctctacttatttatttattaatgtacaaaagaagcaaacgaaatcctacaaataacagatgatttaagaaaaattaaaacaaaaccacatggagaaacatcaactagaaaacaatgatccattaaaaaggtcaactgggtgtaatcaaacaattgaaaaacacaaaagcgatcaaagggttaagcacaaaccttgggattgatagtttggagagtgacaggagaggaagaagggtctgccatggaagtagcagaatcaagtacagttttggatgagagaaagcgtgattgagaagaagaaagattggtatggttattaagataacgggtgagagcgtttttaagcctgccagctgcgaatttccgcatcgtgtcgtgtctcgccttttatgttccaagcggcgtatttttttttttttttttctgtaggaccgaaaaaaaagaaaagaaaaaaagatttatatttcgaatatcgaataatattattacgtgattaaaacattaagggcaagacccagggctctttcttcgatgttgactctaagctttggttgttcgattggccacgtttctgtgtgtacatctcctggaggcgcccacagaataagaactgctcgcatttttaatcactcaccacaaccgtgcgtgattggtcaaactttatcaccccaaaaccctctctcctattttctgataaat

SEQ ID NO: 196015 - DNA, 771 bp, Cannabis indica
atatatatatatatttcattacaaatactcttatagttgattaaatatcaaacttatcaaaattaattattaagaaaataagccttattgcaagattattaaaaaaaagaccaattttaatagtaatccttgctcttgagagtacttttttttgtttcttgtaattttctattttctaaaagagatcatactttctttttcttgagataatgaacttgaggggttttatttttattttttatttattttatatgacatctagtttgtaaccaaatgattcataaacagtcttttattgttgtggaatggaggatacggagatcaaaagagtcgtggaagcttcgcgcgcggtttactcaaagtgagatgccatttaaatatttgggtatctcaagttgtgttagattattttcaacagcgaaatgtgatgtgttagtattagtaaacaaagagagaaaacagagaaagcagaggagaaaagagaaagaaaatatgttgtatatctgatttgatgataggtacaaggcttttatatacagctgagatacaagatggtagttgtaacaaactaaccaactaacagtacaaataataacgataataacaaactaatgaaacagtaagacatactaacaatctctaatacgccccttcaagctggtgtgtaaaaatcttgacagccagcttggacagaatgtatgaaagtgctgaggaaacaaaggcttggttaatatatcagcgagattgtgttcggaagagacatgattcatc

SEQ ID NO: 196016 - DNA, 997 bp, Cannabis indica
gtggcatagagcaaaaatttaaaattcttttttgcgatttccaatccttatctataaaatgggctgtgagagacatatatccatcagtggtcaaagaactccacaaatcagaagttaaacttattctaccaggaggttcacctaacatgcttataattttagccctttccctttggtacatcttaagagtgtcatttttcacaatatttctagtaatcaaatccacatcaggatataagtatttcaggatagccctaacccctttatactgaacaaattgaaatggcagatcatgcataacaacacaagaaacaattaactcacgccatgtttcagcattgaaacaatgattaaaaactttcacagtcccatgttcatgtgatataagcatttgacctacatctcttgtatcacttctactacaaactttaaggtggcgtgtcatattacatgtgccatatttgctctttgcaatatatttttttccacacttcttgcacttacttcttattttttatcaggaccctcaggaagcctctcaaaaaagttccaaactttggacttcaatgccttcttcttctctttcacagtggcatcaatagcagcttttgcaagttctatatcttctttatcttcaatctcaatgagatcttcatcttctttagtcttcatcctatacatgcaaatgttacataaattttattatttatcccaacaaaaaactccttccagcataaacataattacaatcattatataaattatataataaaatacaaaatagaaacaacaatactcatactaaaaacttaatataatagacacaagataacactaatagaaaacagaatatacatatataaaaaaaatgaaaaaacaaacctgaaagtgagaatgagtagccgaatagcaagattcagtatataaatctgagaaaaaaaataacatgaaaagaaaagatccattgcctccattagtttgttcttcacttattatt

SEQ ID NO: 196017 - DNA, 669 bp, Cannabis indica
aattatactagtttttcggataataggccattatgaaattgaaaaaaatgtaagcgaccttagaaaagccattgacagtaagtgtcctctcccacatgcctggcagagatgcaaagcttgtatgaattgccggcctataaataatgtgttcatatatttcatctgaaacaacctgagaagacaaccaaatatgtttcagaattgatatgaggaaaggtgatgtgtgaacattcagtacaatctttaaaaggtctattgtgaagtaccaaaagcctgggatgccttgcaacaatttcagcaatctcttcaagcaatttcttcgggtaaacagatcctgttgggttggatggagaacatagaatcaatagtcttgacttctcagtgatttgggattcaagaacctttgggtccaacagaaaattgtcctcaatcttcgttgacagaatcacaggtgttgcatcagccagccttgccatctctgggtagctcacccaatatggagctggaattataacctgaaatatgcattcatcagtaacagtgaaaaatatacatcagcacttaaatgcaaatcttcatgctctctctctaaattcctctatgtctgtctaagacttaaagtttcagtaatttctgtctaaattcctcttcttctcttcctctcttctt

SEQ ID NO: 196018 - DNA, 1428 bp, Cannabis indica
cttttaccactaaactatacccgatacaatcctattattatatataaaaggactttttgttgaacaagcaactcaagtataattaaaaaataggataaaaaagaaccatgaaaattagagcgataccgatacaaattaagtcgcatttctatttccaatttcgacgtctattttcccaacccaatggaattttacacgtgtttggtttttagttataatcttacatacatatataaaaagagtcaatacatacactgttcacccaaaacgtcaaccaaaacggtgcgttttttttagtgtgtgatagttagtttggtaatgattaatgaattgtcctttaatacatgtgagacctatttttttttctttttcgtttttcacattccatggtataaataattcttttttgtttgtttttttttcctttcttcttcaatttagttaattaagcattttataatttttttaaagttattataactgttggaaaattgtacaataatgcatcacttaaaaaatgagtgcattgatatacttttatttgtttcagtatttgagagatttttttcgatcaatttatttttttatgatcgtgtacgttgtagttatttaagatgttttacaaaattttaaaaaaattcaaaaaaatttaatacaccgaaaatagagttcaaataatttgttgtacgtgtgactcttttatttgatatgtgtgtgaaataaataaactgttgtaactattttattgagtctattatatcttatttataagtgctctaaacatgcttaaataccaatactataaataaaaaataatttatccctaaaccttaattttttttccctttcaacatgtttctaccataccatttttttattttacaagaaaaaactataattaattaaataaaaactttgataattttttttttttggaagaaaacatatatttatctctaatatttagattttttgttttgggataatacaaaaattggtcgcctctattttaggtaaattttctaatttggccctccattttagaaaaaatataaaaaggatcccttgtgttattaaaatggtaaaaatagtctcatgggcataattttagtcattttttaaacaacaatttttaaattgagcttaaattaaatttgagataatttgaaaaaagtgattgttaaaaatagataatattgttactctttttgaaagaaaaaaaattactaaaaaatatgttaaggggaccattttgaccaatttaattatcacatggttttttttataatttttcaaaatagactgcccaaaatggaatttaacataacagaggagacctattttttatataaaaaatattatcccttcttttaaacttttaaacctatctttactaggtcaatttggattttgccctctgaactttga

SEQ ID NO: 196019 - DNA, 905 bp, Cannabis indica
gagagagagagagagcattgctggtggtggagcttgaacggactagagagagtgagaaatcgagagggagagaaactaagaaggctctgaagggggcttcttagtggtggatggcgctccgaatgggaatttctcgatggtggttggttgtcgttggttgggaattggtttcgtcgtcatcggtggttgtttggtgagagagagagagattgacgcgagaatgagatctgaaatggttttatattattcccatattagccgacgattaaaaaatgtaaagaatactatagccgacagtggacaaccgtcgactatagtattcctcatatttttacaccgttgactattctaattaaaaaatgaaccatttcaattttgtacctattttaaattgacgactattttcaataaatgtttaaaactgttgattattctccactataggttacgattttaaacacttaattttattagcaatggtaaaaaaatgatttgaaaactgaaaggaatagtagattttgtagtagtgagctttgctattggacactagtggtgtccaacaccttttataagtagcgtctcatgattagttaacgatattttctaataaaagttattttcttaagttatatgagacttaatacttaattacactaatagcgataagatgctgaggagaacgcatgggtaccaataatatctttttagcaattttctttgtagtagtgaatgttcctattaatagaaaagacattcaagatgtacaccatacaatttgtgttagatttttctcatttcaaaataagatacttatttttatagatcatggttggtttggtcaacttgttgatagttataaaattgattgtattataacgttatgttttgaataataatattatttt

SEQ ID NO: 196020 - DNA, 688 bp, Cannabis indica
gtttcatccacattgtcgtgtgattgttaaaactactctgatgtaaatgattttctcagtggtacataattggtttaatgttagagaacactattgacttgttatcacctttttttttgggggaaattaactttattttttgtctgacattttggcatggtcttgtagagttgcaggagatcagtggagccaaaagttggccttgtagaagtggaggaatactgaaaactttgcgctttgatcccttgacatcacaaacaagtggactttttgtagctatgttcagaaaaatagtcacctgatataatccaatgtttatttagggctgtaatattaggcctaacagattacctccaaataattagattgggctcagttttggtaattttttttattcttcttccatgtatgaaaatataatattagaactttaactataaattcatcaatttggtttctgcgaaaaaacaagtcatcgatttggtgagggggttcgctaattgggtgagactcgtgttcgaaccttagatatcgtgaagttgtataaggattcttcgcactcacctttttttttttttttttgctttcatttattgtttaattttttattatctattatcactattatttacaatccaaatcaacctattgtgcagtatgttgtgatgattgatgtatttatcactca

SEQ ID NO: 196021 - DNA, 1814 bp, Cannabis indica
ttttaatttttcttttaaataaaatttatgttgaaaattagttttcctttaatcttcattaccccttcatttcaatttaatccctcttccccatcattccatcttactgttcatcatcttcttccttttttttaatttttttattcatacggttattatgttggtaggggcagtttcagtctgttttatttcaaatttattcagtttttttttttgttttaaatcacaagtttccctcttctttttcccccctttagttgtagttcttcttctataaatattattcttatcttcattatctatgactattacccgatcaatctcttcttctccatttataaaaaatcccgaaaaaaaaaaactctagaaaaacaaacctcgatcaccaatgggtaagatgaatttcaaaaatcatcctcctagccctacgcctccagttccttccaaaaaaaaaaaattagttggtggaacttcgaagaagacgatatccaaacgtcctcgccccattttggaaaattcagactctgattttgagttggagccaaagtttttacagtcgcccaaacttgataagataatttttagttatttttgtgttattttacgagttttgtttcaattttttttccttacagatatctctgtctgtgatttctttatcttccatgtcatttttttgttatattttttgtgtttgtttcgtttgaataaagtatcctttgtttaacagttgtcttcttgttattttgttctgtcgtaagggaagggtaaaacccagttaagaaggttggatttgatgatgtgtttaaggagatcactgaaaaaatggttgttaaggtgtgtactttctttatttttgttttagtatctattttatgcttgatttgttgttattttatttttgtgttgttttagtagtttttttattctgtttttctaggatttggaatgcaagtacagccgtttggaacactagcattcctaagttataacctctagttattaatattatattataaatgatattaaaattattctcactgaaacctaattataaatattttccaaaactgtgtttggtcattttcttcgtattcttgagaatagtatctacttttaactaactcatggtctggtgttaagggaggttcaacaaccaaatgagttagaattttgaaaatttgtgcaaggcaaatttttgaggtttagtattgaggaattttcgttaattacgggtttagattgccatgttgactctgatatattccagtacaaacaggatgataatatgcttgttagacactatttaaagggacataaaaaaattacaaagaatgttatccaagttgtacttattgctgacaattttaaggataattatgaacttacagtcaagttgactattttatattttgttcattgctatttgttgggtggtcctcccagaaaggttgtttccattgagaaaattgatggtttggatagcggttgttacaatgattatgggtggggaaaggagtgtttcgatatgataattcaatcattgaagggtaagattgatgctggtattaggaaggttaagcagaaggaagaagatggtgggttttataggttattggatttttcgttagcgttacaaatttggttttttgagtgttgtctttatgctattgggaaacttacgttgtattcaaacatttggcattccaaggctttttaattggcctaaaatgccaaagccaaaagtaccccagctgaagatggataatgtgaacaacttcatctttaaccgatcgttgaaggaggtacttgtt

SEQ ID NO: 196022 - DNA, 587 bp, Cannabis indica
acagaaaaacaaaaaagtcaaccgacagagaaacgaaggaaaaaatggacctcacgagcgatcacccactgatatgtgggactagtcgcagaggcttcaggcagcgtgtgtggctcaccctctaagcgacgaccaaactttgggattctgtagatcgatcggcggctggacagtttgttggtgatggcagtgagagttcacttttgctcttcaaatgattatttttcaaaaagtcaaccttaagaaagatgaagaacaaatcctaattgcaaatcccaattttatgattaaccctactatcaaatttcaaaatttgctgtgatatatcatgtaaacaatggtgaagagaataattgttttgtcctttttatttgagaaatagtatatatttatacacaatttacaatttatgaaagctattctaagaaactaacaaaataaaggaaactaaataacttaattaattttacacttaatatattacaactaatatgcatatctaacaaatactaacatatgcatttcaaactgatttgcacatgattatttattttttcttttgttgcgattttttcataatatgaaat

SEQ ID NO: 196023 - DNA, 522 bp, Cannabis indica
ctgctcactactctacaactactgaactacccttgtagacaaacccattttctgacttgttcaattctagaccaaaagatttgaagaacaagtaaacccagttgagtgaacgaatgaatgtcttctaggaatatttttatattaaaaatgaaaaaagcaaagtggaaaataaagctccaaacatggagtatggtcggcgcgttttagcatttagcgtcgctaattgcgcaatttactatggtcttctttctttctttttttcttttcttttcttttgtttttccttttttattttttatttttgttcacaccatctacaattatgctatccaaatacactctttagctaaaataagaagtgagacctagaaaaataaacttcaatcaaaaaaaaatctataattaaaaaataaaggataggaaactctttaagagtatcttcaatcatgctcctaaacacactccttagctacaatagaaatgaagacttaaaaaaatgagttttgttataaaataatataa

SEQ ID NO: 196024 - DNA, 686 bp, Cannabis indica
atatatatatataatctaatcagatgttaatgagcttatagcagcagcttggttcgtaatggatctccacttgccattatggcaaacttatcagaacttagtatgctacatgtaatagcatttagatccaataagcctgctataaaaggagaaagatctaagcctactttagactggagcctcttagcaattgaatatatcaggaagtggctcattgaactttgtagcattggcaaattcagtgccccgcctagttaagagcaaggttccctttttcctcattttttcattttctgagttgattcttgagcagagaactttgttaacaacctctacttgagcacgaacctcctctgagaatgaagaaggacaaactggaaaggaaatattgcaaggaagaagtggaggcaaacttgtcttgtctctgagtagttggatagaagaatttggaactgttggagctaatggaggctgagtggtgacgatctctttactataacatatggtccacctaatcaactttttactaccaagagcatttgaaccccttcgttcatgagcctttaagctttgcctcctagaagcacccacaagatcagagcttctctctgtagagtttctctctctagaattcggagcttctgacacttagtgtattgttgaaattaccatcttgtgagaaataa

SEQ ID NO: 196025 - DNA, 2061 bp, Cannabis indica
tgaagtggcattaaaaaattcaacacaatacttttttttcctgcaacaatctgttaagcacagaatcaatatttatctcaaaccaataaatacgaccatgcataagagcaaaaaggtaagagaaagacatttcatttgatctcaagataagacaattgccttattaatttccaagtaatactcaaacttctttatagcaaataagaatataatagagtacatcctagacaccaatcaacaccatcaaaagatgacttgatcgaaatcccaatgcaagcttcaatttagaaatgactcatcaataggtgaccatacaatttactcgaactattggataattgtttttttggatattgagggaggagggattcaaacttggaacctcctctttgtgatgagaggtgtgaaactactaggctatgcctatgaactgttggataattagttagagagaagaatctaaatcaagaatgcattaatttttgttagtgaaaaaagataataggaccacaatggttctggaacaattagatttaaggtacacaacagtactaaccaaaattctgccatttcactgctaggaatctgtttagacaatgactcatagaagatcctcaggggctctctctgttaataggaagcaaccaacaaaaaaacaaagatgaatggaactatatcgtattagacatcttccataaaaaggggaaaagaaaaatggaaatttttggttgcaaagtcagaaacctcttcaggaggatcaaatttctggccagccaaggtataaactttcttctgtttcaccttagtagtaacttttgatgttgttgcttttgatgacactactgttgtttttgttttaaccttcaaatttgaaccatcaatatcaaattaacacaattacataagattggtattgatacagacccaattaaaaaaaaaaaacaatccaatctcaaccaattcaacattattcaaaagaatcaattcagaaaccctaaagccccaaatcaaaaacaaaaataaaaaaaaaaaaaaaaaaaaaaaaactaatttgctcatacaaacataacccaaaaacacattcgaaacaagctaaagaaaaacaatcattccataattcaatcacccaagcaccaaagattataactttaccaaactaaatcaaaagatttcaagtgggtatacctcagttttcacagtagttgttattgttttgggctttgaatcaaaactctgccggctcgagctctcgatcttcttccgattaatagaatggtcaaattttcccttcgaagaaccatcttggttactgggtttcaacttcaccacagctgttttcgtctctgtagccatatataatatgtatatatatatataatatatttgggtattgatctggttcaggtcttatccaattgaaaattcttcaatttgagctagctctttttcactttaatcaataattcaatgattttctacagaacccagattaaatcttctcaacaaaaaaaaatgaaaatcgtactagaaaattaaaattatcgagatagattttggtttggttttcgggtgttctaattgggaaagaagtagtttcagtacacaaaatgaccgaaatgcccttttaactttcgaggataattagggcaaatatgtcattatcgagattattataaatttataatggtaagtgtaaagcaatgaaataaatttttttttttaattttaaattataaattatataatattatcttttttaaagtaaaatttaaatttacaaatcacctacatatttataccaatgcaattaggattaggattaattaactatataaatttaattaacatctaagtgtaacacaacaaattgaattgtgacgagtttaaacaatatggagagtgaaattattagtgtagtaatagagaattttgaatggttgaaacttgcattgattgagtacataatactcacatttgccctattaataatcggtatgtgtatttataattttttatatggacatgctacatgatgttggatcgtgatgaagagaagtagaa

SEQ ID NO: 196026 - DNA, 2578 bp, Cannabis indica
cgcatgaaactcctttgcttctttatagtttgttctaaagccaattctctcttccttgtgaaggatctcattgaaatccccaagaaccaagcaagcctccttaatagccatctcctttaggtcttgccaaagaattcttctcccttcataagagttgaatccatagataaaggtgacaaagaaacttgcctttctctctatggattcaacaaagagacgaatcatttggctagtgcacttaaggatattgaccacagagctatccggcttccaacacactattattctacctcccttattccacgtattattcgatgtaaaataccacccttcaaacatacgaacatataaggctcctaaattccgaaccttaactcttgtctcgaggagaccaaccagccctatgtttttgttgatcaatcaattgcttgactgacatttgcttctgctggttgtttatcccccagacattctatgccattattttatccatctccaagagagggaactccccctcccttcttaacaacctcttgctccatatccttcttctgacccatgtgatcaatctcctttccctttcctatctgttgcaatatctgaaacgagttactagttctcgtaggtactgatccctcttcttgattcttaatcttccaacctttagtaaccggcctgaagccttcagcatcagttttcacctcagccttgtccttgtttttcacatccttgactatccactcttgcttcctttccacattcttcctgcaatctgccgcaatatgtcccattccggatcaattactacacaccaatggcttccattcatacataattgctacaaagtagtacatccattctcatcttcaaattcaatcatactcgggtattcttgctttaaagagacttcaataacaccctagggaaacttaacttgtctctcattttattagcatcatccaccattataagtttccctatttggccaatgatcttgaataaggacttctgcccccaatacttcaattctagatcatccaaatgcacccaaattgttaccattcgtatatcctccctcttgaaattcaccactggatcccatgctttcatcacaactggtctcttattaaagaaaatatagcctcccttgagtacttcatctctatcctctattgattgaaagctaatcagaaaaaccacatatgataccatgcctacccgttctaccttctctttccacattctcctagcaaatccttccaatacttgcaatggaggattagcccgaaggacataatatacaatggaaggcaaccagaattcaatttcctcatgaatatccgccttcgtgatcttaactctacttacattctcattcatagcaaacgatttctccaaattttttttgaacacagccagatcgcagaggagtgggattagaaatacctttcacctgcggagaagcacatcgagaagcctgcgctcccagcaatacaccaaaatctttcttgatgtcctcttgctgcctaatcgatcgaattgatgacctaggcgatagaggttctcgaaagagatcctgatattattcccattctgtttcaatcgcctctgaaaacgtcccttcatcttcatccaaaaatattattggctccacacgaagaacagcatccagagacttagttttcctcacatccgtggttgaagtcggacttttcttcttcttcttagtcgtagtgaattgcttcccctgaaccttggatctagttttagccatagcaaaggatagggaaaactatctctatcacttgagatttttaaataggatgtttgaggaggctccattgtctatcttagtttgggccactgtcttgttttctatctatacttccacgaccaaatgcgtcattgtgcaggaagtggaagtgaatagcatctattttagtaaaagttatagtgggttcccctacccatggtatttttggctttctctcctctatagccgaaactgtttctttttgctcgtcttctaaggctcgggcatactttctcgagctttgcccgaatctcccttggatttgggcccgaaataatgacttgtagatttccgtccactggttggggcattagtagtctctgattatcgtctgtttgggcggccctttggttctagtcgggcttgacctacttttgcaaatgtgagttattcttactgatcaagaattcaatttcctatttcaggttattgcactcgttagtgtcatggccataatctgcatgaaaacaatagaacgtgaacgtatctctcttacttatgtcattcttcataggagctggttttttgtactggatcatagacttggttgttgcgtaaattgtctctacgtcgtcaatcatgacagaaaagatagtaaactttgaggcactctttcgagggttgtgttcagcattttcagtgaactttcccttcttttcgttgccttgcctgccaccattatttgatctcttcccacttggatttgagctactaggatattgtgtgttttgagcaggtgcctctgccgaggagatatgttgctgg

SEQ ID NO: 196027 - DNA, 982 bp, Cannabis indica
actcactctcctactcatatatgtcgatgacattctcatcactggtgaagacccaatgcaagttcactccatcatcaccaacctgcaaactcagtatgctttaaaagtccttggtcctgtcagctactttctcgggtttgaagtaactagagatggcccgaacttgcatcttactcagcaaaaatacacaaaagatcttctcaactcgactcaaatgctggattccaagtttcaaacaacaccaatgtgttctaccacaaaattctcacagcattcaggaacaccaatgaccaaccccactcaatatcgaagtgtgcttggtgctctccaatacctcaccatgactagacccgatatagcttttgccgtgaacaaattaagtcagtatcaacaagctcctactacagatcattggagtgcctgcaaaagaattttgaggtacttatcgggtacccttgacactggtttaacatttaaaccatgcaccagattcgacatacaaggttacacagatgctgattgggcagggtgttatgatgaccgcaaatcaacctcaggttactgcatcttctttggtggaaaccttgtaagttggtgctcgaagaaacaaactgttgtagcaaggtccagcactgagtccgagtatcgagcacttgccttagccactgctgaaattacatggattcaatccctcttaactgaaataggtgttcacttttctcactgccccatactctggtgtgacaatcttggggctggctctttagcttcaaaccctgtttttcatgctcgcacgaaacatatcgaagttgacttgcactttgttcgtgataaagttatagccaatgaacttgatgtgagatatgtggacacttcaaatcagctggcagacatttttaccaaaccgcttcctgctacaccttttcagtatctacaagacaagttactacatggtcttgaccagtataacttgaggggggct

SEQ ID NO: 196028 - DNA, 772 bp, Cannabis indica
tttttttttttcatataatgaattacattatagttattggttgtagatattccaaaaattctaaataatttaatgtgctgaaaaaatgattcaagtaattatagaagtaaattataaataatttatgtgtgtaatctattattttgaattttgatatcatgaattattcaaaaaaaaattaaaaacatctcggatgcatcatgcatgcaagcttactataattataaatatacactgtaaaaaaaaaattggaatataatttttgttagtatcaaaaacagaataacaattacaaagtaggagtggagcaaaagtaatacctccaattcaaaaaaagtaattaaagtaaaatattatttagaatgtaaaagaagaaacaataataatgtagttgggacttttcatgtgttaattattttgtgttctttgcgtgaagggaaggggaagagagggaagcttcttttgtgaaagtgtactaaattgaattatcattctttctctctccctctttaacttaaatacaaatttgtaaataaatataaatatataataatagaaagttataaattttataaatttttatactttttgtgtaaaaatgtaaattttttttcaaaaatattagtttatgagaaaattaaaaaaaaattaaaaatatggaaaaattaagtacccttatgataatcagttaccataaagagataatcagtaccttatgccctttttctcatattttttaaacttttttctatgaataattttttgagaaaaa

SEQ ID NO: 196029 - DNA, 791 bp, Cannabis indica
aatcagaaagaggcctagactacacttatacatttgctccagtaactaagttggttactgtcaagcttgttctagcacttgtagccataaatgatggcatcttcatcaactcaatgtcaataatgcatttttacatagtaacttacatgaagatgtgtatatgactccaaggtatagtcctaagggggagcttccacctcatgcagtatgtaaactcaacaaatctttgtatggcttgaaacaagcctcaagacaagggtttgaaaagttttctagtgcattagttgaagaaggatttcaccattcagccacaaatcattctttgtttatgagacaagttggggagaatttcttcattctcctcatctatgtggatgatgtcataagggcaagtaatagtctggatgaattggaagccttataggtcaagttcaatagcagattttagctcaaagacctaagaaaactcaagtatttcttaggtttggaggtggccagatatgcaaaagggattttcatatcccaaagaccctatgctttgtaattacttgaagatcttggacacttaggttgcaaaccagttaatacaccaatggaagccaatctgaaattaagttaagataagaaagaaaagttggctgatcctaagttgtacagaaagattgttggtaagctttaatacctaaccattaccagatcagatatatcgttttatgtaaataaactaagataatttctgtccacacctcaatctaagcatcttaaggcagcacaaagggtgctacagtatg

SEQ ID NO: 196030 - DNA, 943 bp, Cannabis indica
caaaaatgaggcaaagaaaaatgctactatatatataaatatatgtatacaagaattttctccagatccaaccaaaaggcataaacaataaaaacccagtaattaaaaaagcaaaatttcccacttaaaaattagttttctgacaaaccaaacacaataaagagtagaaaatatcatcaaaaatcacatcttttttctttactattattctttctccctatatagaaaggtagtaagtcgtacaataataccctaaatcaaaaactaaatgatactcaaagatttcttttttaaaaataaaaaagagaactttagtcatacccagatcaacattttgaaaatgagagtgaagatcgaaagagattaggaaaaggggttaatgggaattaataattttgaataaataatatatatataccttaatgaagtgttgtttagaagagggaagtgagaatggatcaaagagagtggttggaagtgatgataagaaaagaagagattattgaggagtttagagagtgtaaagatcccatctccatagttgaagaagcagaagaagtaagagtagggaaagtcaccatctttcttcttcttcttcttcttggttcttctgtttctctctctaaaggatttagccgcaacaactggtggattgtctgatctgcgaaacccaccaaactgggaaaaaaaatggtgttttgtactctctatccttttttctttttttttttctaacaataaataaaaaatggtaaataccattttgattgggtaacctaaaaatttaaggataagttaaacactattattttttattacctactaattaagtcattatttggtaatatttttgtttttaattttaaaaataaataataaaagtgtttctagatctgggttgaatacgggttaggagacaagttcggtgtcaaggcggggatta

SEQ ID NO: 196031 - DNA, 684 bp, Cannabis indica
aaaaaactcatataagctgctacataagaatcctttatgcattcctttattatatatattatatatattgatgattatcttaaataacaacatattcaaaatgtcaattagatgtccaactcaatctcaaaacaccaactgaactagcaataaaaatgtctaataaatctcataacaccaatttatcagtaatgttaagtcttgaagttgagcttataagtcaagctttttctggaatgtctaaaaaaaactacaaaacaaagaatatagaatacattataacattaatatggaatctgcaaaaaaattgtcactgtctcaatataatatcattagttaaacacaaatgacctatatatattagttggatggattagtatataggataacagatgatacaaaataccaggtcttgaactcttgattgatttataacttaggattttgaaagtagattttatacaaatttcagtcatcttattcttacctgagacaaaaataccatacgatttggattcatagctgagaagaattgagaatcaaaagtgacaaatttataaacgttaaaacagagtaagcagaaaagtgattgataatacttacaatctcagtctaaacatcattcctctatattatggaaagtgcactaattcacttacaataatattaagagtaatttgcggc

SEQ ID NO: 196032 - DNA, 1672 bp, Cannabis indica
actgtcagggtatactatgttcctagaacaggaactggttaaacgaacctggaagcaaagacaattggaattggtgctggaaggactctaaatgcttattgatatgcatcttccaaattaatgaagccttgggccctggccatgaattcagacaacatatgagcccttttttttgcatttccctccacagtagggagccaactacaagtcctgattataaggccacaagtttcatgtcatccgttacttttttgcttggttcctgcctccattatgcgctaaataaagttcttcaagctctccctgtctattgcttgacattagtgatggagcccatttttatgtcatagttatgggcaccaatgaattgtttccagaaggaagagcgtagttcattccaggagtggattgattcgggagccggtctcttccactaatcttcaacatatttggtaaaggtcagagagaagcacaagcactaggcattctaactgactcttgtcacctgcattatcttgttgtatttggctggatgaggcttaggatcagtgtgcccatcgtatagctcaatttgggacatcttgaagttctccacaagcggagcctctgggtcctcatcttctaaattagtgagggccccactttgtttccggaccaatttcatcaatgtagcaatttgttcttccattcttttgctgttactgtctgagagatctcttccacataatttgtcatttaagtggtttctgaggtccttaccacatggccttgccttctcgccttttgccttttttgtacttagcgtctagacgccttttaagatccaacatggaccaactatcattggatgactgtccccctatcccactgtcctagtttactaaatcactagggcagtttttctccctatcattggaccaacttctggcactccctgctcctagtttactaaatcctcataaataatatttttaataaatagaaataattattattataaaattttcgttcttttcaaaactaatgtttacagtgaataataacaaaaaagtgtagagagaaacagagattaagagaaagagaataccaaggtgagatctcccgacgacaacgatgattcgagcaatctcatatccatctcccagtcttactcggtgagggtgtggcccaaagagataattgggagatattgagcgagtggctgacctttaagggcaatatagagaatagtttcaacatcaattaagtagcttcggatttaaatataatagcttgtaggaaggatttgatggcctgtaattgagaggcaatggacgtagccatggctctgtttcctctctacaacagaacccaatcaagaattagtggagctttcgatcgtgttggactttgaaaatgttttagggtttatttcattattgttaagaggtttcatcactaaatcgctttatcaaaaaatcgcaaaattcaacagattaatttggattttgaaactaacaaacaaacgaggagtagggggagatggttagcgtcgaaacattaatgaatagtctattttatttaaaaaaagctccattaaaaacaatcgtgaaaccaagaattaccgttaaatagccacttttaatatataaaaatatgatatttttaagagagataaataatattttaataa

SEQ ID NO: 196033 - DNA, 2066 bp, Cannabis indica
aaaaaaaaaaaaaaactagttaagaatcactacaatcaaaacataaatgactattatcttcaaaaaacctatagatcaggcatagcaaactatccaaaggaatgtgatagcactacaaatggtctctcttaagaaacttggcaataataagttaccaaaaaataaatcaatatttggaaacactcaacctgttccaaataatagttcactttgtcttgatggatgaacctcatgtatagcttgctagtactgaatttcccataagccccagcaaccattgtattctcctttggaaaagtttatctaatatagcacaacttacgctaataccagctagtgtcagctttaagttggtgcctcccaaaatcttaacccttttaagtaaattcactcatttgagctaaagagccttttgattcgaggtaatttcccaaacatatttagcatcatagacttatttcacttagctcattcttgaaagcaagaacccaagaagctcacaccttatcacaaaaagctaagtgaaaatttcccttcttagtgccattgttgcaccacaataactacatacaaagtttatcaacttctttaacaatactttgaggtaataaaaagatgctcatctaatattttttcaaccctaaaagaatagaagagatgagttgagatttattaacatatgagaaatgtcttcttgcctaggtatggagagtaacgtcctactcaaaggaacgccacgtgtcgtaattacaaactagtaatcacgttaatcagggtccataagccgggtaatttaaaataaatataaaacttggttaaataaataacttacaataaagttcgatattttattataaactaaaataatttaaagttacatatctgggatctcataaaattaattttattttcaaaatattacaagttattttatacaggccaacccaagtggcaaaatagaaatttctatactattcctgttggatccaaccctcgtggtctagcttggtcaaaacatgcacaagtcatcctcaaagtccttgatctcatggttgacccgaccactgttttacccttgcttgcacaatagagcacctgtgagccaaggcccagaagatagaaaatattacagtatgataattataataaacattacactatagacagtacaccactgcatatatacactgtaccaccgcagttatattacattattttatataataatgtcactataataaatgtctatacagtatagacctacgttttacggtcacacgtctttttacatttaaggctttactagggttctctcagttatatttaccgagtctaacctggttagaccttacccgcataacattactcagatattcatttaagcatatttataacaataggtacttagggtaataactctaggtcacgatttaataacaattaaatatcatataactgcaccaccacactatactatatgtgtttagttcactatcttacttgatttctaatttatgaggagaaatctcgatctacaagtgattctgaccaagtgccagtatccctagtcacaatccccacgttttacacaataggttaatcccaaaattatatttcatagcattcacatttaagaatctaacactagacaagtaatagagctcaaaacgagctttccaacaatataaagaacgtccaaatcagagtttggagtcaaaagttatggccaaaacaaaatctaaaaaattggaaatgctctttgcatgtcttggctgcagggaccataagtctggcctcgacgactgggttcgaaaaatacccaaactcaaactaaacttcacctaagccatataatcaattcacacatccaatataatgcataatatgtgccagtgatatcaaaatacatgcctgaatattaaaaacaaacaagattcaattacaccaaaccatgcttttacaagctcaagaacacaaactaaaatcttcatgctcatcccaacaaactatccaaaaacacaatcaataaacaaagaatgacctgaaatttattctcatgctcaaca

SEQ ID NO: 196034 - DNA, 1448 bp, Cannabis indica
tttatttttaacacttatggtctatctcttctcttcttaaacttaaataaaaaaaaaaaaaattgttaagaaaatttacactattggccattagcttaaggcaatagctggaataacaatttatatcatcacattaattatatctctaagtattggcaaatagttaacaaataacaattatatctctaagtaagaatatcatcacattaattaattttatagctggaatgagtaattttattgtgccaatagttatgtaattacttatttggaatcaactatactattattttgttattgttgtgcatataaaattatttttggtttgttcattttgttgtaagagtatctaaataataaaaatacttaaaataattaattaattaactctttgtttttagaatcctaaataagatataattttttattttgttgtcagctgtgaaaaaaaaacacaattttgatattatcctttttttttaaacaatatattatccatctgtttagtgccactccacacctctaattattttcttcttaattattttccttttatacaaatattattattccttttaaaaagaaattaacaacttcccaaaattattagaaaaaaaaaaaaaaaaaataaagacaggaaaataattaataaattagagcgtgtggacgtacaagtttataagttgtgtaagcacgttatagataatttcaaaaataacataaaatacacaaattaattattgttaattacaacacaataaataaaaaaaataattagataaaaaaaaattcaattttttatatagaaaatcgattcaattttattttatatatatatataaaataaaaaaaaacgtgtaaattttttttactttgggtatgtttaatttttctaaatttatcaaatttcttaaataactataaaattaaaactatctaaatattaaaaactaaaatattgaataaaatttccaaaatgtaactatatggtatttgtgaatattaacattaaacaaatcaaaacaagaataaaagtgggatataaattttataattatgggacgttggttaagtgcgtaaaagccgcaacaaattgaaacatccgcccaaaccaaaccaaaccaaacccattttaatttgccagcgttttagagagagagagagtgagaaaaagattgaaactttcattaataatatcacaaaaagaatgaatttttattattttaggagagagagagaaagacaagatgagtatctagttgtctttcttttcttcggtataatccttctttcattttcctctgttttctgaaaagactcctctcatctcagtcccaaaaacatattatttttttttttggttctttgagctgaggaggaggaagggctttacttgcagaagaaagattacaactttgttttcttctgtacacagctcattaaaaagc

SEQ ID NO: 196035 - DNA, 2835 bp, Cannabis indica
aaaaaaaaacaaaaacaaaaatcgaatcaacaaaattaaacctttggctcggttgataagggtggggcttcgacgaagatgagactatcggtggggactcaggatttggcctttcaagctcgagatttggttgggtagggcttcgacgccgaacaacaagaggagtgggagttcgacagagatgggactatcaacgacgtagggtttcgacgacagactgggttcggtcttgccggtatcgatcttcttcttgtcgcatctcggatgggctcccaatatagttggttttttgttatgaagggataaaatggggaaactaacactatgtttgatagaggagaaaggaggagagagagataggggtgtagggagagggatagaggaattgaattcccttgtttggcaagtgggagaggggggaaggaagaggattgatgaagggagactctttccctttcaaatacacaatttctaatccttcaaaaaatgagggaatggaagaaaaagacaaaaaaaatatctaaaatgactattttacccttcaaactaatatatataattacattaaaaataataaaatagtaattttaatatttattttactctttatcctttcagctttacttttaataccaaacaacacgaatgaaagtaactatcatatccatcctttttactcctcattctttcgaaactctccatttatactacttgcattccttcttaccaaacatagcctaaagtaaaagtacaaataatttggtataaaatatttttgggatttaaaattaattatttgagtaaacatttaaagatggttattgaaatttcacttacaaaaatcctaaatgaggttatagcttgttgaatactaagtgtaatataaatgccataaattactcacacataaataatgtaaaacaaatacacaaacattatatatatataaaaaatagtaaataacgatataagtactcaaagttttgagtttgtaagagtcataaattcaataaaaaattttagcggcataagcatcaaatgttaataaaattataattttccttcactttcttcaatatagattctgttttgaatttattaataaaatatttgaaattaattggtacaacatgtttatgtctagactaaatagtctaaaatatgagcatagtatgtgccttgttttaaataaaaatagtgtctgtactaataaaattaaaaaaaattataatttttataaatattatgtacttatgcctctaaaaaaattattaaatttataccactatttatcttatatacgtaaagagtatgggctcttaattgggcatatgtcaatgtaaattaaaagaagaccgactgtatagtgtatacccatgtgaatgcacatcccgtgaaattgaaagtccaagatagtcatcatgcttcacttattagccaatttacatgacacgtgcaacatgtctcgtgattgagaataataaatacaaattggcttggttttgctttgctttgaatatcacaaattttatgaccattccaaattaaatattcggctaattagtatttttgctccgaattttgacatgtgctaaattacgtcttttaaacttttaaagtcgttaaaaatacaccctgaactattaagattgttggattaaaagatattttttttttcaaatttagtaaaaaagtctaacatagatgaaagttcaaggatcataatttaatacatgccaaagttcgggagacatgatttggtagatatcaaagtctggggagtatgatttagtacataaacaatcattgaaacaatataattgaatgaaattagagaaaagtccttaaatccaacaatttcaatagttcaagggcatttttaacgacattaaaagttcaggaggcatgattcggtacatgtcaaagttcaggggacaaaaatcctaattaacctcaatatttattgtatatactataacgttaattatgcctacattattggtacagactcggacgagagaataatttttgtgtatatgtaacaagaactcccttaaaaataacaaatacgtaaaaagaaaacacaaaatccttgatatatgataatatagatatggtgagatgaaaattaagttaatgtgatcttgtaatagctacaatagatattaatccatgcatgatataatgcttccaaagttccttactacaagaaatattacttgccggctctaatttgtatcggcagaagtctactaaattgggcctttgagttcatgttgttcataagatgatacatgaaatgcatgtaatgttttgtagttaaattaatgaaagaaataatgaaaatgaaaattctcttttgaagctcctcagagaaaagtattgatgtataataatacaactcacaagtcatcagactttctttcttttttcttgttaacattaacatggttaattttaagattatactttagtactcttgagagttggcataatttttttttttgtgaataaaatttaaatgatgaaacttcttcaaaaaaatttctttcaactttttgtttttccagtatgtaggataaaaataaaaactctaagtttttttgaaggaaataaaaactctaagttagttgaatattgaatttatttatttattttgaaatggacaatattagattctaggtaacgtaacaatgcattcattcctaaattcggataattatataatacactattttttttttttatattttaatgtttaaagattttttttttgtatttttacattctataaaaacaacaagaaaactacataacatgaaaactacataaagt

SEQ ID NO: 196036 - DNA, 1548 bp, Cannabis indica
tctcgatcgatcgatcgatctaatacttaaagaagactaaatagaaggagagagagagagagaaagagagaaggagagtactagaaagggcgccagtgagaaagatagccggtgatttttttgattccaaatatagagagagagagaaagaaagaggctttttgggttccgacacgtggcggaataggagtggataactgtatttttcataatcatagagtataaaatccccagtaatcggctccaacaagttcgaagatgatgggttttgtttgttttttggttaaaaacgtcttgaatctgatatttgatttttgaagaaccctttttttgttaatcaaagcatatttgaagaaatgatttaatttattgtaaggatcggcttttatttatttattttatttgataataatgaagataaaaaataattttacacgtggagctagcattgccttaaaaaagatttcgtatatttttttaaataaaaattagaaaaattgtgattggttacaagtgtcaaagtaattagataatattttctttccattaatgctaaggtctttacatagtattttgcttttttagtccacactaccaccaatagctgctaaaagagtgtctcctttaattcaaaataagactgtttccttctttagttgtcaaattattgtttttttcttcctttctttctaacctctttccaagttgcccaacattctaatcggttactctaataattatatcaacttattattttccatcaaatgcattaccaaaatctcactttttctctctctctctctctctttattttttattgaacatctattagcatatttatttttacttctcatgcatcaataaatacacctccttaagattattaaaatttatttttattttttatattaacgtacattatatctatttaagatattttataaaattttaaaaaattcagaataatttacacaatatagcaaacaatgttcaaacaatctatgttacacgcgtgtaaaataaaatagtcacgcgtgcaacacactgcttgaatacaattttcgacgtgttaaacttttttcaaattttgctacatgaccatgaaaaaaaaaaatagactaaaaaattaatttcggatagtaaaacaaataaagagtatgtatcccttttaaaagggtgcattatagaattttcttaaattattatatctctaaatatatcactgtataagtaagttttaattattatttattaataatttaataaacctacttcgatttgtaacttagaatgcaatttgaacaatataattttattttgggtagagtaagatgactcattatctctaaaaaaagaaagaaagaagatgacttatattagtcaatttcagtcatcgtcaagtactgagtcagttgttggtatcctccaattaactttacatttccagtaggataaatatgtggtagggctagtacggagccacttgcaaacaattttttttttttttttacttttactatatatatatatatatatatatattaattt

SEQ ID NO: 196037 - DNA, 3035 bp, Cannabis indica
acctagacccagaccgggatccacatctgatcacggacccaaaatcgggatcagacaaagagtgggactagaacctcaacctaggatagtaacaggatcaaaacctaagcccaaactaacacgagaacccataccaggacttggacccagactgggacctgtgacttgggatctaaaccaagatcaggaccttgacccagaccgggacttggacccagacctaaactcacaggcaaaaacaggggccagacccaggacctaagaaccagactcagacctgagacccaaaactcagacccacattggtactgggacccaaactcggacccgaaccgaaatcgagacttggactcacaccaggactcgagacttgaaaccgaaccagaacacgaatttggacccgaactaggacctaggacctaaatatagattgggaacctagacacgggatttgggcccccaaattaggaccagaatttgggcctcacaacttggatcgggatccgggacatgacaccaaacccaaacttggacctaggacccacaacgcgacctcggatccgagaatcgatgcttggacccgacccatagtctgtgtcttaatctaggacttagaccagaacccgaacccaaactcaaactcaaactcaaaccaagacgtggacacatacccagaccaaacccacactcaggaaacaaaaccaaaacttgaacttgaaccgagctggaatcttgaacgggactaggacctggacctggacctaaacctttcctcggacccaaatcaagacctgaacccaaagtttacccgaacccgtaccccgtgacttgaaactgaaaccataactaaaagtaaattgggacccacaaacaggaccaagacaaggacctcgacccagacccaaaactgtaaccggacaaggactccgactcgcacacagacctaccctgggattgtgtcccaaacttgaatccaaacccaaatcgagactcgggaccaaaacccacacctgaactcagaccgaaacatggaacaggactcgagaccccgaactgcaccgtagtctcggtctcagacctagaccaagagccagagcgggacttgggacatgaaccgaaactagactaggacccgtgattgagatccagatcttgtcccgggatctgggaacttgggcttggaaaagacccatagtgcgtgtcttgatcgagaactcggacaaggacacaaattttgaccaggacctggacccagaccaagacatgggactcgaaactgaaacttgaaccagaacgtgaccaagaccctagaaaaggatcgagacagtgtccaagaccttgacctggtcccggacccagagtaggactgagactcgaacccaaacccaaacccgaactcgggactcgatttcaggcccaaaccaagcccctgactgagacagggattcgcacttggacatggacacgaacccagacccaaaactgaataccgacctagacccagaccgggatcaaaacacaagacctggactcggacctagacacagacccaaacctataataaaacccaaaatcgaacctaaactcggatcgaaacccaggacttagaaccggatctaaacctagactcatatcgagatcggaacttgggactcgggccttgacctagaccagacccaggacccgaacccacactcggagcatgatccaaaactagactgaaatctagagcagaacccaaacttaaacaaggactcgaatcactacctgaactcaaaacctaactcaaactcagaatcgcaactggaacttgaaccagactaggactatgacaaggacaacgaccaaaactcaaacccgaacctagataaaaatccagaccgagacacaaatctgaactaaaactaggactcaaacctgaacctagaccgtgacccaaacatagaccacaatcaggacctagacctagaatcgagatagggacctgggcaacagaactaggattgggacctagtatccgacgcaagacctagacttgaacgtaagacctagctcgtgacccaacacccaaaatggaaccaaaccatgacccgagattgggatctagatcttgactcggcgcttagaccgaacctgtagtcaatatctggatctggggcccagcctcagacccaaacaaagacaaggacctgaacccagtcccagacccaaacctagacctgaacccgtaccctatgacctaaaattagaacagaaactggaagtagacctgaacccaagaacgggaccagaacaaggacttagacttggaaccgtaactgtacctggacattgacccagaaccgtaactagactaggacctggacaccaactcagaccttgactcgaatcgggacccggacccagacctgaatccccaccgagacttggactcagaacccgaactcaaacccgaactcagacccaaacatggaaccatactcaggacactgacccggggctgggacctagaaccgtaccactgtctcgatctcgaatctaaactcagacctgggaccctgcacctcaacatgaactagaccgggacccgtgataaggatctagttcttgactcgagatccgtgaaacggagcttggaacagacccgtagtccgtgtctagatttgggactcagactaggatccaaagtcagaccaagactcaaacccggacccagacctagacctaggacttgaaactagaacctgaacaagaaccgttggactaggaccttagaacaagactaggaccgtgacaaggacccgaacccagacctagaatcgaactcgaacctagccccaatcccaaattgagaccagaactccggcccagaccatacctaaatctaggacccaatctaatacaaactcggagcgagattgggatctggatacgaactctgactcagacccagacccagactgggatggaaacctgagatgtagatctggactgagatcctgacctacactaaaacctagacccgcaccagtgac

SEQ ID NO: 196038 - DNA, 2458 bp, Cannabis indica
gttcaaaaaactagttgatgagagagttccttcttatgatttcaactcctcattgtcttccacattcaaaaactcacagtgaatgagtgccatgcccacacatagcatgtcaagtgctcaatcatagtgagtaagttagtggtaaccaaacttgaaggagagaaagagatccagattcagaccttgataatgctctgctatagaaaggaatcaagggctagagatattgaacggaagcagtcattatattctgctgcaatcaatgtaagattttcttaacccttatgtgtttatttcattattttagagaattcatatttaggatgttaattcaacataattgttagtaaatctagatcttggtaaaatattcacaacaaaaatattggcctcgctaagggaatattaattaagattgaagattcaagccaagcttcttcttgaaaatagtgacgccgaccctcaattatctcttgaagaattacctacaacaactagaagtttcatcttgactagacttaatgatgtgatcactaattctctcatcatttatttttaagaatggtttgaggtgtttgatttttgagcttaaattttatggcagaaaattgaggacaaactgattctaaggattatggaactgtgattttttaggtaaattgggacatggtcaggtatggtaatgtctcaatttgtagaaaaatagggcacaaataaaacctgaatcctttgaattgtataaccttaaattttcctaacactagatttattccggcaaacaaaatcaaaacaccggaatagtaaagtaatacagacaaataacacactaagaaaaagaaattgtgagcacacaaagaaaaagaaagtgtgtcacttactatcttgatgataatttctgggcagagaagaactttgcgatttaaatttttaaggttgagaggttgggtcttgatgatctctagagcaagaaatttgatcagatgaaatacacaagaaaaatgtaagggataatgagggcatgaaaatttgagaggaaaatggttgagattctggcgaaaactcgaaagtttgaaagatgaaaatggtttaaaagatgcacaacttcaaatttatacccaaaaggttctcactgttagatcaagagagatgtaatctaacagataggaactttacaagaaaggaacagtcagagcataaaatgaccaatgacatgcctcgaagttttgaactacgaaattctaagcatacaatttttcaacggcatagatatgactatacccccagaaacatttaaaatgtaccttttagggggtaaatgttatacatgaaattttgttattaatcagaagctgacatgtgtcctacaaaaggaatatgaatcagctcaaagaaaatagtaattaaattgcattattaaaagtgattaaaataactcgttccaataaattaaaattgatagaaatattcaaactcactgactacgtgagcatatgcaagaaaaaaataaataactattaatagatataattgatgaggcaatatgtctgccttaggagagacggagtaaataataaaaacgtgcaagatgagacatcaacaatcttgcagcatattgaagcacatacgtaggaataaaagcttgcaactcattgatccacatacatgagtagggtgaaaataactacactcaaccatctcgctttctacgcgacttagtagtcatctcactaatgtcattgtaacatgagaatgctgcgagaagaagcatgtctacacttagcattttttcctctaaaaacagataagaaggataactcatactcaacgagaaacaaccttcttagttagcataactgtttaaaaagacaaggagaagttgggtagttattcgatattattccatgtgcaaataaatgaaatgtgggaaatgtgcacgtttcatcagccgttgtaagtgaatcgatcccaataaaaataactgtcaatctatacacctataaatagggcagaatccatgaaaaaagggacaacaaagtagagagagaattttattatttatcattattgggaattatactctgaattcaaataaatatccctgataatacgaattcgtggagtatgtatatttcaactacaaaatcatgtaaaatatctagttttcattattattattaaattctatagtaaatttattacgtaaagggctatatatttggttaaccaaaatctacgttaacacttgacaaaccaaaactgtttaagcgggaaggatcaattacaattcatagttgctgtttccaccacagaggcagaattcatgacgactactgaagcttttaaggaagctttatggcttcacaaaatactttatgagttaaaacaaatcacaggaagagtgactgtgtatttggatatccagccgtccatcaatatttataaaaatccagtttatcat

SEQ ID NO: 196039 - DNA, 1581 bp, Cannabis indica
tttgcaggaacaaacacatttgacaggtttgagcttcgtgtccataaaagagtcattgacctcttcagctctccagatgtggtgaagcaaatcacctccatcacaattgagcctggtgtcgaggtggaagtgacaattgctgactcttaagtccctgccccataatttaatgccttctccacctcattattagttgataagaaattttcttttctatgctctcattttggcttaaacttggatgacataatagtgttagcaaaggactggccttatattcttatttttgagttaaaactactttgtgatgagggaattttgtttgttagcagctttcgtttcaaatttttggttgatttactgaaatacaacattttgattgttgaaaaagcctcgctccaaatattgtttttttttctttcttttctcttctttgagtttaattctgttacattttttcttcctgatgttacttgtctttattgaagtcgttgaggcaagtaacactttgaatttgaagtagtaaaatttaaaatggctggatcccaaatgaaaattggttttatagtgtatattaattgtttgtttaatagacaattaacagtatgttgtcgttttaatttcaatttacctatacatatcattacgagcagtgccatcaaatttttccagtagaaattctgatatacacatgtatgatatgtgattattctgattacatgcatccttttttgagtgttgattaccaggcacttgaaattccaatagaaatttcaagtctagtattgattaccacttaccaggcacttgaaattccaatagaaatttcaagtctagtgttgattaccaggctcttgtacatcattttattttgttgaatgattagtcacaagagaagacactcgagcaattataatctgagctgtaaaatctttcattccaagtctattttcctttgttgttacgacctacgatatatcgtcataattaatcctcataattacgttttgctaattctgctactgaattcatttcctcctgataattacgttttgctaattctgctactaaattcatttcctcctgataattacgatttgtccataacaacagtccatcaccatacacactgagctcactgaaataattcgtttatgtagtagtgtacacaattgaccttatattacaatcttcatctacactacattgctttaaactttaaaggacacatcacatggcttgctttcctttacgaagaagaataatctcttggttagcaaattcaataaggatatcattaattattatgggtagagtgagctttttcttggctcctactagtactagaaacgcaaaaaactaactataagcgaaattaatgtacccgaccagacccttgttatatatttttcctattttggaagagactatatcgccacttgggttcgggcggctccatcatgatccagatccgaaatgtagcggttatatcaagccaattattcgtcctagttacttatgggttggttatgttgttcacatttcaacacaaattttagagaattgtttatgaaaactcat

SEQ ID NO: 196040 - DNA, 2384 bp, Cannabis indica
actagattcgacacaaattatacattatgcattgaaaataatacataatatgtaaggattttaatatcattgtgatagctcgtgcaactgatgatgttcttgatttaaagtttacaattaatgttaattttttcatttacctaaatatggctacgtactactaattaagtaagtatgcatgcaaagaggagagaagtttatctatcaactcttggattaaatcacactattaattatcatacatttatgtatgggtttcttgcatttattagtgagaagagttctaatgtaatttcctttttaggatatatgtacattaattgttgtgtttttagagagtaaaaatgcaatgaataatgttttgaatgaagaagtccgaaattagtttacttaaaaaaactatattaaaagatgtatatatataaatagaaatataaatatttagtattaaatgtttgttgagtagtgttattattataatttcttaattaattttttttatctaaaaacatatattggaatttttttaaaataaaaattatggtattttttattgtacaacattattcccgtacttttgattcttttttttaataatttattgtttcgaaaataagtatgaagttttttgaacaagtgtaataaattgaaatgtcagaaactatatttttcggtattgtaaattatttaaaatttattaaaaatttacatagataatattgtaaatgtaacaaatacaactgtaaaaaaatagtcccaatgtagtttccaatgtaaaaattaactaaaaatataataagatattataatcaagactatcctctcaaatgtgaaagcaaatttcaatgctaaatattactatatatttttaatttacaacagaacataattatccctattattgtaggtatatgaatcccaaagaaaacaaaatttatagcctccaaaatcttgtatgtcttatattattacatcatgttatttctcactctcgaagctaccctaagaaaaaagcacatcatgtcccatcacatatacttttgagtttctatcagatttttcttttttttttttaaaaaaaaactattaatgcctgcttactgtatatgtaacatgtatatataaatatataaacaccctatttctattccattctcaactttgtttttctctatcaatattgaatatcattcttcccaacaactaccatgacaaacagtactactacttctactactaaactaaacccaaatgctcctattttcatacccacaatcccattttcttcttcttcttctgatcatcaacaatactcaaacccaatatcatcaatgcaatggggcccaaaaacagagctgaaaataatgacaaaagtattttcaaaaacattgcttgtggccccagaaataagaaactgcccaaacatccttcaacgactacaactccaaaatcaaaccattccattcgtaacggtaacggtaacagtaattatggccctagaaacaacagagtattatgtaaacccaaacataataatcactctattggtggtggttttaatgttactactcttatgattcgtaacattccttgtaaatatacgtaagactatactctctttctttgtttggcttttaattatttatatatagtttagtttattatattatttgatgatataatgaataatgggttttgattaatttttcaggaggaaaatgatgttggattttatggatgattactgtggaagtgaaaatcatgatcaacaagaaaagggaccttataataataagtcagcttttgattttctatatttaccaatggattttaggtaacttattattaattcataaggttaatgttttgtgtagtgagtgttttaatgttgtaataatatatattgtttttttttgtcttacttatcagaactcattttaacaaaggatatgcctttgttaattttactaatccaagagcagcttctaagttttggaaagctaaagataatcaaaaatgggattattttcaatccaagaaaattcgacaaattgctccagctactattcaggtatgtcttaattaatttgtataaaagattataatatatagtatcataaatcttattattttataaatataaaagggatatatgcattttctaaggcatatttaaatttgttttttagaaaaattacatttttcctaattttcttatgaagaaaaaaagtttcattcatcacaaaaaaacaagattacaacatgactactctcaaaaacgagcagccaaaacaggacaggccgcccttaatctacattaggcgcgattttcagtactattaaaaagcgacctttcggttgcccccaaaaatgttgtagggtct

SEQ ID NO: 196041 - DNA, 1299 bp, Cannabis indica
tttttggagaattagtatatgcagacatagatagctagatagggtcttcaatgcaataattctcatttatgtcatgaggtaattaacacttttaaatgtttgcttttggttatttaaaaaaaatccaagaaaatgttttgttattatgtttaataaaatttttagaggtattccatttaaaataactatattgaggtttttgtttcataactttcaaaaatttatattagtaagagtaagtggtgatccaataatttttttagggataaaagtttctagaattagtaaagtatggaaataaaaaagttaaaaaaataaaatcaatactattttaaagaaaccaaacaacatcaaaatacagaagtaatagaagaaacaaaaaattgtaactcccttctcgaactataatcaaaatggttataattataagaggtaactcgcaacaaaatagtgtttaaagtgcttcaacataaattttaagaaagtaacacactgaactatgaacataatctaaactaaaaaattaatataaaattaattaaagtcatgtctttttcatacacaaatatatataatccaaaatcattggtgtccactacttcttaacataccctaacctaatcaccactctccaacctccttgttacgaccatgaaatgaaggggatagattattatgaagttgtataaaaattcatgtcaaagactagtcattccatatattggaggttcaatgggtcacaatctaaattgaatagtctatcttcattttgttaagttagttccacattgataatgtgtggatataaattgtgatgtataagatgaatggattactcttctcactgccaattgattttgagatggaaccccagtcaccttgttctctaaattctaacatagtattagagctacttgtgatccgttgtgagcccaaattaccactggtccaaacagaatcttccgctgtctctcctttaacctccatttgggacctttcggccaatgtgtgccaatttccagtgttggggtctttgacttgttccaaaaatccacaaatttcggtcatgtggtctcttaaaggtcattcgttacacccacacttttcaagcccaaatgtgaggagtgtgtattaagagttagtcctacattgctaatatgtagatataaattgtgatatataagatgaatgagctactcctcccataaccaattggttttgagatgaaatctcattcatcttattcccaaattctaacacatctttctcaaaagaaaacatgatgaacatgtttcactc

SEQ ID NO: 196042 - DNA, 510 bp, Cannabis indica
attaatatataagtgatttgcttttgatattgttacttattagttaaagagtaaattatggatttttcttgacattaaaacgtaaataaaataatcatatacagaaattggattaactttacggaaaaattgtgtgtttttcccaactcttatctttttatccttaatttggacaaaagatgacttgtttaggatactttttaattgtttattttttcgttgacagagtttagaatagcttcatgcacttgagttgagatctcttattttttaaataatattcctttattagaatacacctagtttacttttttttttcttaaatttcaaattagaaaaagtactgtgtaaaagtacagtactttcataaaacgtttataatgaatctaaatcggataaaaaacaaaacaatagcaaaagtgatagttggcacttgagtacttgcctttaaatggaatgagataatcaaattgaagtataaaattgatttattctaattattttttattt

SEQ ID NO: 196043 - DNA, 1772 bp, Cannabis indica
ctacctagtatatatatatatatatatatattacttttaaaactatacgtatttaagaaaaatagattagttagtttcaaaataaaaataaattagttaggatatttatcatataggggattatgcttttttaattttgcttctctaatttttaaaaatttaggagaaaaaaatactgttaactatatctactatttttatacatttttttttgtttatgtgtaacagattatataagcaataattagaaattttattttttttctttggtaaattagaactttcattttgtgaaaaaatattaataataaaaatcttatcaaaatttgaattaagatatatatttagttatgaatttgaaatacaaattattataattatttgaaaataaaataataaaagaaaatagataagtaggcaaataaataagaatctataagagagtaattatgatttttagaaaattaaatatataaatcatttaatcccgtatatggaaaaaaaaaaacaatagtgtaattataacacacacaaaaagcataatatttctgaagtaatgataatatactaaaaataaaaatatatgaattatattaattgtagacactttgagttgacaataatataattttggattgacacgttttcttttgcttcaaaacatgatgatgtcaaaataaaaattaaaaaagaaattctatcatacctctattcaagagccatcaccaaatgtagtctttcggcatttggttataaactgaaagaaaagaaaagaatggtgggaaaagagaagaggatgaattagtatattcagtagggtacatcgatgtagaagttagttttgagtgagatattatagggttataaatatatatagatgtagaaatagattgcgggtgagatattattattattattattattattattattataggttagttttattttcaaatctattaattatttttgggtattatatagatattttattattattttttattttttaatataattaatgatggtaaaaaatataaaaaattaaagaaaataagtaagtagatacgaggcaattttataaatttagtactgttttttattgattaatcattaatatttaaaaaaataaaaaaaaatgagagaattaacattgctacttagagaaattctaccgtgcaaaaaatgagagaattaaggagagaatagaaaaaactatttagagtgatttgagagtgacacattaccgcctttatatatatgtagatagatatatagatatagatttttaaaaaatatttatcaaatttataatttaggatatattttaattaaaagtacattaatatttttaatttgataatatagaatactttttattctattttgatattttttataaataattttttacatacaaaaaattgtttttaaattttaatattaaaaataaatatatttttggctccctgcgccctgccctatgttagatagatatttttgttatttaaaatcaaataaacgcaaaaagtcacaatcagagtgtatatagaattattaatttttgtattttgatgatttatttttgttataaattcccaaaaattatagtatatcaaaatataatccataatgcaattcttaataataaaaacaaatttttctctaaaaacaacttcatatataattaaataaaacaaaaaaatacataatattcttaatttatatttatacaatataaattactaaataaataaataatataagtaaac

SEQ ID NO: 196044 - DNA, 2527 bp, Cannabis indica
gaaaaaactagaatttttattggttgctatatttggttgaccctggatcaagtcatgagtatgatcccactatcatgattaataatgaaatgaacggttgtgatcactttattatatatattttttattttaacatctcaaataattttttttttattttaaattttataaaaattatataacaatcaaaattcataaaaactaccaaccgactaccaaaataactgaaagggtaaattagaaaaaaaaaaatagtttatggaataaattttttttccagtttggaactaagtttttttaaaggaaaaacttgaaattttgaagtgtaagagaaatttcaagtttttaagaaaatttctgtataatataagatataattatagttatattttcttaaatatatcttatattattatataccaaatagccttctctcatttcatctagtgatcatccatcaaaccctcatcctaaatgaattttcaaagaaaaaaaagaaagtgactaaaaaattttatgatacattttattctttgggttctacaactatttgttgaaaataatgtgatgccttaacttttaacaccaattggaaaatgacaaacaagtaatatgttactcttttgtttttagttaaaaaatggacataacgtaattgggtatctagaaaagataagtataaagtctatcttaaaggatactcaatatttaagttaggatgtgtagttattagggtagtaattatactatataatacaatataatattaaggtatttatatggtgtaatattattgttgatgtagtttaatattagattttacttattttactttaataatgattatataaaactgctaacaaattttaagatgctaccttatagtagtgctaggacagtgtccatatagcaatgtaaggtaccagtagtacctaatatcacttagaggtgttgatattccataaaagttattacattaaattataatagtctcgatacttaattacaataataacgatataatacattaaagaatcctatacatcagtaatatttttttttacatttcttaatacaaaagtatgttaaaaaatataaagtgtaattatatatgaatttttagtaagtttagtatatttagtaagtaactataacaggaaaatattaacttttagcaagaaccaaaattatcttaaactactcgaaaatcaaattctactgtgactttctaaacacatccttatattcataagctttttttaatttaagatttgaacccagaacctccaacacacacgcacattcttatgagtagttgctcaagaatccagaacctccaacacacacgcacattcctaagagtagttgctcaagtggtttatattcataagcttagatgatgcatatatgacctagtgttggataacagatagatatgtcactgtaatgataaagtagattctgtgattttgtgcctggtatctttgagtctgtgtgctcttgttattggtggtccaatttttaactcaaaactttataattctttgcactcaaatcaaatcacatttttcacattattattattactattcttttaccaaactagaatattcactttattttattactatcttaaaaataaattatatccttatttgctagtactattaagtaaaatttagaagtacattatacataggtacaataattgtagtaggcagttccactccacagatcttttgttattttctggtttttattttttattttttatgatatgggttcttcttatcaaataaacccataatacaaaatttgaacataatttaatttacaattgacaataattaggtaaacgtatttgattgattcattataattactacaatttaaaagtgcaatctatcaattaagtcttcctatatctttaaatcagaagcagtttttatttatctaattatcaaaaatctactaccaatatgtatatatagagttagggagaggatttagttacataatcctagttagactcgacttgctcattaaaggcttcagtaaacttgaaaaatctacacttttgctttaactagactttacacacagatgttaaattcattaactatagatcactaacaatatggactaacacagtgggaacaaacaagaaaaagtgtattgtttgtgtatttgcttggattctgcaaaaaacagatgaaaattcgatttgcatgaacatgtaaacaaattgatgattaatttttttttggggcctaattaatatatttttattttaatgtgaatacagttagttgagaaggatccaaatgcagccatagtattattttgggaggcaataaatgcaggagatagagtagatagtgccttgaaagacatggcaattgttatgaagcaacaagatagagctgaagaagcaattgaagccataaaatcatttagaaatcagtgttcaaaacaagctcaagaatctcttgataatgtccttattgatttgtacaaggttagttac

SEQ ID NO: 196045 - DNA, 1124 bp, Cannabis indica
gacaataataaaatttaaagaagaaatataagatggtgacatgacactttaaaatcaattaaaatacatctatttattttttctttaattctctcatttttataactagaaaacagcgcacttcgcgtgcggttctttttgaaaattttaaattgtatatgaatttttttattgttttttgttcaaatgtaattaattaataaaattgtattgaatttctttaaaaattttctatttacttttcttaactatataataaaaataattaatatattatagaatgtcatattttttaattattttgaactgaataattaaaaagtctacatatgtattaaaattttagaaataacataatatttttttttatataatataaatgtgataataaataaacaaatgaacaccaatgtaataactcatgacaattttgatctatgttttaaaatttatatattatactttgtatcaaacataaaactaaaactatgtttagtagggaggagagatagttggagggagaggagtggagggagagagtagaagtgagaggtagaatcaattgtttggtagtatagaaaaaagagagggagacctttttccaccaaatcccaaaaatcaatcctcccatttatggaatgattttggaaaaagacaaaatgaagatacaaaatacaaaaagtatcctttaaaaaaataacaaaataatacaatgataattttagtaattaattttctcttcatcttttccaacttacacttaataccaaacaatacaaaagagaattactatcctctccatcattccaaaagtctctctccatctttctctccatccattctattctcacaccttcttaccaaacatatagtctataaaagtagacaattttaccttccatgtaatgcatattatctttacatcttggccatttaaactcagtgtgatcaatgtatctcatttgttgtgagcaataataaatcaaacaataagttaattactcattgtaaataataaaataataattaaaaaaaaaatatatgcagcataagtataaattttcttaaaataatttaaaagttcattgtttcatatttatatcatcatataaaaaggggtaagt

SEQ ID NO: 196046 - DNA, 1225 bp, Cannabis indica
caacaacaaccacaacaacactctgaatctaatggtgaagatgatactgatttaggagatgattagtacttttgtatttaactattttgaaccatgattgttaaaaatttctaactctaaaatacattttgttttaagttaaaaaattaagtactaatagttataaaatgatttttaattagtcaattttaattttaaataatataaattattattaatataaatataatagtaaatgtatttttacatacttattgcacaacatatcctcagaatagttattggtagtatatttttttttattctccataataaaaattgcgaccatgtatcgttgcaatagctaatgtaattcaactttttttagaaccagtactatgattattgcgacaataagttgtcgcaatagggtacaattttaaaattaaacttgctatattgagacaactagtcgtcgcaatatgttcgaaaattggttttttctaaaaaatttcactatctttttagagacaagtagttgtcgttatatataacactattgcgacaaaggccaaagtcgtcgcaatatagcatctacaggcacgaggttattgcgacgactttattgcgacaatatattgttgcaatgactttattgcaacgaatttaaatcctgttgcgactaatattgttgtcgcaatagaccctttttcttgtagtgtttgctttctcggtttcttacttgaggcgggtattttcctgttgggagtcatcccggtgcttactcacaaccttgcattgtgatagtagcttgtggacctctccctctaagtactcaagccgctcagagagtaatcaattggaagcaaaagaagccaaagaagcctggagaatttgcaaacagatggatatgaaagaggtgtaaaacagaataatataattataataacaaagccaacgtaccatgaagtggtagtccaagctccttgaaagcatctcttttgaactcctaagattgcgaaaatcccaatcaaggggaagaagagtttgaagtttgcgccaacaggcgactccatatgcctgggcaaattcagacccagcttcccctactgcgaccgacagggtctcaatggcctggctcgaagaagcagtagcgggggtcgcctcgagacgaggagaattcgggtactactgaaggaggaacttgctcttgaatctcatcattcgaaacctcgagatcgatagg

SEQ ID NO: 196047 - DNA, 523 bp, Cannabis indica
caagaagtatgctcaatgtagcgagaccaagtttcctagaatgataaactggaaaactctggaaggccagtagaaacaagatgtgaaggcaaccagcatcgcactattgttcaacactcgagtaagattcttttctgttttgcaagattttttttgttaattcagtaaaactactagtttaaaagttgaattagttattcgcgacttgtttcgcgatttcatttgtaatttgtagatgtatagtactttataaaaattattttctaatttgcgacttgttttgtgatattttgcgatgtcatttgcaataattttttgtttatacttactttttaattcgcgatagtttgcgatttcattcgcgatttgggtacatatttttttttgagatgctagacctgttttaatgacatgctatcgatgattttgcgacatgttgtgattatttgcgatttagtttgcaaaatattttgtgacatttttcaacaatttttaacttctgtttgttgttttttttttgttt

SEQ ID NO: 196048 - DNA, 836 bp, Cannabis indica
ttgcagttggtcgtaaagaagtgcttgttcctcgacccagtgaagaggatatttcaagtccattaatgagggtaaattccctctttgtttcgagatggacatcgattaaacggtggaggggagtggtacacaagagtctgtgtttcaaagccaagcgaataccattaatgaggtcgtgacaaaggcaaagtagttccgccaccgccggcaccagaagtaaacgagacgtctactttagctgctctgtccgctccagtctacacatctgtggataatgacctagcaaagaggttggatagacttgaggcctagcaggctgccatcatattgccacagacagagttactgaatagccatctcaatatgaggcgatccttttcaaacagtcagaaagatctgaaggagactttgttaactaagatggccattttgatggcaatgttgaagctaaaggagggggaaccacaacccacccaagcaatagatgacaaagcaaattgccaacctgtggagagcgataatgaagatgtgttcccaaaagattgggatctaaatgataatgaggcaccttctaccccaacagaagcaattattacgaccattggtgatacacaatcacaggacgatatcctactcccacaataaactcaatgttagctcaggtcatctcatttgccagttgcttggagatttgtttcattgtattcatttagtttagatgtttataacgtccccacttcaagcctccattgggcccttacactcacggaataatggctctcatacacgagtatatcattctggcttcttcacggactaatgattgaccctacaaa

SEQ ID NO: 196049 - DNA, 1712 bp, Cannabis indica
ttgtagttagttaaatttatttcattatgatcttgtatttatagagatgatactcattcaattcaataacaaaaattcattaaaactcccctctctttctcaatatttaatatagtattagagtaatatttttttttctatttcgccattcttgatcatttttcttcatctcttgttcgttttctctagttttctagtggcatctatggctaaggcaacacctcaagcattgaatcctgttgtttttgctcataaagtgtctgtgaaactagatgataacaatttccttctctggcacccttaaatattattagtaatctaaggtcatcatctataagactgttagttttatggtactaaattaggtaacaggaaaagagttgttactaattattattgtaccatatgtccaaaatcaccgtatgtattatattaaattgaaagtaaatagatgaaaagaaccttttgaagcctatcagggtattcttgattctttttgtatgttgtatatcctctgaacggtgatgacaaaattcataccttgatcttccagaccttccaccacacacatggactagtgtggactagtaggataatagtgtatagaaagttcttgattaaatctcaacacatgagtaaaaactatttcttcggtgataaagagaaaaatatttattgtttaatcctttttacgctttcagaaaaattacgtacaaattcttctatttcaaaaagtatagaattttgatttatacgatatattaaataaacccaataaatattttatttaattaattatttaaattcaaaatttttattaagtcatatttaattatttgaataaaaatatagtgaattttgttatagatatttatattctataatcgattaatggaatctctcaaccacttaagagaatatctcaactactttttatattcaaatatttatctattgaattaattaattaatacaaaaagataaaactaatggggacaccttatataggtggcgcatgcactgtgtttggacacaatgcatgtggcgcctcctttgtcttagttaagacaagatgtatgtcttttgtcttgttaacttttatcttatctcaatttaattaatttgaaataataaattatttattacaaaataaattattactatattgacaattcaaaatcaatttttctgaacttccatatacaacttttatcccaccccttgatagtgtttcaaggttgcaatctgggaattatggacctataattctaagctccaataaactatattatttattgaatctcatcaacaaaataatcatgtttattaattctataattactccactataaatatgaaattgaactcttagtaattacagaactatatatacttagttttattgtgatgcccattgatatagttaattccagtgattagctctccttgtgtcggttcctaactagttttggtcaaattttcattttaccattttaattacttttttttatttattttgtaccgttaattcactagtgaaagtatagtttagattcaatctaaatttgtgcacaacttttcagttccaaaattttaacacttaaacagaaccaacatttgatccgttaggtaagtaaggattccatacttgtggatcatattcccagctattcacatttttagatttctaaataaaagttgtaagaatcatc

SEQ ID NO: 196050 - DNA, 1361 bp, Cannabis indica
agttcactgtggcacttaattgagactttcggatgaaagtgtaaaaagtaaaatagaatgggagtttggtaggttttgccgtaaaaaaatagtttatgtgttaagtgttaaaaaatataaaatttaagtagttttgccgccaatattccttaataatatttatttcaaattcttccttaaaaaaaactaaaaatatacatattctaatatttttgttaagattttcaacaaacaattttaagaacttaaaaaaaaatatttttttttcaaataattatttttatttattattctttttaagaaaaactatgttactataaatcattaacaagttatttaatattagggaaagaacttcctccaaccaaaaataatattcatctaacactagagtatgtttggttaggccatgggcaaccaaaattggttgatcgtttagcatgagtaacacaaactctaagaaaaaaggataaaaaaactatgaatatcagcaatgaaatcattgaagatagaaattgctaatgtagggccatttaaggcacatgaaaccatcaaagcatctgtctccacatgtgttattggcaactgttattgaagagcccaattgagactataaaacagagctttagcttccatttcgtgatatgcataatttccttgcaatgggttgcaaaaagcagcaacaacttggcccaaggaatcacgcaccacatcgcatacaccaatcttattatcaaccttttacaagatgcatgaacattaagctttaaacctccagttgcaggcgacttccatggggaactaggtggcaaaggtcggcgggaaaggagagcttcaacatgtagagcaacaacatccacatcttggttgtgttaaaccgtgcttgacaaaattataggatataacttttagaaaaagatgcaatgtattgctaatttaactttttatccatgaagaacttgattcctctctgtccaaatggaccacagaacacatatgatctcttttattttaggtttcgagtagagagaggataagtgaactaaataatcacccttatgcatagacaatgcttgtcaggaatcaattggaaaatcagtattcctccaatcagctcaagcatatttgcagctgaacattgcatgtccaattgattcccaggcttatttacagacggaacaagtaacatcagtgataacctttcatctcactaatgtggtatccaccaacagtgcatcatggaaaactttccacacaaagattctaacctttgatggcaattttaaagactaaaagaacttcctctagtccacatctgaataagaagttgaggcatcgtttaattcagcaagagaagtggc

SEQ ID NO: 196051 - DNA, 1727 bp, Cannabis indica
taaataagcatgtgatttttgcagtagccaatcaattttgtaaaagctacaattttgcatacaacttgatgccactaactaagtactattttgtcctacctcttaatttatttaattatttattatataataataataataaaaaatatttgctacatttcaaaaaatatatatataattgctagatattggtgatggtgagggggctatagagggtcattttagtaattttactctaaacaacttgcaataatttacatattatatggagataatttatctataaataaaatcatcaactattgtgcactatatatgttttgagtaaattttacttataattaagatgatagatcttttttttatttagttcttttttttttttaatttatttagtttaagatttgcaagaagatgtgtaatttattaataaattatagacattgataaatacactatatattttaactaataagatactaataatattatatatattattattagtataattaaatattttatatattttattttaataattaattattcacaaattaccatgatagtagtatacttgacatcattgatacataattttaatactcttgactaatcaacatggattttttttttatatatataattattacaagaaaatagttttagaaaatgatgtttggggaagggagcaatatattattgttaaataataaatacagtaaaatatatattagtgcatatcatattatataattaattaatatataaaataaatacacatcaatctttgaattaattctaggtaagtcaatttcaactcctttgtccttgacaatcaagcaaagtatcaaaatgctcttttaaataattggaagagaatatgtatagtttatttattttttatttatttgataaatagtgcacatgtagtgttttgattctatataaaaatatatgatttttggctttgacctttttgagcaaaaaaaaaacatgtagagattgtccaaactttcccactaaattaagagtgggaaagtttggagggaaacaaagccatttgttaatacttaattgtacataaaaaataaaaaaactagataaaatcaaaatacaattgcctaaattaaatttcttttactagtggataatattcaacttagagattagatattgtaaaattgagattttttttttatcaataattagtgtatcagttataaagattttatacctcattcttctttaattaaattatcaatatatacacaaatctcaggtacttcaaaggtcatccatatgtaaaattaagatttaacataacatatgttttgtacttaaatattgtaataacatactatattgttccctcaaagaggaaaaaggaaaaaaaaacctcattatgggtgttattattatcttttatcattatcaaacttttcattcttatgaaaaataaaattgttaattataaccttcattacaattttttaattaacttttctgtccgaaattatatgccgaaatattttttttcatttttttttcatagcagtaattcgttaaagttacagtattattcctataaatttttgaaaaaatttgaataatttacagtaccgaaaataaagtttttaccacatgtgttcaaaaaacttcaaacgtattttcaacattgtagactattcgaaaattttcaaaaatttataggaatgatattgtaa

SEQ ID NO: 196052 - DNA, 2706 bp, Cannabis indica
taattttcaaatagtaaagaatccagtgccctaagaggagtaaacatattgataagaatttctcaaagtcaaggattttataactaaggaagatgtaatagtgaacaaggttgatgcagaatacaacctgtcaaatcttattacaatgacaatatcacatactacacttgatctagacatcaaaaaggtgagattaattgaaattcacttttagttttatattagtgcaagtggaaatttgttttttatgccataaataaaattcagttcaatataatcttatttactaattaatatcaaaattcattttatgttgcatggttcacatatttactttcatgattatatatttaatatataaattctattaaatcacaagcatattgttatttatgattgttgtttgtccacacaatagaaagtaaactcattagtgcaattgagtgagagcattcattatagatatggaatctatagcttctataagtatttagaaatgaaacggtagtttcttttgagcttggctaaatgtgataaatgatagagcgctcattttagtaattacattagtttattgaaatatcatttacaagtagctaagtatttttaggataaaatatattgaagggtaaaatggtaaatttatcactactcaatgtaaatcgtctatagaggataaatgattgtttagattgtattattagataattcatagcgtatctatatttggtatatagagcatgctatgtaataaagagtgcaattctaaatctataatggagtgaggaggaattaataagttaagaaatttacttaataaattttaggtctacttattaggaacttggctacataggcccatagttctcaaattctctaggataatatcatctttttgactcaattaatttatttaattagtaaattagaattcaaaaatagattatgtcttattgaagaatttttaccaagtttgggccattttgagaagaaaagaaaaataggggtatatttgttaattagtacactttgtgggtctaattaataaatgtatttaaattttattttatttaataattattaaattaaaattagtatttaaataattagaagagataattggtaaaattggaaaaagacacattgtttctttaaattaaaataaagtggcaaaaatcaaatccatgaattttcttaagtgaatttttgccctaggttatttttaatcccattgtatttattttaagcccatctcttctaaatctacctgtaagtgttggttatataaaggaagtgatgagagagagagcttaggtgattccattctaacctaatttctagatctggcacaagaaaagttctctcctcttctttttatatttttgaaattcaaaagacccaattctctctcaaaatatgttccaaaggtgagttgagcattaggccacactattgaaggtgatacttagacctttatggaagattatgaagaactataattcttttagttaatgaaggagattcaggttcagtacttgttactctacaatagaatgaaacaaggattatagtactgaaaggaaggagacattatattctattacaagtaatgtagggtatcttgatcttttaagtttatttattgttttaggatcttcatatttaggatgttatattgtaaatgtataatcaagcatacatgtttgtaaattaatgtcctagtaaaataagttccaacactctctggaccatcataactgttgcaaaatataatgttttgagaatcaagagtgtagtggtttgttgttccaaaaacaaggtacgagtttgcatttgatcctcaactaggattaactacatttgcttgatagatggtgcttgacacatgttagatgagtttcctgtgaaagacttatcaaacctgtagaagcagttgtgaactgtgtgtcccaattttagacatagctgacattgtgttcaattgcaagcatccataaacttaccatatcacttgttcatttgtggccctttgttgaaatttttgagattcagaataggaaaccctagaggagcataaggtgagggattaggtgaaatccctctaaatttatttttctaatggagtaaccattgaattggggaccattgtactgagatccattgtatttagatggagattgatatccgaaccttgaattgcgataagcaagattagctttaagaagatcagcatcttgaaaaatgattgcactcggtacaatttctgtatctttattttcaatctgagatttaaatgagaggagtaaagcctcgatctcagccacagagtagccctctattcaagtactacaagagatgatgaaggtatcatactcatggtaaccctttgaagatagaagaaatgtgatcacgaggtgttaatgtttctccaatcagggcaagtaaatctaccatatgcttaacttttagaagaaactcgttgaggttcatagatcctttcttgagctattagagttaagttctaaattctagaatcttggatgagacttgtagcatgaaatgtttctccaaaatttcccaaatttgttgagtagtatcatagcctaccatgtgagtgcggagggtttttgtgtatgaaaacaatagccaagaaatcacaactttacaaagaatttcctaaatgttgtatggagcactaacattatg

SEQ ID NO: 196053 - DNA, 831 bp, Cannabis indica
tatatatatatatattaagttttcataatattataataacaacattgctattaagcactataaaagcaccataaggttcaacatgatacttatatagtgcgttataagtagttagtagcttttaatattgaattaaattaaaatgtatagaagtcaataaataactgcactaacgacaatttattatcaccttttaaaataattgacaagtttcccttaaacatttcttttataataaactggtactaataattatagtggcataagttggacggctgaaagtaaaaaataatacaaatactaaaagtaagaccttcagttccctccctccaaataaaaaaagtaaaatttttagtgtctgctatatgtacaagttttcacaccaatccactttttaattgtactaatatatataactaaaattaaacaaagtatgtatcatttcgtgaaattaattaactccgatgagagtgagagaaagagagatatagtcttgcattcactatattttaaattgttaatagacaccacaatcaaattcgaaagagtatttcactttattaatatttaaaaatattatacaaaatcaaacatgaaagaactagtacaaaaaagaaagaaaatatatattaaagaacgcatgacaaacgttgcccatgaaatgagcaaattattataaaaaaagtacatgtacagacgcatatacatacatagacacaagatatactaaaccattttttttacatgtcaccatattttgacatatacaaaataggaaaacacataattattaagctatatatagggtacgtataccaagtaaatatgtat

SEQ ID NO: 196054 - DNA, 1736 bp, Cannabis indica
tgaaaagaaacaaaataagaataagaagtatgtaaccatttattcagtgtatactgaattgaatgaaagtccgagaacatctacctcgccaacaaaaatagggtcgcatttcacagaccagaaccaatgaggcatacaaggaataagtgagattcaactagtactgtcatttccacaaagatattgggcatactaccgaggaatgttgttaattgaaagatgaaattgaaagcctgatatcatgaggatactttaggcaataggtgagaacacagggaaatgagcctaaccagcccaataacccgaagaacctgagattgcaacctcctccgtagagggtgaggatatcttagttatttctggagggccacacctcacatgaaacagtaacagtgcacaaaaagaggtacattactgaactgaaaaatgaattattagcattcgctccagaaccttcgaagagagtgaagtaaaatgaaccacccatcctcttctctgaagaagatttgaaacatgtgtgttatccacatgtcgatcctctaatgataaaaatttgactctccaataaaagagtgaagagagtaattgtggataattgaagctctgttaacatcctttacaaggaaacgttgaagaagatgggattagaaaagttaaaactaagaccttgtatggtaaatttatgtggctacacaaggcacagtgtcgcgagcttaggcataatcgagcttcccttgactatgggggaaccaccgttgtctgggacacaaatgtaagagtttttggttgttgacatccccttcgtatataatgtgttgataggtcgcccgactttaattggagtgggggtagtgatcttaatcaagcacttgtcctttaaaaatttcctatgcactctgtagtgggaacaattaaaggcgaccaattcttttctcgagagtgttatagagtggaacttaaaaatagaagagccattaatcaactgagggtaattctgattgaagaaatcgagaaagaaacaaaagatttggatcctaggatctaagatgatgacaaccaactcaagccaattgaagagttagaagtggtgattttagacccgaacaatcccataaagtgtgtttatattgggaaaagtttaggggaagaactaaaatagcaattaataacttttctgaaggaaaacaaagatcagtttgcttggaaccactcagacatggtcgggataaactagaatgtgatttgccatcatctcgttattaaccctaattatccaacaaaatgccaaaagcaacgacaattggatcccaagagacaaaatgtgctcaaagaagaggttgacaaattattaatcaataacttcatttgagaagccttctatccctcaaaaatctccaatcgagtcctcgtaccaaaaccaaatggcacatggagaacttgtatagatttctcagattttaataaggcatatcctaaggattactttccactaccaaggattgacaaattggtagatgcaacagtggggcatgaattgatgacttttatggatgcatattatttatataaccagataaaaatgcacatctagaccaggaacatacgagcttcaagacaaatatggtgctctctactgttacaaagtcatgccatttggattggaaaatgttagagcaacataccaacgtctcctaaatggtatgtttcaaaactagattggacgaaacatggaggtc

SEQ ID NO: 196055 - DNA, 1070 bp, Cannabis indica
tatttcttccacatcctcctcctggtagacaacttcgttttcttcctcatcatccaagcagatattcttccatttctgctccagatctttattgacaccactcgaagaagccatggatggcaggaaaacaatcaaaactctctaaacactcaacaatctcaagaaatcaaaacactctatagaagagagacaaaatcacataccaacaggcatgaccaaattccacattgatagagattagaggactcttattagtagacctatgttgtgtatattgttttggcatgttgtaatgagcctaaattcataattttgtcatgtcgaaatctttgttactgatagccattttcttgtcaccaaataatgaacacacatttaaaataatatttaatgaatagaatattattctaaagtgataactcatgttgaacttaccacaaatgccattggccatgcaatggattttccaacagcttcacgaattgttttaaaaggtccatatagtttaaacaacaattcattaggcttgatgagaactgtaatagtaacttcacacaaaaaagatccaagttcttcccctccaacttttttagatgaatgtttgctacgaacgataccaatagcaattagttcaggctcactagtgatactcttaatattgactacttctccagcctgcataaagaaaattataaatcactgattattagttaagggagaactaatgttgaaagtggatgatgaggtgaagattattgatattattctgaagtatgtgctttactaatctcattacattcctgcaacttgcaacccatatgaagatatcacttgctcaaatacttctactagctagaaaagatttatatacattatatggactaagcaagtaattttgaaaaaaataatcttttagggaaattagaatacaatacatgtaaataaaataaagtgatgaggagccgttaattttgataaaagtattttctaaaattgataatatataatagtaccaattacctcaaccacaggagtatcatatggtgaagatgaaaaccaaagttgacgtc

SEQ ID NO: 196056 - DNA, 2110 bp, Cannabis indica
tcttaggaaaaacaaaaaatacaatgttctcaaaaaagtgaatacaaaaatggacatgataaacatcttgtttcatacggttcacttgacaagaataaccaactcaaaaacatttttgaaacaaataccagacaacttagaatcgtgtgctcgttgcaccacaatacggagagtcttcgcaaattgcaacttcggcaatcttcgtttactcgacgaaatctccattgaaacacattgcattagcaaagatatcaagaaaggccatgtttcagctgcaggaaaggataaaaaatataagaaatgtatctactcgttaagtccaaaggaaagccaattctacttccatggattgaaagagccatatctaaaaggtttgctcacaatgtggaatttcattcggtttaagcttcgctgtgtgctgtccaagaaatttgcagaaagctattgatctctctccttccaaccatgtattcaacaactttatcccttcctatgaacataaatcaataccagaaaaataagaaatctgttttgctgctgagaaaatttacaacaaacaagacatcaaagttcttattatgtaatattttttaacacaacttttggttcattcaatttacattatttactctctctcaaactttactctcagtttatagccatttgcgattagctaatttgaactgtcactttttctaattagtaatcctatcaaatacacataatatatatgtagagttttatattcatcaagttcattttcattttcgttttccttttcctcctactgcattttctaggcggccaaacggatagtaaaacagaacgaaatgatgatagagagaaagatacttctcgagctttggctttatcggacgagagctttgaaactatctcctgaacgtctctggaagtgacaatcgcggtcatcggagctcccgattatagactctggacagtcctgaagaacgaaagacgaactctagggttttaaaacgacatagacactggaaatttggcgggaaagtgtagactaagtaaagatataacgacactgtcagtcaccggaagaaaagaaaaaaagacccttgaagttgaagagtactaatcaacttaaatgctctctctcactaaattcgggattccgtcagcccatatcaaacttctaccattctctcttttcttccttttcttcctaaaatacccttataaaaaaactaatttctgtttttcattttatgacataaccaaacaaaaggtattaaggtgaagaaaaagtcttgtcctttgacatgagttggtcgtgagcgttgttgtcaattgcttgttttctgtggtggtttcgattgtttttgtatcagtatggcctccagcagtactatggttactaaattggaggacaattattctaatattcagttgtaagaggaagaagaaggggccttcttatgcgatattatagaagatgttgggtagccaattgacgatcgatggtgtttggtgggaaagtttctaacaagtagggccattgattcttggtcgatgcagcacactatggctgctttgtggcaaccaggaaagggtatgttcgtgaaggagcttcaaacgaatttttctctttcaattctaccatgaagctgatatacagagggtaatcaaaggaagtccatagacgttcaacaagtttgaattgatttttgaacgcttgaaaaagggtgaggagcctagagcagttaaactttatcatcttgatatttgggtgcaactgcatagctcagacctgagttcatatctgatactattgtcaaaaatgttgccaactacattggctcttatgttaaatcgggtccgaaaaattttaacggcatatggagagactatttgcgtgtgagaaccagcatcaatgttgaaaaactgttgaaaaagaggatgaagttgaaaaagtcgaatggtgattggctttggactaatttcaagtatgaatttgttcctacattttgctttatctgtggcattattggtcattcgaagagattttgctctcgtatctattatacacccctggaagtaatagaaaagccatatgatttatggatgaaagctcaacctt

SEQ ID NO: 196057 - DNA, 1337 bp, Cannabis indica
tttcatgaattgcatgttttatgttcggtagcaatggaatgcgatgtatgacctatagagtcatttttgtatggattagtacttttggaataatggggcattatagatagacattgagaatatcgagattattcggggatataagttttacaaaaattcccttaggtgggaaggttacttttggtggagggaagggtgaatttgtaatttttctctttttgtttttagtggattaataggaaattagatttcttttgttttcttttagtggctagttattaggatttatctatgttagagatattagaaatttaaaaatcataaacaaggaaaagattagaaattttaaaccttcttctctctctcctattgggtcgatcacctcgaacaccaagggaaaacaacaacattcttcttcaattcagaccattttttagaggaattcaacaactgtagcttaagtaatttgtgaagtaagattttccttctttttctctttgaattttaagcttgaaagttaggttttcatggaacatttttgagttaggttactgtaggtttaattcgagttttgttatgatcttagaagttattttgatgttatttaagctgaattaattaagctatagagctcgagaacttcagttacaccaattctatggaaagatataagttaagattcttgataaaaaggaaaagttatctgaagcagtacgataatattggttaagatatttaaagaaacaataaggtgaagtgaatcacctggagattagaatctgacttgtgggctcattgtccaaagtttttcaaatttaattttgaggatgaaatcctttaaactcgtggataattgtaataaatgcatagttaaatcatgggaattagcagatattaagatgtttattgattagtatgttattttgtgcctcttagtaagaaattagggcttgctgttagaaataagtcttaggaaagtattttcttatttatggagatatatttgaatgttaggtgcattgtttatgttatatatgaattttcatgaattgcatgttttatgctcggtagtagtggaatgtgacctatggcttatagcgtcattttattatggattatttttttaggaataacggggcattatagatagatattgagaatgtcaagattattctgggttataagtttgaccaaaacacccttaggtggcaaggttacttttggtggatggaagcgcgaattggtaattttcccttttttgtctttaatggattaataggaaattagatttcctttgttttcttttagtggcaggttattaggatttatctatgtta

SEQ ID NO: 196058 - DNA, 3646 bp, Cannabis indica
tagccattcatgacacaactttctttagattctcttggggattaacaaaggcccaggaggatgtaatctcatgattctttgataccatctttatgatttaagctcatgaagctttgtttcatcaacattattatttttcccaaacacttgtctaacctcggcttgcgcctttgccattgatgtcggattttttcaacaactctaacattgcccactctacaactgtagatgatgttttcactttcctccaatgaacatgtcctgaaataatgataataactaattataattgtacgtgatttgtgttgtctttggtgtgatttatccaaaaaaaaaatatatatgtttgtgtctgtgtttatcccacattgctcatatgagtaatttgtagtgtttatattacacttagtacgtagctactaaaccttaaacccatgatagagttttggtaattgaataaatgctatgtttggtttaatttatcaaaaagaaaaaaaattataagtacttcctccaaacacctgcaaaattaataattgtggtaacgtttctccaaatgaaaatgtctcaagtcgagtcttcgggaagcaagtggtcgttcaaaaaggagtttcagaaggttagcttgtccatccagaagaagtctcgtggaaagtgagtcaacttcggaaaaggaattctggaaggctagctataccctccaggaaggggttcaggatagtctattccttcgagattgcgcttcattagtttgggacatccgtccaggaatcgttaaactttccagagagagcttgatgccaataacagacttggagatctcattgtaaacagttagttaagtcggttaagtcttaactaaattaactatttagttatctgaagtcactgccttttgggattcatatcgtcaatctataaatacaaccatcctcttcatttgaaagataacacgaaacaccagaaacagagtaaacaagttctttgagagagttttgattgagatgtaaagagagagagtacagagaaaagagaggattgggttttggggtttgtaaaggagaactgtagatgaagaagcttgagagaattcaaacaaaaaattgctattaactgtattgtaattgtgttcttgctcaatcaataaaggaattttcggtggtgttccaaacagtagtagaatcgtagattacattgatctatcagacttgaaccagtataatgtttggtattgtttttctatgattttcttgcatttttttatttttgattctgtagtctttattatactctgttacttttcccattctttgatttaatttgtttggttaattttgtcattgctataattgtttgttgattcatttgaagttagtttgatcctacacaatagttaaaatttcccacaaatcaaagctaggttatcgatcaagatcgcagaatcaagattctttccactgcaacaatcaatgtcatcaatggcaagattcgaattggagaagtttgatggaacgagagactccacactatgtagagaaagtcagaaagggatcctagctagtgcatcagaaaagtctccaaagtcatcgaagatgagaagttacttaccgagaaaccaggagagaaagctgaaatggaggagatggcttattacacaatcattatgtatctttcgaacaattttagaagaaatcttgtcacagagaagacgacgaaaagagtctaaaataagctagaagaactctacatgaaaccatcgactactagcaagatcaattttctagaaaggttatatggtttaagaacaatttcttccctttctttagatgataaaattattgacatgtttaatgagattattgtaggattgattaacataaatcataaatttgatgaagcaatctaggccatcatttattgagatctctcctgattgcgtatcaagtcaaagctagctgccgtcaaatatggctgagatgtgattttattataagatgttcttaccgcactcaagtccaaggattttgaattgcaattggagaatgaatccaagaaggacgaagtgtacctagcaagtgggagatcaccaaagagagtaaattcgaagagtaaacactacatctctaaatcaagatcgaaattcagggagaaggaatcgtggaggtgttattttgtggaagtcctagacatttgcaaagatactgcaagaagtacaaggagcaacaagacttcaaaaaatcttataagtgagacaggaaggactgcaagcataatcacaagaagaaagattcagctgcaattgcagaggacaatgttgactactcacatatggagaattattttccatctcagaatcctcaatgaacagggagtggattcttaattctgggtgcacttatgacatgtgcctgaatcgaaaatcattttttgattataaattagttgatggaggtaaagttctaatgggtattgaagtttcttgcagggtcattagaatcggaaagatcgccatccgatagtatgatgtctgttaggctatttttaacttattgctcgagtcatttttagagttaattttcttctttattgtcactttttgaacataattatgcttattttctttggtttcaggttttgactcttggaatgtataaattggtcaaatatcagaaatacgacgatctataaaatagacaaaaaatttcaagaaaataaagttaaaccttcaagcctaaattcgattatgttctgttcaaattttgaaaaaatgtcaaaacaaagaagttttagttctttttttagctttccaatgcatcctgaatcacctcatttagagtttgtatgtgaaagttatgtacatttgatcaagaaaggtcgaagtagaaaaatgaattgttgccgcagcaaggctcatggtagttgcgacaaattgtcgctacaacgaggctcatggtggccgcgacaagggtaaagtacagaactgttgtttctcgcatgtaaaaagtcgtaaaacaatagttttgtacttcaccctcgccgcaaccaccatgagctttgccatggcgacaattcaccgcggccacctacatgttcatgacaaatatgaactatattttctagctaccatggaagcgttcaagaaagcattatggctaccatggaagcgcttaagaaagcattatggcttcgagggattttgcatgaaaggaaatatataaaaggaggaataaatgtgtacttagatagcgactcgtctatccattttttcaagaacccaatttatcattaaaagagcaaaattatagacataagactctattggattagagaaaggtagaagaatgactgattgaattagagaaggtcaaataagaagatactccatcgatgttgggacagaggtcctaacagttaacaagtttcggcattgcctgaacttgatcaatctcataaattagcatagtaagatacctggaacaccaaccatgatggatgcatactttttcatcaccatggctttaatttaaggactaggtggaatttatggtatagttcctccaaataaaaaggtctcaagtcgagtcttcaggaaagctagtcattgtctaaaaaggagttccgaaaggctagcttgtccatccggatg

SEQ ID NO: 196059 - DNA, 1481 bp, Cannabis indica
aattaataaaataaaagattaaagactaaacaaaatttgaaaagtaaatgaaactaaacctaaatgaccaaaccctatcgctaacccaaattcaccaacccacccctgtttttcttccttgttcttcttttcttcttctatagcccagatcaaaccagaacaaataaactaaaccattcatccttttcattctgtgatgttggggacgagactttctgagttatgtgagatggatttctgtttcgtcttcaacgttgatagcaagatctattgttggtatggatgacattggcggcgacaccaacaatgctagaggaaccaatttactacctacctataataatgaaccaattttcaagtaaagttcatagcaaaagtctaaaacaaaaacaatcccaatacaagtaaaacagatttgattcttacacatagaacatcaaattcttcacattatcatggatcgtcggaaggctgccatccctatcaatgcagtgtcgggtgcgaaatgcagccaaatgagcatagtaagccggaggaacttcatcacatgaagaaaaaacacatactggttttgcaactaatacagaaaatgaacaaagatctattcaaaaatatataagataagacactgatctgtcgcaccttgcatacctgaaaaaagaaaaagaaaaaagaaaaataaataaattcaggtcaagaactagaacaagagtataacaacaaaagtggttcataaaaagatgtatattgtatacatgtagcagagattgtttgtgagactttgtaagtcatcagcattgaatttgttctcatcatacaatacatggaagaatgaaagttcatgatttgatatttttatgttaagtaactcacacccataggcagcccttatggggtgcaagatgtgctattgcacagggcccaaaaaaataaaggacttaatatatatttttttcttaatatatattttttttaatggccttcaattctttttaatgaagtaaaccaaataaagaaaactttcaaaatgtacacaataatagataatcatcaatagttgtaaacctccatttccatcatgtttttctctactcttgtggccactttttttacattgactaaaaatatcaacatttacccatttactacctacctataaaagaaaacctaagtgataatgaaccaattttcaagtaaagttcatagcaaaagtctaaaacaaaacaatcctaatagaagtaaaacaggtctgattcttacacatagacatcaaattcttcacattgtcgtggatcgccggaatatttccatccctatcaatgtagtctcgagcgcgaaatgcaaccaaatgagcatagtaagcgagaggaacttcatcagtcatcacatgaagaaaaaacacatattggttttgcaactaatacagaaaatgaacaaaattattcaaagatatataagatactaggcataccaattgacac

SEQ ID NO: 196060 - DNA, 735 bp, Cannabis indica
aaacttgctctcttcatcttcaacctcaccattcatcgacactattgaagttttcattgtctaagttgaaacactacaataagatgccttttttagaatcgtcaaagtagtgatttaatttatgtcgtatgatggaattaccttttgtttatggatagaggtaatagaattagggttttttttttttttggcagtgtggatcatgtttgggagaaaaatcagcaagctcaaattattataaaaaaaagctcattctaaaagaaatactatataagaatatgtatcctaggtgaaataagcatataggtggaagagttagatactaaataaatgacatatttcagatgggatgagatagctcaaaagagatgaattatctcggtcggctggcatatctcgatcggtcggtcggctggtgtatctcaatcggtcggtcggccaacgtatcttggtcgtccggtgaggtgacatactttacatgggatgacatacctcagactggatgacataaagataaacaaaacgatgacttacattcaagatggaaggtctatctaaaatagatgacttacattcaagatagaaaacatatacaagactaatgacttaaatatcctagttaagaaagttacacattatgaataaaagagatataaaatatagacacctaagataaaataaagggcacttgtcaaaatatgtaaagacacctcttaagaagaaataaacatatgt

SEQ ID NO: 196061 - DNA, 1152 bp, Cannabis indica
tatgtcaacttccccaaaccaaaccctaaccgataccactcgtatctcacgtactactcaagaaacaacgcaataacaatttgcagtcttgcacctcgatcccccaaccctccctaatttcgtgaattcacaatttacacggacttattcacaattctccaaaatgctcccaaaagccttcatcgacggttgaaatttttctccgacaaaattctagccttttgactttaaggaagaggcatgtctctcgacggcggttccgttgaccgtcgagaagtgtatgcgtcgggaggtgcgaatggtgtcgtttccgtggcagctgccgctgcgtcgaaccagaggctgaggctgaacccaagcaaagagcataagcctgagagttacgagggcctgcaactggatttcactccgtcgattttcagttctctcgagaggtttttgcctcctaatttgtatactgttcctcgtgatgacaaggtcaagttcatgagggagattttgcttaagtatttgcctcatggagagcgtaacagctctctctctctctctctctcttaagctgtggttgtttgctaagcattcagaggaagatggtggaccatttaactgaacggctatgcagtgttagtattgagttattgatgaagaatttgagctacaagagagaattagggttcgaggattatattgtcctataacgggcatgttattcgagactgaaaatacgaaaataacctttagcgtgatgcgttttctcttttctttttaaatgttcttgacatcaacaaaattagagtgctctattttggccgaaggattatcatttcatttatgtataagagtcaacattacgagtcggagtgaaaaataaataagcttcccaatgtagcatctcggttatttaattattaagtttggcattttgacaaacatagtaaggcattggcatatgcgtcaagatttcatgagagtcaaaataacttgaagttgtcttcaacttgtacttttaaacaaggaaggaaatctggcgttgtcttcacatgtatttttgaaagaaaaaatgggaaacttgtaggtgggccaatttacattttttggtgctcaaaaatcatttagaaaatggctttgttcttggaacaattatgctgggga

SEQ ID NO: 196062 - DNA, 966 bp, Cannabis indica
tccttactgagttacctaccccagattttgccagtgtgggccatgagaatgaattgggtcttctccctgacattgggccctcattaatccaaagcttgaatatacctcatatttggacttgtaaatctcaaatgccccatcatttccctgagcccattaactttaaatggcccacaaatgacccccagttacaaaaactttactgtgatctccttgggccggactacaccaacttgtacaaggtccaaccatccttaatttcaaacccccctaatgtctctgaaatgattgttcatctgctggggtcaaggaaaagaaaggcacacacttggtaccaaccaattcctgataaattagagaactctccttttgaggaggtgagtcaatcggctacaacgatcaatgatctcaaagcaagtaagactgatggagagggggaagaggttgcgggtgagtccttcaaagctggaacgagtcgtggtaatccaagaggaaggcgtaagaaaggagaaacttgcagctctttcctcaagagaacgtcgggagttaaaacgaggagaagcaagaaattgcacagggaaggtaactcggctaatgccattaacttagatcatgttcttgctcaatgtattgaagttcctgtcaactatgctcaaaattttggaaatggcgaggaggcggccagagccatgcccccaccttcgccatgaggtgcctcagttggaattgccgcggccttcgaaggcccgcggcagagagagctttgagaaagctctctcggggagaggggttcgatgttatcttcttaatggaaacaaaggtggatgaggtttttatgaagaatttgacaaggaaattgggatatcatgacttttgtggcattccggcaatcggaattgcaggaggcttctgccttgcgtggaagaagggtctgaagatgattgtgaggaagaagtttaacactgg

SEQ ID NO: 196063 - DNA, 1179 bp, Cannabis indica
ctaattacgttattaagtaataatatctaaatatatactccaaaacagaatattaatttatattacttaattaatctaagattatatatatataaatattaattggcaactttttcagcactatagtctatctattgtactatatataatattattttatattgtttttaattgtattggcattttttgttcttgagttctgtctttaattagataggaaattatatacaatctttatattaataaattaaaaacattcatatgatcttattaattaaataattaattagtacattcaaaattattaaattaatagtaattaggggaaaacaaaaattccaaatgggaatataagagcgtgatggatccagtgacctcatgagatgttattttccagttattatttatgtaataataataataataataataataataataataataataatatttctttctttcactcagtttataagaacatggtttttgataccctgaatcaaccatcaaatccaacgtttgactccactttttgtaacatataaacacttaaaattaaattataataagaaaacaaagaaaaaaatggacatttgaaaatgacctcaatttttgtgtttttattttttgctttttcatgacattacatcacttaataatgtagctagtctcatatatatacatatatattaaactatatatatgatcagagcttgtatttcaaatattatatagtgtattatatactttacatatctaaatgtctttttctaactttttatttatttacttattgaagaaataagtataagtctctagctagctagctcacttgttttgttctatcattattgggtgtatattgtcaccttaattaaataaaaatcaaaatagaattgagaataatgtttttaaaatatatttaagtattattatagttaaatttaataaataattaaatttaactcttaatttataaataattttaaaaaattctataatgtactcctttaaaagagatagatcgatacatttttattcgttttaatatctaaaataattttttaatcaaattttttttcatggtcgtgtaaattataattatttaaggcatcatgcaaaattttaaaaaattcagtaaaatttaacacatcaaaaattacattcaaacagtgt

SEQ ID NO: 196064 - DNA, 1232 bp, Cannabis indica
tcgtttcctgctgtcccaacctggatttcattattaaaggctaagtctagggacaagtatatgtgtagtgtagagaagagatttaaattaataaaaataaatttttattcacatatacatatatgtacaatgatatatattccaattatatatatattaagctttactagtatatataaatatattatggaaaggaaaaaaaaattcccaaataacaaactactataacatttaacaaaaaaatgcctcactactatacaaaatttctcatttttgctgactaaaaataagagaatttctaaaaatatcattttcttatattttatttacaattgtaccatttaaaatttttatttataaaaatacgtttataagtttcaaaattataaaaatatactaagttgagtaaaaagtataaaataacgagaaaaaaatctcatactaactataaatcaattataaataaactataaaacaataaaaaataaccaaaaaacaatctcatggcaactctaatagaattataaataaactataaaacaacaaaaaaaatcatttttactgaagaggtatttttgtaaataaaaaaaattaaaagtgtaaaaataaaaaaaaaatccatgttaatgtatttttgtaattttttttaaaattttttttgaacctattaagtaattttttcttaaaaatatttagttaaaaacgataccgtagaaataaaatgtgactaatatttattttttttagacacaaaatgttatcaaactctaactactaaatcttaaatttagtgtacgtacgtttgtgaataaactagctaaatcaatttttatggtgatttcttattagaaaaatgaaaaagaaaactacttactaacattgatatatagctaaattttttttaacaatgatatatatagctaaattgagcatacactaatatcataaaataaataagaggttagaatattattgcaacgatatgccaccagctggacatatcactggtgctttttttttcgtaattcttagttaaatttaatttgaaatctaaacacacaaaacaattatgattgaaaaaaacaaaaaaaatagaaagagaattcaatcttaattaggcttgcctgggtgtacaatctgacatctgaagttgaatcattggaaggagaaacgaaaagcttgagcaaataatgagtaccccatttgatgatgtccttaacatgatcaacctc

SEQ ID NO: 196065 - DNA, 957 bp, Cannabis indica
cataaccaaagcaaaaaactaataatttgagttgatgagttactatttgcttcgattatgaactaaagcaaaaaataaaattatttgtgtctataactataagcatttgttacaccaaccaacgcaaattaattctctatatgtcacataaaaatcgaaataaaatacattttctataatagtgtatgtacactatgatgtacaaataatattgagatgataaccttacttttctcttatttataatattaatattatactatgttataattaatatcttttattatataataatagtagtaatattataagtatataattagtagaagaattttactaaactggataaagtagtttttctttttgcaattctccggcaatagtgccaaaaatttattggatcaaaaatggtacattttttttaaagattgtgaagcacgagattgaaagcgcacaaatcttttattatagtgtagagattgtgaagcacgaggtcgaccccataaaaattgtgtgaaatcgaagaaaatattttttttaaaaaaaaatctaaattattaaaattctaacatagtttcgaaaatggtgagatttttggtaacaaaataaaatgtttaacagttaaaatgacaagtaacaaatatttttaatggtattttgagaaattatttaagatttcagaattcacctaagtgtaaataaaaatattaatgattatattaattctcatattaaattagaaatcaatctaattttttctaacaaaatcaattttctagctttaactttaaaattataacttctaagcattaaataatttaatgtaaatacatacgttatgttcataattcaagcagcaatatagtcacgacacatgtacaaaaatgagagactcgaaactctttcttttcggctgagttggcactactacaaaaatcagtttttttcgacgttttt

SEQ ID NO: 196066 - DNA, 1242 bp, Cannabis indica
ttttcaatattgagctatagcctataggtgacacaaaactatagagagaacttaaaatagcttgtaaattaaactttgtcccctcattagtgtcacacatatggatggaacataaagctagtcggtcaaatgagttataaaattccaaaatagtagttgcatttattattatgtaccaacccaacatttaatatccaatattaattatcacatcactatagtaagttttgggttttaaatcaatatcaataatataataactattccattaactctcttaaacattggtccaaaatccttatactatggctccatatagagtatcctatccacacccttctaaacttggaatgattcctacaaagattccattttttttttttaaaaaaaaaagaaaaaatatctgaaaatagtgtatatatagggtggacaaatgggaaaaaacatgggcatgactaagcctaagtcttaactttttttctttctctcaattaatctcaaatatcacaatttgcttatactagccacctctctgatagcctatcaaaaaaccctagatatatttttgggtcaaactcaatctcattcacacaggtttggatagtcatcataatgaaagcagcttgctctttggattattattattacaactttattataaaagtttggaactttatcatatatttctttttttcctttttaaataaactcggtagttttcagtcaacacaagaaaccaatttgtcacattattttattctattaacattattattattccttatacttttttaccattaaccataccattgaaaatggtatataaggaataaaaatgtgaacttttttttcctcataagagaaagattgtattttcttagaggagtgtttataaagactaattaagatttttatttcttgaatttttacatatattaaattatatttttaaaatttttaagatcgttaaattttttttctaaactattgagattattaaattaaatcacttttatggataaatgttaaaacttcagagaacatgatctggtaggcatgtgaaagctcgagtggtataatttgaaagatattaaaatgtaaagaacatgatttaatatataaacaattactaattattaaaattgaatgaaaatgtaataattttgagaaaatttttaacaattaaaaaggtgtcaaaatttaagatgaaaatttctaattagtgttggtaaataatagtca

SEQ ID NO: 196067 - DNA, 1503 bp, Cannabis indica
tttatcagtagggatgttacttttgatgaaaacagggtgtatagggatactctcaaaactcagcaagatgtaccaatctcttctgaacctgaacagaatatggatagccagtttgaggtggagcttagaagtgatcaaacacagaaccagagagagattcaagaacaaggagcaactgaggttaatgaagatataattgaagatgatgatgatgctgataatgatgaagaagagggtcaggactatcaattggtgagagataggaaaagaagagccatcaagccaccaagtagatttggctttgcagacctggttcactatgctctgtctattgctgcagtagatgaacctctgaactatagagaggctatgaattcagcatacaagcatgagtggaatcaagccatggaagatgaaatgacatcacttaaaagaaatcagacatggattctgatcagaaagcttgctggtatgaaagtagtgggatgcaaatgggtactaaaatacaaagaaggaattgaaggagtgacacaagctagattcaaggccagacttgtagcaaaggggtactctcaaagagaaggtatagactataatgagattttttctcctgttgtaaaacatacatctattaggttgctgttgagcctagtagcaagtgatgacttagaacttgagcaattagatgtgaaaactgcattcctacatggagatttagaagaaaagattttcatgaagcaaccagaaggctttgaagaaatagggaaggaggatcatgtctgtttattgaaaaaatctctatatggcttgaagcaatcacctaggcaatggtacaaacgttttgatgagtttgtcaccaaagttgggttcaaaaggagtgcctatgattgctgtgtttatgtgagaaacacaaaaggaccagtgttcttgctgctatatgtcgatgacatgctaatagcaagcaagagtaacactgaaattgacaaaataaagagattgttgagcaaagaatttgctatgaaagatctgggggcagcaaggaagattcttggaattgaaatagtcagagatagaaccaaaaggagaatcaaattaactcagcaaggatacacttcaaagattttatccaagtttggatttgctgatttaaaaccagtctgcaccccaatcagtcaacaattcagattgacaagtgatcaatctccatgcacagaggaagaagaaaattacatggaaaaagttccatacacaagtgtagtgggaagcatcatgtatttgatggtctgcacaaggcctgatctctgtcatgcagttagtgtagttagcaggtttatgggaaaacctggtattgaacattggaaagctgtcaaatggatcatgagatatttaaagggtacttctgaagtaggacttgtctatggaccaaatgctgaaaatacaggtgttgtggggtttgtagactctgattttgctggtgatatggactccaggaaatctcaaact

SEQ ID NO: 196068 - DNA, 797 bp, Cannabis indica
ttcaagtgctgtaagtatgggccacagtttttaacacggcacgagcacgatcagacatgaaaaaatatgaatttaagcacgacacagtataatactacaaattaaattagtatgatacgaataatctattttaaatgccaaacatgttaaaaactttatatttaataatattaacaataataattttaatatttattaggaaatatttaaattttaatagttataataaattttttaaataattttatatgaaaaattatataaaaataattgaaactataaaacatacatagctttagtaattatctcgtcaattattaaaaaaaaagtagaaaaatagagtacgaacttgagccttacaaaaaaacaggtcgattcgagtaaaacacgacataacacagcccgcactttttatggcacagtacaatgtttgtattttttttatggcacgacacaagacagaacatattttcttatgacacaacatggcataatctatatttatagcacgacacatatgtctaacacttttgatgagatactctcctctccttccattattattatgtggcgtggcttctctctatatcttacctagacacaaatttaatgcacatccacagatgcagaaaattagaggagaagattagaaaattaaaaagaaaaaacaatacaatttgtattgcagttggtcttttgtacttgttattattgctattgaggtcacttactagtttgctctttcatttatgactcgttgaaaccatcccagttgacaaaactggccgacccaaaaa

SEQ ID NO: 196069 - DNA, 610 bp, Cannabis indica
tcaagccggtacataaatattaatcatgcccgatttgcttttatagaagttaaagtatctttcaccctttgtttaagatatatcactaacatattgagtaaatgaaacaaatggtataaaagtaactccactttccaatatttaaattaaaatattaattatgttttgtatttgaatatttaaataatcttttaaaataaaatataatttaataaatgtcttaatattatatacttaaaaatattaaaaaatacatttagatgtgaaaaaccaaaccgtctaaaataattcaatatatagattcaaagtttggatcttaaaaacaataaatgcacccttagacttgttttttccttgggcaaaatatttgtcatcaaacttctccaaaatgacaccagaagcatcgaccttggtggaagttccgatcacataagattgattcacacgtttgatgggaactccattgagcttgggtggtccagtgaccaagagcaacccagaggaaagctcaactctcttccccttgaacattccagacaaaatgatcaacactgtccctggagtgatactcgctctaagcttggttgacttaggctagtgcttgttaaca

SEQ ID NO: 196070 - DNA, 685 bp, Cannabis indica
tttttttttttttttctagtcacatggtttactgtatttgaaatttctagccaaaattatttgagcatcagtagggacttttggggttgattgagtggtttgtgtgaacttgattgtttgaaaaggtttccatatgcaagaaagaaaggaaaataaaaaagaaaagaaaagaagagggtgagagtatgattgaaggaattggatgtttttgtgtctttaaattttgattttgatttttctttttccctttaacaaaagcattaagacactttggaacttctttttgtgcaggttatgttgaagatgaagagtaggcacgttgctgggaccatcacaaaaaagaaaaagagtaagttcttactgcttttgtctttcactaataatttttatgaagcagaaatggaggtgggtcttgttccatttggggatttgtgaaagttctaaagtggatcattaaagcttaaaacaaaaaagagaaaaactcaacatggttcttcttttgtaaaattttgcagatgtggttgtggaagtgattaaagatatgccggcttggcctggtcgccacttgcttgaaggcggtgagaaccggcgatacttcggtttgaaaactatcacgcgtggcgttgtagatttcgagtgtaggaaccaaagagagtatgatatttggactcaaggtgtctcaagg

SEQ ID NO: 196071 - DNA, 1367 bp, Cannabis indica
aggtatcgtcatttgatgttgaatattgtctcacttttgcctcattgtaagaaagataacaaggttgagtctaagcaaagtaagggtgcggcgcttaatgagcttgttgagctaaaaaattgttcttcctgtctcttttttgaggtgatattttgttaactgatcaacccatatgttttcatttgagtttttggtttgtatttcatgagtatatttgattggagttgaaagaccgtgcctttacatgagtatatatgataatttataaattttggctataaatttattggagtggtaccataaaccatctattataacttttctagaaaatatatgtgaaaaaaaaaatatgctgtgtttattataattacaacgtcatttctataaattttttgaatagtttaaagtttcatacataggtttgaagttttttaaacacgcatagtagagtagagtatcaagaattccgtttttggtacggtaaattatttagaacttttaaaaaatttactggaaatttaaaaaaaaaatatttcgacaagtaattttatagaggtcgactaagaagttgtaattagcactatttgaaaatttatgtttgtacaaatctttgtgagtatatatgtgagctttttgataagaacatcaaaggacaaagttttggttacttgcaaatatttgctagctcattttgtacctttttggggttttcaatttcagtgcaggaaacaaaaggacctttatctatggatgtcaaagtgtcccaatgggccatctgtgaaatttttagttaatgctggtaatttttctgttttacttttcatcattgatatttcattagtttatccctcaaatggttctagtctcttttgggtatctacatatcaattatattgctataatttctttttttaaaaaacattgatattatattcaatagctgtggaatgtgttggtttggtaacattgctttttacagaagttgagaaaaagtaatttgttgaattactttttgttcttttcagtgcacactatggaggaattgaagcttactgggaatcatcttaaaggatcacgaccccttttaacgttctcatccaattttgaaaacaaagctcactggaaacttttgaaggagatgattatacaggtatattatgctttcttgcttgtcttttctcaagcaactattggataccttatattcccttcgtctgacaagcaaaagccatagtttttatacatacatgtatatgttactcatactttgtcttatgatatccaactctgatcctatttttcccttccatttgaaatagttctcgtcctcattatcctcatatttgtgtactttagcaactgcaagg

SEQ ID NO: 196072 - DNA, 981 bp, Cannabis indica
tttgttgtttgtacaagtacaattaatgagataactttatcaaaagtgaagatcatgtgtatgcatggattgcttgacactataatcatcccttcccaacatggtattttatcaatagtttgtatttttttgaaataaattaaaatatataatatttgatatttaaataactttttcatttaaaaaaatgcatttttagttggtgttggaccatggccttatttatttatttattttgtaaaagcattagtatttataaaatggtactactttacaaataattattagatttacaattaagagcactcacacaaacttattttttattatattcttcaaaatattttattaaaaatctattttttttatatcgcacaattttatattatattatatatcaatttttttatattttttttatatcatttaaaaattatattttaaaatattttttaaggtaaatataataatatcacacctgtattaaagaaaaaatttaaaaaaattaatataatatttataactcgatacaaaagaattttattttcagctaattttttttactttttaatacctaatttttttcactcttaaattttaactatatatttagttactaattttttttaactgcttttattattattattgtgattgctcaaacaatcctcttcataaaataaatgcaagtatgactgtaaaataatgtaaaattcagataatggtacctccaatgtcattgcttcccacttgtccccgactccaacacaccatttcttttttattattattttttctttttcatatccaacaaaccaaacaaaatattaataataaaaaatttcttaaaaagaaattaataatagaattagttacttattattttaaagttctattctaacgcaccaattttggcttttctttctcattctcatccatttatttaaattaaatacaacacttacatatacctaatatttt

SEQ ID NO: 196073 - DNA, 749 bp, Cannabis indica
gcttacccactagagaaagtgttcgactttcggagggattgcttttcaccacgcttccaggctctgtgtaagaataaagtcatcttgttcttgcattgtggcagtcataaggcatccgctcttcacagagtattctccatttttagtgtagtgccacaaaactttgtgctcaatttctcaccctccacttggaatactgtgaatcaaaactgcatcatccccatttaaatactgctcgaataaaatcttcatcccatgaaccatcaactcgttttgaatctatgacatacaatatttcaagtagatgtagtttatcatagattttataactgattgggtgtggtaaccaagggccttctaacactctaacctcattcccacttacgaccctccatctataaacctgttgtatgatttcatttccccacattagatttctctacaaaaatgaggccttactaccacacttggctcccaacaacccctgattagaaaggtacctctctttcaggacacgtctaaacaaggatttagggagtctgacacatctccatatttattttgctaaaagagcttggttatagatgcctgagtcccaaaaaccaagtcccccttgctctttgggtttacacaagagacgtcatttacaccagtagattttattacttttttctaaagaaccccaccaaaatcttgtaatcatattcgatggaggctgttgattgtgccttttggtaactaaaaacaac

SEQ ID NO: 196074 - DNA, 1068 bp, Cannabis indica
ttttgctcgtgacctatacgtttccattctcataatgattcactgtttatatatttatatacatacgtgagctgagtcgataccgttacggggctcaagccccgttttaacagctccttgttttttcgcaccccgttccgtcatggcttaaaggactttcgtaattgtaaccctaactgaaggggcaatattgagagataaaaacttcacaatgctcgtctcgttgtacacgtggcattttaaggttggtccgttattttcatttgctgttacggtgttactcacgagggattacatgacgcggggcccacgtaactgaccaataagcctccagatagagacgatcctccaaatggtttggggctaaagctacaaacttgacaagccaagccgatgagccgagccgtaatagtagaaatgttttatggtttagtggaatgtgggacccagtacgcaagggaatgatggctctggggcatttgtctgtacgtggcggcttgcggtccggcgtgggctagccactatcattaagctcgcaagttgcgaagatgtttcggctgagttgtgcttgtgggtccaactaaaactgtccccgcttgggcccacatcattttggtctcactagttagaagcggactggattggttccaattctttgatgttcagcccagttcggcccattttggggatcatttacatttatctttgtgcaaaaattacaattagtgtagaattaaattaattaaaatttaattaataaataataaatggataaaaataaaaatgaatagagtattaaaaactaataattattaaggtaacaagataataaaaaataataccaagatatatattagttcatatatcgatgtaatttatagttctacaacagttaataaccaaatcttttttattgattaagcaaaaatagaatacaattatagtcgagattgattctctgtttaattctctcacaatgtttatctctcacactcttactcaagactttattatagaagattcttcatacaaaattcaaacccagtctctctctcaagatcgcctctc

SEQ ID NO: 196075 - DNA, 552 bp, Cannabis indica
tttcgttttcttccaaaactcgtttcgcttccatgagttctttcccataactaatcctcttctgaatcaaaaaacaagaaaaaaaaaatcaaatcttcaaatcaaaaaaaaaaaaaaaagattacaaaggaaaaataaacttgtttgttgataatatataccttctctctttctctttcaaatcttttttcttcttcattattctttcttgcttgatccctaatcataataacatcaaagaaattattatacaacataataatatttataagtaattgtactttataattatgttatacaccttcatataaaaaaattaggagtagtctataagaaaaaagtgaaacatgttaccttaattcttgagcttttcttttcatttcttctgttaaagaaaattgctcagttgaatcaatactaatatcaatatcagttgatacctgtaacaaaatttgtgtatacaatttagtttaaagaatgaaaaaggtggtgttttaattaatcaaggaagattggtatttatatatatagtgaggtaatacaaggaaaaaa

SEQ ID NO: 196076 - DNA, 1128 bp, Cannabis indica
aaattgtagaaaaaaaaaaattgatttccttatattaggactatagtgttttattttgctttatatattactggtactcgttatttttataactcgttctgtatgtttctcttttcttagatacttcagttttgttatatatggtagaagtatcagtgtaaacttagctggttagaaatagaatgttggttgttttagtaccgttcatctttgtatataaagggttgagctatatattgtaattcaataagttgaaataatacaattataatttttctctcgttcgaccctgccttcttctgcattactttataaattattttttcttgtttggtttattgataatttaaggtggaaaaaaataaactatgaataaaataaaataatttatgtattatattttattttaattttttctcaaataaataaattatttataaaataatcaatatttttccaccaaaaaatattaaattagatagaaaatatatattaaatcaaaaataatttttttatctttcaatttaatattaatgttaaatcataatttattaaaaataacatttttatatttatatattcacattgatcaattcaatatcccatcaatatatacactactacaatttagaattatagtgacacacacaaaattacgagtcactaaagagttagaagtaattttcagtgacatgcataattagactctaaatatctagggttaatctcatgtattgtgggtcactaaaagtatagagtgtcactaaaaagtaaaacccaaaattatttgatttttattaatttaaaaatattgatctatagtgacacaccagacatgactgggtatatatgtcccgacccacttagtacgtcattatatcataataatcttaaattttttaataaaaagtacagctattttttttcaaaaaaagtataactattattaataagtaaataaaaaataatttataaataataaaaaggaagtatggaatgaaagggaatttatttcttaaaaaaatagtaaaataaaaagggcagtactgtctctttctctctctcgcttgaataaaagaaaaccctaatattgtcgttctctcatttctcgcctcactctctctctct

SEQ ID NO: 196077 - DNA, 1216 bp, Cannabis indica
gaagcataatggagagcgttatgcttatgcaagtcattcgcaggctgttcttgattgcttaagaaatcgacatgaatgggccagattggttgatcgaggtcccaaggtatgagcacaagaacattcctaagattttgttttgtgacattgaatgaccaaaactgctcttgcactctaatttattaggaaaaataattgtatttatatatttacctgtactcattctttattttaatctcatgttatccagacaaattcaagtaggaaaagacgcaagcttgatgaggattctgaggacaacgagtatggaaaaggaaaaacagcaaatcatgtggaaagcaaaagccttgaatcacagaaagaagaggtccctaagggcaaaagaaatgtgagaaaacgaagaagactcgtacttcaaggaagaggtgtaagagacatcaggaagagacggaaaactgatatactcacagatgaggacttcggaacttcttcagattccagcgaagagagcttgaccagcggaagtgagatgcagggaggccaagcacgtccgtgacgcctcagctagttcagaccagactgggactacgtagttcagaggcctttattccaatgtgaatgaagatccagatagaggcagaaacaaagcttctcaaggaacaccacacattgttaacctctttggtaggactcatctcgggttcatgttagtttacttatgagcatggcttacgacaccgtctaatcaggttgttaggttggatctgaaaattgtacaacacatgatgtaaatatgaattacatttgttcttcttgatagtgagagaatgtattgtgttaggagagagcctttgtctttgttgagaaagggcatagataagataagataaaagtcattatcattattattattaaagtagatgtaaattttgacaaataatttcttatattgcttttgcttctctctgccaattcatttcttctatttcttgctgtgtttatcacccaaatacatttattttggtaaatgtattgaaaaaaaaaaagtccaaaagagtataaaatttgcaccagccgggaatcgaacccgggtctgtaccgtggcagggtactattctaccactagaccactggtgcttgtgttttgtaacaccaaattatatattaatgaccatataaaacaattgtgaagaagtgatttagtaataatgatttg

SEQ ID NO: 196078 - DNA, 920 bp, Cannabis indica
ataacatgtagacataaactagctaaaccagtacgtacgtaagacatatatatatacatattattacaacacttgtcgattgaaaatacacatgatttatatatgaaaacaaaattaggaaactcataaattaaaagaaaaagtatatatatttagctagccaataaaaatgtgaaatttccacatattaattgactactactgtaacaaaattccttataagaggaaatattataactaaaacttgaaggtttcctactcaaattccttatacataattgactactcaaatcgatgagacatgagtcaatataacgcggttgctttttctcttccttgtttgctttctcaagttaattaatgactcaaaaaaaataaaattagaagaaatggttcatagggttacataaatcaacacatatatatagatatacgacaaaggtgttgatatatagaaactaaaaatactccctcgatttatacacacacacacacaatatttgtctaacattaaattaatagtggcttcgatctcttcatcatcattatcatataattattagaattttattctataaagatgttcatggtaatattatcagaccgtttcaaagttactacttctggtcatccgccactgtttcaaatgatgatcactagtaatttgtccgtacaatatgcatatattattggttcggagtatttctttatataaacatttataataaatcaaatgtaatatcctggaaatgagccaaacaagttgacagcaagacgtaagctgctctccaaaaaagcactcgaggggtcccaattttgtggaaaatataaggatgtgaacagattatatatataactcagattggagaattgcgtatatacctatagtactgctttagtaatatatacatatatatata

SEQ ID NO: 196079 - DNA, 1175 bp, Cannabis indica
aataaataatttggttaaatctttaattgatacaaaatatctgttacattaaagttcagtatattatcaaattaagcaggtttatgttaaaataaagtccaatttaagaactcaattcacacaatactgttcttaaacatagacattgcctagattttgatcacacttagtttctaagatttagacccaaattgtataaaacatataacacagcttaccaaaaaatattgagaaattaatttgaaaaaattacattttcaaatttcaacaatgaagtgtatacattgcgattaagagagagattcgtgaatattgtgaaatcgaaagaaaagaacaaaattaggacaaaccttgctagttgaggagctgggtgaggttgggggagccttggactcatcttcgaagtcagtttgattgagcggaataaaagttgactccttagattcagccatttttgcttctcaggtcttctagtggagagagagtctattcttcttcttcttctctaccgaaatggctttcttctgattttgggttgttttacagttatcgtcttcatttgatcgcatgaagtgctccaagatgagaagcttaggtcatgggtcttgcagcttgataattgtgtgtaacaggtattcttgtaatttttgttatgtgggttgtattattgtaacagtgaccacccactgtattagtgtaattattttgccttttttagttataatagaaaaaaatcctaatagtaatggtgataaaatcatgagtaaattatggcataatcccaaaaagtttattctcactagcaaataacccctaacttattttttggtagcaaaaccctctcaaaattcagcaatttaatatttccattcattttgagtgttaagtgtcatgttgaactatccacgtgtacatctacgtagacataatatacacttagtacaattttattggaccatacaaataattatttaaaaaattaatttgaaacaaaaaaaattaaaaataaaataaaataaaacataattaaataaaaactaaaaaaacccttaattttggtaactagacactagaaaccctaattctctttctcactcagcgccaatgtcccactctctccctcttcattatcgcgtagccatggcatgccatctcggcggttctccaaccacccc

SEQ ID NO: 196080 - DNA, 1476 bp, Cannabis indica
tattattagattcattaattaaaagaaattaggaaagaaaaattagataaggttaacctacctcttggtccccttttctctttgttcggccctaaggagaaactaaaaagaaaactcctcttcgtcaaaattctgagggattcagtaagtattcaaagtgtttttgaagctaggaatcaaaggtaaactctagtaatctttattctttgattttcggaggtttttctttaggttcaagcttgcaagttgttcaattgtgttctgtacaattagggctttgtttttggctattttctgggttaattttagattgtttgacatttatttaagctggttttgatggttatgtgagtggttgagcaagtttgaatttaaaaactcaaacttggctcaataatggcacttttcatttccgtgaatatatgttgttgttactgcttggaattggttgttgggtgtcattgcaggtatctggaaagtttggttaagtttgggaaagttttgagagagatttaaggtttttagggttttttttgtagataatcggttaacctattctgtagaactagttaactatttctccaggcaggaccttaggaccactttgccatttgggattccaatttaccaatttaggtagtttctagagccttagttttgatatttcctcgatatttagggtattgccatgctatttattgatgggaaaaacttttagttgagtttagatcctgagaaggttttagtaagttgtttaaacatttatatgattgtgacatagggcctccgttcagcgagtgatttttcattcaggtcgaccaacacacttgtgtttagaaatgaggtaagattagtatagaacatgtatatgtatatgtatatgtgtatgtatgtaaattgcatgatgtgtttgtgattcatatactaccaacactagtatggtagtgatactgagtacattggtacaatatatgatgttcaaagggtacaattctgtgttaccaatactagcacagttaagtacatagtgcatgtggtacaacactcagtagtatttggggtacagttctaccctaccaacactagtacgggacaagtacttagtgcatgtggtacaaaggttgtacttctgttaagaacattcttgatcatttgtttagccatgtggataggtgtatgggtgcctaaatacaagtcggtaatatattatatgttgtatgcttttcttactgagtttgtcgactcacatatattatttatatgtgtaggtaaagaaaaggctaaggctgagcaccagtgattctagagttcggtctcgagatgaattgggcttcattttttagtcgatgtgcgacatatttgtaaaatttattttgaaaatgaatataagttttaaaagtaggatcctgactttttgtatggatatatgtatgtatttataaaggtttaaaactaaatcaaaagtttaaatttgtc

SEQ ID NO: 196081 - DNA, 525 bp, Cannabis indica
ataatctttacataaaactgtttcattcattcattgcagacttgcattgtatttggagtacttttgatgactttagcaccaattggaggactcagacaaatcataatcagctccaaaggctacaagttttactcttaattatttctaatctcttagcttaaagtgtccaaactttgtttgtagaaaaaaaaaggtaaaccagtcaaaaatgataacaaacacaacatggatttgagttctctttttgaactgtctgactgatttttcgaaatgaaaaatctcggcatgagtctgaatcatcatcatcgtcatcattggagctttctcaagacttttagttctttttatggttgtttctcttagtgtgtgcttttgtatgtatacagtcacttaatgtctttttatggttgttctttgctagaggtgtgtgaaagtcttgccttattttaaatatacacatattcttattattctagtgtatgaatttaaaccatttgttccaatttcattattaatttttttttt

SEQ ID NO: 196082 - DNA, 522 bp, Cannabis indica
gctactccctctacacctcccatttttggcctacctaaccctactgtcagactttgcacctccgaacctaaggcttgaccaaacccacgcccaacctcctctcctctaaccaagcattgtcgatctcatgggatcttgtagaacacacattactacaaaaatcccattccatggccaccaaacctagacataatttcttttcatgtccctatgctactggacatgatatccaactctgtgttggatataaaatatatataatgtataacattgttgaatgtaaaaagggatcccgcaattgaaactttgtcatatccaaaattgttggttgtacatgaaatgtattaatataaaattagtacattttatgtccaaaaagttggacatgaattttatgtttgcatttaaatagcaaatgaatatcttgttaacactctccaatgccaagaagagaaagaacaccctccaatgcaatccaaaagaagctacaaccagcaagctaaaaataaaactgaaaaaaaa

SEQ ID NO: 196083 - DNA, 1209 bp, Cannabis indica
aaaaaaaaaaaaacaattcaatcaacattcaggatgtaataattggaaacatactaattaaaacatgtttgttttttatatgcaatttttttcttttaaatgtaagttgtatagacacaattgcttacccttattaatgagtttaagaaatcattttagaaaaaaaaaaaagagagagaataatgtaaacaaaaaaatatatagaagttttgtttgagaccatttttttacactgatcatatattataaataaatacgtcggtaatttataaatatatatattttttcattattattgttttctacgattaaaaagtttatttgtatagaatataaaaagattatctatttacaaattgttttagaaagatttgattataattggtaagaatgaaataaaaaaatatttgtaatcacatataaataattaaaatatcatttttaatctaattaatattttatatatattagattgttagttttatttttttttaatttaattattatttttttataattatataactattgttttgagtattcttattagccttgcaacggagaactaattatagatcttacctctccccttgagaggcgctccataaataatagcaataaattaaaacaaaagtgttgcagatgatttttttagtttacatttaaacattttaaaaaattgctacttttagtgataattttttagtcacaatataaattttttgtgattaaatgtgacttttagtcacaataaaaaattacttgtgacttaaacataacatttaaacaagttggcactaatttagttttagtcacaacaagtattgtgactaaaaatacatttaatcacaagaaattataatttttgtgactaatacttttagccacagaccttttagtcacaacatataagaataataatttataattagtcacaacttttgttgtgactaaaagtaagattttttgtagtgaaaaattaaagtgtgtgttgtgttttgtcttcttttgaggagataaattattatattgagtgtttgtttatttacatttgttataattcaattttttgtcttcatatatatattttcaattcgtaagtagaggaagattcaaattcaaacgactccaaaatgccatcccgagttaaataaatctcaataattatcatacctattgacatcacttctttaaatattttcgtgtatt

SEQ ID NO: 196084 - DNA, 967 bp, Cannabis indica
aaaaatgatatagagtgtaatttactctatcgtggtatctaaaatttgataaatatacttaattttagaataatgattcattttattttttttctttttgaatttttatattttttttcacttattttttaaaatatttataatttctatatacagtttactgataagtagcttaaagaaaatctatttggttaagatttagtttcaaaagaaaattatatagctgaataaaaatactaatcaaatagaaaactatagaacttataaacattatttttgtacattatttgttcaatgtgtgatattaacttaatttttgtgtatacttggtgagttggtgtgcatacttcactattctaatgttttttttttttaccaaaagtcataaaagaataaaattatttcgttaaaatattaatgcatatacatgtagctcaataaaactacaacaattgaacttatactaataataacatgctatctaaataatacatcttaataaaaaatgaaaaaaaataaataataatacagcctatggtgtagtccaggtttatcaccttaacaacaagaggaaattacattatatgggcctagacctcaaattattgttacaaggcccataaatgacgacccattgcagtgcaaaaaacaaataaaagtttacacaaaacaccttattctttttttttttcttttttctttttatgattttttatatatttttactgacttttgttgtatcagtttttttacatgtatataagctgcataagcatagtctaatgtcactgcaatgtagaaataatttgttgagaaaaaccaaaaaagaacaattcgtattttttgtaaaaaaaaataaaataagccttttgtcattatcggctatttagaaaatagggaagtttacgtgaactactattttttgtaaattttttgaacttttacgtttattttttctatatatatt

SEQ ID NO: 196085 - DNA, 929 bp, Cannabis indica
gttgtagcttgcaataggccggtaatcaatagcactactaggattatcattcttaggtataagagtgcggcattcatctcattaggaactcgaccttgtttgaagaatttcaagacagctgcagaaatctcccctcccaactcactcgacatgaccttaaaaactttgaaccatatccatctagccacgggcttttcaggttagggaattaaggcttttttgacatctttaacctgaaacggtcttaaaagaagcaattattagtctaaggtaagctgaggaccttcccttataggatccaaagtcaaattttgtgaaactgaactcagactcctcatgaacttcctaaaatgagacaaaaagtggtcaactacaatgtaaaaatttaccactttaacctacaccaaacaaaatattatcaagttttaatcaaggtcaaaaatgactttttttcctgagtcaaaacacttgactctacttaaccctgagttaaacgacacttgactcaaaccaaaaataaatgtcattttggtcacaaccttaaccctttagaacaatctagagctagttcatttctacctcgcacaaaacgtaaaaagaaaccctagcagagcttcgagtttcttctcaagaaactcaaagactgctatctcacaagatcaagccttgttccttcccagatcaaaccataaccctaaatccacacataagaacacacaaagcaataaaagtaaagaaaaacaatacagagatagcaccagatttatagaggttccccaaaaatgttgctgggtactttctcttggattccactattggatcttcaagaccaataatttacacacttggattccaaatcatgtgtatgattgcttatcccttttaattttcaagtgtttatagtatttttcttctctctctttctttct

SEQ ID NO: 196086 - DNA, 1155 bp, Cannabis indica
ttttaaaaaagaaggtaaaaataaaagaggacaatataaaaaggatatatagtgtaatttcctctggaggagaataattatttgggcttgagctttatcataagcccaatatcagtacatgaggcagcccagcccaatatcataagcccaaacctattttattaggctttgatatcttttttatttttaacaaaccatctcttggatctgtttaattttaccatctcaaagttttcttgtatgattatcagtttccttaattatatgctaaataatttattttatttttaatagaatatgcaaataaagttatccatgataggaatttcaaaaatactaaaaagtaacaaaatttataaaattaccgatttacaattttaataacatttttatggattttttttttattgtttttaaagttgaagctatatgaaatcaacatgaaaaaaaattattttctgagaaaaaatacaagtaaaacacctatataaaaaaaaaaatctataaaaatataaaaatatatatataattttagatgcaaattaattagtatttgaaatcgtttcgtatatattttaagactaatattgctaacacacgcaacttggaaaaaatgcacactattattaattgttacacattattgttatatatataatactttttattatttatatatgcaatattattaatccaataatatgtcttaacaaaataattatttttaaatttgattgacttattgtctattaatttaaatatgataaatcaactttataatgactggaggacaccacatattttttagaaatatttgcaccaacaactattattattaaattatttaagaatttacccttacctattttaatactcacaatttaggcatttctttttgataggtataccaatgtatatttattgcttctctctcctaaactctgcctacatgctagttttttttttttttctttttcttagacagtagctttttttttttttttttttttttatttattattattattaaaaattttatttttttactaaaattaacagttaaactaggttgatctaaatatttttttttactatttcttatttttttttttttattttttactatttgttttttgtttttttaattcttaatta

SEQ ID NO: 196087 - DNA, 1253 bp, Cannabis indica
ttttaataaaactcactattactattaagaaatggaaatgaacagtagtggtgcatatcatctttttacgtctcaatattgctattagtccaattaaatatgagattttatatattttaatttaataatttttataaaatattgttagacaatcacaattacgtctagaaagtgttaaatattactagtgcctaatatcaatactgttagagtaaaataagggtattcattggatcacatccaacagatttggacccaaccgatccaatctaattatttattggatattgaattttgtcatccgatccaatccaatcgaattgaggcatccgatccaattcgatcaaatagatgtattggattggatcggttccaaccattagatgcattgactgattttttattggatgggatccatcccatccattttagctaccatttaagttaatttcattaaaaagaaaaatatatataaatatataaaaaaatataatttaaaacttaataatccaacatatataataaacattagtgtaatccaacctatttctcataatctcataataaaattgctaaaaaataaaatttgttcaaaaaactcacaaattttttaggtttaggaagatgaggattaatattttaaatctaaagttttttttctttaatctaatgtgttaaatgtatattaaatattcttaagaaaaatgtatattaaatcaattaatatatatatttttaaataaaatatatgaaattataaatttattttaaaaatatataaatataatgggatgatcattggaggataattgtatcggtttgattatttatgggatgtcctatccaacaaccgatctaatctgattgaatttttaaaatttacattcaatcaaatccaattaagattggataccaattctattaaatgggttgagattggattagtcgattataattgaattggatgactttctacctaccagtctaccacttaatcaataataaatattaaagaagagagtagaataaatattgaataaaaaagaaaaaagaaaaaggtgagatttcagttcttccctccttaatacagacttgaaaaccctaattcatttttttttttgaatctaccaaaaattaccgcactgtttggatgcctagaaaattaaatattttctcgagggctgactcaaactgaaatctgattccgttggagcccatcgtttattttctactttcattttttttaaaaaaaa

SEQ ID NO: 196088 - DNA, 1498 bp, Cannabis indica
tgaggatattactaatatgtttcatcgtaactccacttttcggtttgaaaatcattggttacttgagcctgacttccccgatctcgtcaaaaatagttgggttaatgactcgaccgttgccaaccctaccaatcctatcctcaattttctatccaaacaacgcaattgctccaagtctttgtcttcttggggtcatgacaaaaatcatttttctcgcaacatcaaaagcatccaattggacattgaacaccttctgacgggtcccatcatttccccttctgacgctaaaaaagccactgaacttcaacgtaacctggataatatattgctcaaagaggaaattttttggaagcaacgctccagagcaaattggctcaaagcgggtgataagaacactagatattttcataatcgggctaccaccaggaaatgaaccaatttcattaagtccctcactttgaatgacaattctcaaatcaccaaccttaatgaaattaccacctctttcgctcagttttatactcaactttttgcttcccaaggtacaaattcaaaagctatggcttttgcaacacatggtctttctaagcaaatcactccccatcagtctgcttttcttgcctctcccttcaccttagatgaagtcaaattttctcttttccaacttgctggagataaagcccccggtcttgatggcttaaatcctaatttctttcaaaaaaattgggattcagctggtagtgacctctgccaggctgtcttatttgccctctccaccaacactgatcttgcccctatcaatgagaccaccttggttctcatccctaaaatcaaaaatgcttctcgagtcaaggactttcgtcccatcagtctctactccactttctataaggtcctatccaaaacccttgctaaccgcctcaaatccactcttcctagccttatttcccataaccagggcgcatttcttagtgatcgcattatttttgacaatatcattatcgcaaatgaggttgttcatgcaatcaataatcgaaagagcggaaaagtgggctgggctgccttaaagctcgatatggagaaggcctttgataaagttgaatgggcttatatccagcatatccttcagcactttggtttcccttatcctttcatttctctcattctcaattgtctttcctctgtttctttccgtctccgcataaataactgtctctctgatcagattttcccgtctcgtggtatctgtcaaggggatcctctctcgccatatcttttcctccttgttgctgaaggcctctctggtattattaatgctaagtcttgtgctaactctttcacggcatatctatctctcgcactgctccttccatttctcacctcctcttcgctgatgatagtcttcttttcactaaagtttctccctcctcttgcactgaagtcaaggatattttatccatctatcagaaagccactggacaatcggtcaattttcaca

SEQ ID NO: 196089 - DNA, 1158 bp, Cannabis indica
tcaagtaaggcatagtccttcctacactccatgcttgtccaacgaatgtggcaacataactcattatgaagaatgtggtgaagtaatttgggctacctgaagacatcctaagttatcaagattccaaatttacgggaagattttgtacgacgttgttcaacatgttgggttcagacttcaagttctcaatagcaaaccattcccaaactaatggtcagacagaaaggatgaatcagttactagaagagtagttacgacattatgtgacagcaagtcagaggaactcggttgagttgctggatgtggcacaattttgctacaacattcaacaatcctctacaataggaacgagtccagcagagattgtcttggggaggcagccgctgacaacatatgaagtggctaaacagaagtctcaaggtgttttcctagcagcataccaatttgcgagggatagaaccgaattgtttgaactggctagggacattttgaaaaaagcttcaaggaggatgaagaagtatgcagacaagcatcagagagacttagagttttttgtcggagatcaagtgttgctgaaactcactccacagatttggaagaaaataactgacaaacgctatcacaagggtttggttcaaaaatatgatggtccatttgagattttccagaaggtgggggcagtagcatacaaactgaagctacaggagcgcttcaagctacacccgacttttcatgtcagtttcttgaagaagtttcatgaggacaaagctgaaggaaggaaacaggtggtgcgagcttcgcctattgtgaggaaatagtttgagaagaggttgacaaagtttctcgaccatcgtacttttggggcatgcaaaaagaaccagagaattgagtacttggttcaatgggagggtgaagatgtagctgatgctacatgggaaaaagctgtgactttgtggtagtttacggacaaggtgaacaactatattagaagtgtatcgacgaggacgttgatttcttctggtaggggtggtttgtgagacccttacttcggttcgctcagcggatctcaatgtcacttgtgggtagcttgtgggatagcaatatacgagtgaagtgcacctgtcagggggcagtacgcaacagtatcattagcatgca

SEQ ID NO: 196090 - DNA, 560 bp, Cannabis indica
ttggattttaaatgttaaagaataaaaagtaaaattatttttattcctaaaattaaattttaatttttttgtgtttatatttattacttgtaattattttaaaaaattaagaagaaatgtaattttatctttaaaacaaaataaatattgatacataaaagtatttagttatctaaatcacgataactttaaattttatatttatttttttatatttcttcctcttttcatattttttcaaacttaataagattatcttaatattttttttagtttgccatatttagatttatatattttgtttcgtttgtactaattatccatatttttatcattttttttttaatctctcaccttttctttttctttcctttttcttaaaactctctcagtatttttttactccattttgtgtttttaagatacttttttttttaatctctcagtattttttttttaactcaaaaaaaaaagaatactatctttttttgtaagtcttttatacaattttttttattcatctgttatatatatatattatttatttctatattgtttta

SEQ ID NO: 196091 - DNA, 754 bp, Cannabis indica
tcaaagtcaaacaaatggtcattggcttccgtgatgaagaattcgaaaaaagtatgttgtgaggaagtaatggaatcaaacaaatttgctagtgttgatgttgcactgtctattttcgtcggccagaagttgaagaaatctgataataagtttgtagagaatgtacaaaacgaactcaaagcattagagttgtgcattcaagatcttgaaggaggagttgagagcctttacaggcgtttgattaaaaccagagtttttatgcttaacacactcaactactagctcaatactcaagtagacagtagtgttatatagtcatagccatacagaatagtgttttttttttcatctacacttgtacatcgatgagatataaatacacgtgtacattcttccacatgaattttgatcatatgattctctgaaattatgttactgatatttttcccccaacatattaaattcagaaatgaagtgtctagttctacttgttacaataaaaatgttgtacaagatacaaaaagaaaagaaatatctaacacaacattttaacaaaatagcacagaaataagagctaactaagattgaattggaagaaagtcaagtaatcaatccttcagaaagtgattctaacatttttatagtgtacatttatatatgtttttgttgtcaaattagcgtaaaattcactaagctagacaacacagagactttaatatattcagtaatggatatagtaaccctcacaatcgta

SEQ ID NO: 196092 - DNA, 674 bp, Cannabis indica
tattagtataagattggcttaggttgcatttggttaaggaggaaagggtcatggtttgatcatcatcaccaatatgataatttttattggtgttaagaagggcatctttattgcgattggattgtatataagtagggttaagattgtgtaagctttgatggagtttggctaagctacctaccataccaatatcattggaggataagagtcttatcgttgtaccaattggcaatgagagaagagagaagaggaaatctgccaagtcttttcctgcctccgcaaatacaacctttttcttctttgtatcgataagaagtttgagcttaaactcattattttgtgttgttgttgccattgctgcaaattttgatttttaatttggagatgagcagcttgttgtgcatttatatatatatatatatctaaaatataaaataaattggataataaagaaacagttgctttatcaataaatgttaattatttatatgcatgcatacgcgttttgatctcgtctttcaatatattgttgattaattatatgatcattttcgaaatattactttacatgcatattaattaccagtgtcgattatgctactacgtacctggggaaaaaataaattaattaattttgcatggtgaaaatatatagatttcaatttgatagaaaa

SEQ ID NO: 196093 - DNA, 593 bp, Cannabis indica
aaaaaacaaaaacaaaacaaaagcaaagcgtacgttttggtgtattaaatttcataaaaataatattttatcatcttccgaatctgtgtaaaactttacttattttcaaaatctgattttggatttgttttagagaatgataaaccaatcaaattaagtggacccatatataatatgatcagtattcaaaaattataaaatatatttaaattttaaaccaattagcaaattaactgctctattatgagtgctattaaactcaatcatcaataataaagctattagaaaaataacacatgatcccatgcaaaaatttccaattggcttattatatctctattataaatgttttggcctcattctaaatatatattatgatttaaagaaagctatcacattggggatatcatttttctttataaaatgttttagccctcgtttctaataaattatataataggatttaaaaagctatcacattatatctacactttgtattaaaaaaaaacaaatgtctagcattactatatattaataataaaaaaaaaaaattgaactgacaatgtacatctaacaacacatcccatatgcaa

SEQ ID NO: 196094 - DNA, 2058 bp, Cannabis indica
ttttttaacgtttttttttttttttttctattattgcaaaaaaataaagtattgtatatattattttttttttcagtgtcatcccattctcaactactctatttgtaattttttttttatatcaacctcaccacccatgtaaggtaataagtgagataaaataggaaagtgtgcagttagagagtaaagagagtctcctgatttttgacggattattattttaaaaccaattattctttttgtaaagaaataataataattttattaattcttttattttttgttcaacaccaagtatagaattggttggtagtatataactacttggacactcttctctcttagtctaacttttgggagtgagttcgttctacccaagtagttgtatcatattaatctcagatatgtaagcaaactcaactggaagccaaattgattatttataaacattacaaaacaacttagattaagctcccattattatacattagataacacagttcttcttcttcacctcttaaaaagtcttttaaaataaccaaaaaaaaaatgtcaaattcataatcttaaacgatgacatgcatattcaaatgattatgatatatgccatgattactagattagatactaagtaaagtccttgaggagagtcctgacccattcttctttctcctggtcaggaagactgaatagaatgctaagaaaaccattgttttggctgatgagattggtagctttatgtctctcagtcatcgttagggtagtgttcttcgtcaattcattgttaagtttcacaatttttgcatcaattccaccataaagatctttcatttctccagcaataatacgagctgcttctttgattgcctctccaatctcaccaaagccagaaacattttcattcttttttgacaaactaatatcagatgatgttatcgaaggcacaagatccatcggctgtggaatgaggtcctctctcttaccttcttcagtttcatcatcactcatggtttttggagcttctggagaggatgacgatgaagacgaggtagaagcctggtctttattctcaatctcaatcgattttttgatgattttttgatcctccacagttaaagagtatagctctttcagctcctcataaaatggaaatggtttatttctgaattcatttgcctctggatgaatctataaaattataaatgtaacaaaattaagagaatgaagactttatttacagtgtagaactaagtaaaacacccatttctaaacaatactagtttaattagctttagtaaacttaaaacaatgagaaaaaaaaaatgtaaattgttaaaatattaggctaacaattgttaaaaatgcagtattaaccattctcatagtttaattgatttggtatatatatatatatggctaattagattttttttcccaaaacagtgattgtttatgtactaaactatgctccccatagtttgatctccttgaactttgacatttactaaattatgctccttgaacttttatccatgttagattttttttactaaaattagacaaaagtccttaaattcaataatttcaatagttcaggaagaatttttaacgaccttaaaaatttaggaggcataattttatacatatcttaattagcctatatatatatatatatacacacactatatcatatgctatgttaaatacacaattacctggatgtatacatcccacactatctcttctgcagtgaccatctttttacacgagttccatgtaaattcattactgcattgtccatttaatatttcatggacaatttcgaaacgtttctttaaaaactttatttcagactcgatgtgttctgtaggaatgtttgataaatgaggcaactttcctaccaatgatctcttgatagcttccaaatgctcagctgggttggcattaatctcttcagctttgagttttctgctcttgtataaatctaacatggtctgaataagcttaaaactctcatcctcagtccaaattttttcactcagtccagaatctgtacta

SEQ ID NO: 196095 - DNA, 1695 bp, Cannabis indica
gaaacttcttatcgtaatctctttgaaatttgtgaagatgcttgtaatcttgtaaacactaatatcaatagagatattgctactattgttccaactgagatgcagagcattacacatggctcaaactcgttaaacctgatgatgtttttctattttactgcttaattcattatcttgaattcttgagattttttagtatattatttcttgatcgtgttgcgtgttttgttggtactgtaaactgaattgtaagtgaaaataataaaaataaatagggcttaagatattttaggggaaaaggaaaaataaaagaactgggtatgaaatattagatattttcttcactcaatattgagcaatgagcaccacttaaaagattgtaggaagagccaaaatgattttgtttggactttgggggcccaagctatgttggcatttacctttgtctccactctacaccttgataataacatacttactttattatcatttcagttccagaagttgtaaaagtaaatgtaaagggcctttgataatcaagagaaaaaaaaaatgaggtgaacaaacgtatggattgagttgtcagatgtaagaaaggtaatttggtattggtaaagataatgaagatgggatgtcaagtcataatctatacctcttgtatttggcattattaaaaaagtaatgctccctatactaatgcacttaacatgtgcacaaccaacctatatcttattccattgcccacttttcataccaaatacaagacatgagtagtctaattagtgtcttagtgataaggtttgttgtggacatatatatatatataattagcaaatgatacaatggaatcctagaatgttaaattattaaagaaattaatcaactttatcaacgttgtctttcaatagttttttttttttttgaaaagatgtctttcaatagtttagattgattaaaattactcattttagaaaattaaattcaatgttctgtgaagcttagcttattattaaggagagcattctaaaaaaaaagcaaagcaataatgtatctggcaattttagccttaattaaaaatttagttatcatcaattactgcaacatattttttaattaatgatgacataaatatcatataagttgtttttagttatttatttatttattttttttatttgctactctctttttgagaaattatttgattaacttttattgacattttatatgtgcaatgccaattactagtgatcttttttctggtatcaaattgtattttccagcatggatcttctttttgtttgaatatccgataacaaatgtggtagtttcgttatttaatgatgtgaatatatcaatgcagtagtatataatactaaatcagatataattatattaattatgtgcaaattttctaaaaaaaaaattatatttattatattggtcggttatattgaagtgatgatgcgaaattaatggacttcattaacttttttttttgataggatggacttcattactaattaaaagcagtagtatataaatatttatatctcgatacaataagtaggtcatagtcttaaatttgtcaacgatgaataaaaaaagaagctacagagaaacgtttaattaaatgatttcatattaatcagatctaatctaaaaactgtggcaacattaattatgtctagtgta

SEQ ID NO: 196096 - DNA, 862 bp, Cannabis indica
ttgcaaatttagttttccatccaaacaactctgcttatgtgctaagttagaatgcttatgtgtacctttatatacacatgtcacacttacattgctccctataatatttattttaaaaaatattttcaaattaaaaaaaaaggtcatgaactaaaaaataagcaaaaataaattcttttttttccttttattccactatatcgatgtttttcttttgatttttttctttttcggattttattaatcttcattcaccaccacccaccatcactacccacaccaccataatatattttttacatccaaaccacacccgaaaaaatttgaacaaaaatcaaaccaaaataaacaaacccagatctgaaaccatcaataatacacaactgatttatacataaaaaaatttcaaccaaaaaaataataataagaaacttaaaagaaaactattttttctctaatctccccactctctctccatctggttctcttctcatatcgactatttttagccaacgtcaacccaaaagaaccctgaaaatgaggctccaacccctcaaaactactcaggatctttgcaccccaaacctctttctccctcactttgggatttttctatccccaaccctcatgtctctttctttcgctattcatgctcatgttttctttcctgtcgttagttatggcggtccctggtttgaaaagaccacttttgctctttttttttttgcaaagccctcttttaagatttcaaaacttatatgagaatgaggtttgcgtagtggctggtggtggttgtgtagagagtcgggggagaaagttaaaacgtgaagaagaaagagaaaggaaaataataataataata

SEQ ID NO: 196097 - DNA, 770 bp, Cannabis indica
aatcctgtaattagaaatttgatcattattgcccagtactgaatttactgactaaaagtccaaaaaaaaaatgttactacagaaataacttgagacaagttcattatagcagaatggaagaaaaaattatcttgcacaactaatacagttgcactagcatatcttctttaacaaaaatcgtggatttacaatcagatgagaaggcataatccactaaagtagaatagaagtataacctgtaaggacttgatgatgaatctggcgaaaaataacttcatagcttgagctctttgctccacttctgattgctactcttagctgcagttgatcgttaccagtctctttcttcaagcatattcgcatcacgccttcattacaaacactaaagggagtactccatctatagccatcaacacgcaactgaagggaaaaacatatctccatcaatgtcatgtaaatcctaattacatatatatatttgaaaggagaagagctgcatggaccttcaaaatttctaacttataagactgccaacggaagggtttaggagaatcggtgggatgaatccactctaacgaatgagattcacactgctgcaggcaaagactgtaaccaaccctattaataaacaaggtgtagggctgaaaatggagaacctgaatatcaatcaatttagtagttgttagatagttattaggtaccataaaagccagcaagattcacaacatagtaaagaagagtaacatttaatgcaaacattacatatacaa

SEQ ID NO: 196098 - DNA, 580 bp, Cannabis indica
gattcgcaatctagcttgctattcatgtgtgaagcaccaaagtcatgtcgggccaatgtctggccagccatgcacctgtaggaggcatgctggccggccatgggatgtccagaaactggacaacccccttgaagtggcttgttcgtcattcgtcgtcctgcttaagttcttgaactccttgttagttgaatgttgagtagatgacttggctttcttgttagcgggttgtactgtcacgtggcactaatattggctacgtagacatgccacatcaggtgtacaaaaatcaaaataacaatgatctcatctacaatcaaaaatgttagtcataacgatcttaagaacccgatatatatataccttgtattaggtaaattactagataacagatataacatacttgatctaaattaagctaacgtgtacaataaacttgagaccttagacataaactgaacataatttatcataacaaaaatacttgaccttacataaacaatgtaacatctactagtagtcacataaacattgttctctaatatttacagagttcattttgacatgttatttacctaaaaaa

SEQ ID NO: 196099 - DNA, 896 bp, Cannabis indica
gaataagttttcttatatttataagcataggatttttgtatataaatgttgctcatatgatggggtaaatacaaataatatattgactttagatccatctagtgaaactcggcctatgaggtgatcttctgttgacgtggatgccacatcatgttgcattgatagttgttaaaacgcgtcttattttcaaagacacataaatacttaattgacaattattctatttccttagtcgcaatgcctaattctcgaacataatctttaaaaataaagtcttgatgttgtgggatttgataattaatggacgagataataagcttgatatctaaaggctcattaattacctttccagaagcactacttaatgctatctgaaaacctgttttgatggacttttatctcgcctaaacaaagtgttttttaagcatctggatgtcttgacctcgataatgaattcagtccatgatcttaattggccttatatttgagtttgcattagctgatcttaaaattacacgtttctttattcggaaaaacaagtttgaataattactattataatatttatagcaaattttattttagatgatgatgcaaggaaaataacataataatataatatcctaaaataagataagataacatatatttagctttttttttcctccttaagtttatgacagattcaattatacaataattaataaaagtaaaattacattaattaatacaattaacattgcaaataaatatatataaaaattcaaattaagaataatacacacccaacttttctataatttggtgatcaatacctactccataggaccttgtctagctaaagaaatttcatagaatcaatagacaataatggtctttcaacactaatcaatcat

SEQ ID NO: 196100 - DNA, 1515 bp, Cannabis indica
ttttcgttttattataaatgtaaaaaaaagtaaatatattttggggtaagttgaaaaatgactcttttattcatcaattaatcaaatttacctccaattttatatttatttgaaacatacctctttttatatgtattgtacctaaaatacccttacataagagaatcacatggagagtatcttgaagtgacaggggcaaaattggtataatgtttaaaaaaagaggtaaaattaatagattttaaaaaagaaggtaaaaataaaagaagacaatataaaaagggtatagagtgtaatttcctcatatattttcatcctataaatatataaaggcactccattcattataaacattaaactaatttattttttaatacttttttttttcatttttatacattattaatttttttcatattaaatttacgcattttaatattttttcttttatagttttttacaaaataatgaatatttttaataattttttgtttcacgtgaaaatttatgttttgaataataggttttgtaagagtaaaaaaataaaacaaagtataggtcttaaaaatataatttatgttaattttattaaaaagtagggtgccttaattaaataattatagtaaaaactaatatgttcataaaaaatatttgcttaggttaattttgacaatgttaaagatagggataaaataatacttactttgccacataagagcaaaacaatattatgtcaaaaatccatagggtaaaataatacttactttgccacatagggggcaaaacaatactacctcaaaagttggcggatacgtatatactactggcaaaagtcaaggaaaaatccatgaattgttcttagataaatgctaaaaggcattcttagtgcctagtgttgggaatattatactaggatctagatttactaaaaagtatgttgaattaacatcctaaatgtgaatatctctaatatgatgaaattaaacacataagagtttagaaaatcttacattgattgcagcagaataatatgactcatttcgctcagatatctaacccgtgttcctttctatcgaatagtattatcaagatttgagcctggatctctttctctccttcacattggttaccaccgtcttccgcactatgatagaattcttgacttcgtatgtgtgggcatgacactctatcactatgggtcgattatgaagaacaataaaggaggctcaaaatcactatagaaggtgtctctcatctactaattgtctgacacagttagaaactacatttggtaggctgaaacgattggatgagaatgagagcaacatgttccttttatagtgtttcaactaaggcttaggattgaattagaaggattaaaaaagaaaaaaatattgtgcaaaaattacacatagtggccggccactaaatggccttttactagttataactttgccactttatttcaaatacttattcttctttccataaaaccatattttccaatttcaatcc

SEQ ID NO: 196101 - DNA, 857 bp, Cannabis indica
ttttgttctgtccatatgacaagagattagatatattaacttgtgttttgttttgttttgttgtgttctgtaattggtttttattacacaacacaacaaaatacaagttcccaatttgaccataaaatcttattgaagtgaagttccattgaatattttcatgtattgttctttgagggttccttgctaaatgatcttttatttatttatagatagatatgaattattttgcaaaaaattatccaaattaagccaaaagtgcaaaataatttcaaaatagccaattttgaattttattttacattaaagccttattttaataaatctttgtaaaaatgacatcttttaatgtaaaaaaaaatgacaaattgcttagactttttaaatgaagtctagaaagagttgtatttggggtttgagagagagagatgcatttgtgattaggggtgttcattgaattacatttaatggatttgaactttactgttccaatctaattatttattggatattaaattttatcatccgatctaatgtaattgaattgagtcatccgatccgatctgatccaatagatgtattagattagatcgatatcaactattgaatgcaataattgattgtctattagatattgaatatatccatccaatctattttagctacatttaagttgatttcattaaaatatataaatatatataaaatataatttaaaaaccctaacaacccaaccatacatatttttttttgaaaagttaattttattaaggtatagcctcagccattcaatattctttaaaaagaagagcattccgctcataacagacaatctgacaagaacaagacgcccgacg

SEQ ID NO: 196102 - DNA, 777 bp, Cannabis indica
ttttttttgttttggttggagtatacgtactgtcaccaaaatttgtgattggtgatttagagacaaaagttctaaaattataatagtttatatataagatatcttatagtggtattgaatactataatgttgaaaagtttaagagtgctcataagaaataataacgatatagattcaattatatataaactaaggaataagtccgctaatactttttaacttttcaatgaattatatttaattttaacaaaatatatcttatgtcattgaaatcttaagtaaattattatatagtacaataattattaataaaaaataatttaatattataaaatttgtagggacatatattgaaaagagagtaaaatgattattaatgcatctaatagtatcaaaatataaattagatagataacaaaaagtaattaagttttaagactatatacacaagtgattgaaaaaaaatgtcagaatgaaattatatatgatatggtgtagtaattattgagggtaggtagagcaatgatttttctttgaacaattggtacttatgagtgattcatcatataacttactttagatttcatcctatttttgtttcctctatttttgttcacaatttttcctacacaaataatggaacaaaatgcgttttttttttttccaaaaaatgctaaatattgtttgtatcttttttttctaaaattttctctttctctatcctagcgaaatttacctttttttttccttttttattcctcaattagaggatgagat

SEQ ID NO: 196103 - DNA, 658 bp, Cannabis indica
ttttttttttttttctaaaaaatgctaaatattgtttgtatccttttttttctaaaattttctctttctctatcctagcgaaatttacctttttttttttccttttttattcctcaattagaggatgagataataagataataaaataccacttaattcaaaatatatattatatttgcgtagaataagtgtaataaaactgaatatcattttgttgattaacagaaaaataaaaatcattttaaagacataagaattgataatcaagaataactaatataaaactaaaagatataagattatagtttttaagaagtacccaaaaaaaattgaaaatactaaaagaaagtgatgcctggagctcatgtaaccaaaaccaaaagagcccaatgatcatgattttcaagtttcaatataactcttgtcagtaatcaatccactattagttattaggaactgctattgcccactttgacagattagatatacctgaaagatcaacataactcttgtcagtaagcaatattactgtgacctcactttaatactcatttgcaatttctagaatactccgtattcatctcatgatgatgatgatacagtattgaagtaactccgtcaaacttatacggctattagggcttctccaaggagccat

SEQ ID NO: 196104 - DNA, 2237 bp, Cannabis indica
tttccttttttcattttatattgaaaagaagttttagttagggtttacggtttttatgacaaaagttttacaaaaatatatgtgaacttttttcaaaaatgttattctatggatttttttttttatttttcttcataaaatatataatatttttacttattgtttaatttcaactttaattttctccttttaggtctcctatggcatacattgctcaagcaaccactgtctttgatgtgaagcgatctccatccatggcttcattctcttctagagggcctaataccattgaaccaactattctcaaggttagcataattaattttttctttttagtgtttttttttaattttatttaatgttttggaataagttagaaatacttcttttttgtattcatttatcaaaaatactctcatattatatttcattaaatgtatcaacttttgtgagtgagttgtccaatataccttcaccctttacttaattagtctaatacataatttacattaatctaaggggtataatggggacatcatttataaaaatgggtatattgtaaagaatatggaaataaaagtaaaaactaaaacaggtataaagtaaagtgggtatacaatctgatttcctgtaatgtttttgctattgtagcctgacataacagctcctggagtgaacataattgctgcatacacagaagcaacaggaccgtccgatattgaatctgatcaccgtcgagttccattcaatgtcgagtcgggaacatccatgtcatgccctcatgtttctggagttgttggccttcttaaaacacttcatccagattggagtgcagctgctataaaatcagctataatgacaacaggtaaaacataacatttttttttgtgttataataacaatattctataacacttctatgtattataatttacactaaaatattcttacttgaattgtagccaaaactagagatgggactaagaagccaataatggactcaaccatgaaaaaggcaacaccttttgcctatggtgctggccatatccaaccaaaccgagctatggaccctggacttgtctacgacataaccatcgacgattacttaaacttcttatgtgctcgtggatacaatgcaaccgcccttcaagtattcgctaacaaatcatacaaatgccctaagtctttcaacatggctaaccttaactacccttcaatttcagtccctcgagttggttcgcgattggtgactattactagaagagttaggaatgttggcactccggggacctacaaggcttttgtgagagccccgattggattttcggcttatgtaaagcctgcaatgttgaaatttaacaaaattggtgaggagaagacatttgagattgttttgaaggctaaggttgttggaaataagcctattaaggattatgtttttggagagttgaaatggtctgatggaaaacacactgtgaggagtcctattacagtgaagtactaattaagatgattaattaatttgtcaattaattacaatttcttgtaaatgtataagtatttcatgtgaaaaaagctatttctttctgggatatatgaagtaattatgtaaaagattgtatttggaattttcatagtttcattttaacttatttcttttccatacccaattgatccccctaaattactattttatatgtatgtaataaaactaaataaaatttggaaaaacaactacttctaaatagtctatctgattgtattttaaggtacagataattaatttaaagtgttttcaacaattctaattcattcatttataggtactattcatatatatatatatatatatccatgtttaacattttaatcatataatcactacaaaaaataattacatgataaattttttagtcacaaaatttttatgactaatgtaacttttagtcataacaaaaagttacttgtgactaaaacataatatttgaatacaaaatgtcactaatttagttttaatcacaacaagtattgtgactaaaaccacatttagttaaacaaattattatgacttttgaaattttattgtgactaaaactaagtgatatttttatagtgataaaaaaaaaagtaaataatatttttaactttgtattttgtaaaaattattgattatatcatctaattggttaaaagagaattaaattgagtggtggtgagcggagcgcattggtaagtag

SEQ ID NO: 196105 - DNA, 1199 bp, Cannabis indica
ttattattattattttggtatttcactataaattagagtgtttattggaccacatgcaatatgtttaagtctatcaattatgtagtagatgttaaattttattgtccaatttaattcaattagttttaatcatccaatcgatcgaacatccaatgaatattggattggaacgattctatttattggatgtattttatgcatatctattgctttaatttagggttatctagaataatatgttagacattagattggtttggattcatctaacattttaaattcaatatttattgaatttaattggattcattcaatctaaacaaaaattaatgttaatttttatatataaatattttttacgtataacaatataaaatttaattattcattcaaattaaattaaaatattaattagtttaattaaatgttagatgtattagattttcggacatcccatttaatatcccatccgatctaattagatattaaaaaaaatatccaatctaattcgattataattgaatttttgatgtttaacggtcagttataattaaatcagtcaattgtcattagattggatcgatttatgtatacccctataaactactccagtcctgtagttacatcaactcactttttctatttggagtcaacttacttctttttacagaaagtaaaaagcacaagcatctacaatagttcataacatcgaaatattcttaatgtgtatgtatgtgtaactgaaagtgttgtagtgtacctatattgctcgcctgtcaagccatgatatctacaatattctcagcaaaataatttaggaaaagtttgtatgtttcggtagattcatatctagttttagtcattttttttccttttattatcgtatacttcctagttatttagaattatacataaatttttaaaaaattctaaacaatttacagtgtcaaaaattaagttaaaacaattactgaaaatatttaaaatttatttttgatataaactattcgaaattttctgaaattctatagctactcctaaataattacaaccttcacaataaaaaaaattatactaaaaagtttcttgaatacttaagatacgaggtgtaccaggttaatcctttagggggtatgctagactttcccaataatttaatgatttgcttttgggcatcacaagtcctacgttttgggatt

SEQ ID NO: 196106 - DNA, 722 bp, Cannabis indica
aatcaatttaaaaaaaaaaatacgtatgtaaagcagaccataagttcaaacaccaccataagttcgcatgaaatttcaagaaaggaaaactacaccgtaagttcaatgtatcagttaaaaagtgagaagggaacaccaccatcacatgccagctttaattagattagaagccaaatgagtacagaaaaaaaatgtggcacatttacctaacgagaaaataccaccatatagggtgagcatcaatgatgtgatgcatttcaatttttacaaaatacatttttttgaaaattagtttggagctgcacttataaaaagttgcctacgtaccctattccttagtagggatagggatcaagctccacgtagttcttaggacctgcaaaataattaaattagtaataagtcagcaagataaacatatataaaatggaaaaaaccaagagaaagtatactcagtcaaaaaaagagcaagcatactcagtactaaaaacatttaaaagatctcgtaatacaaaacaaaattacattgtattgacttcaaaatataaaaataaatatttttaactaaaaaaatgagtcgtttatccaaaacacataaactattatattttctaaaatctaataaacagtttttaaaataagccaacacagaatataaaatctaaccactgaagacaccacaaattatttgaaaatagtgatgtaattcgagcaaaaacaaa

SEQ ID NO: 196107 - DNA, 1369 bp, Cannabis indica
aaaaaaaacctcttatatcttagttttctagacttaacaggcttttttttaggaataccttttaattttcattctgtttataaatttgaaatgttaattaaatattaccattagatactaaatagattgcaattatgtacatctttgtgtatgtgacatgttttgactagttttttagattttagtatcacatctatacatgagtacatagtgacaatctcagttgatatttaaagatagaattcaacgtccatgtgcctcacatttgcaaacaaatataatgttaagagggtattgtcacaaaaaaaaatataataagaaattaagtatataaatcgccgcaaattacccttatattattagtatgtcaagtattttatataaagaagtaaaaatatgtgtataagataaagtcactaacactatctttgctaaaaggagtctaaatgtttcttctcctaatggctctagtatagatgtgaggaacccttgtttgaagtatggatcgtcaataccaattagattaaatcccctagtcatcctttcaaagtgtaattattctaatttttccttctttattgagcagcacttcatttcgaaagcaaaattctttctagtaagagtacaatccttgccaggtagaattactttttcaattgtctaccaaacgaaaattatgttcgattcaaataatgaaaactatgttggaatcttcaacatagatacgatcaacactgggcaacctattccaatagaaaagatgcaggtaattctaaaaaaaatgctcgaggccaatcaaagtaacttcattttataatacgggagtatcatatgcaattataaacccagacatctaccgccaaaactgtggaagaagaaaaaatagaatattcaagtgtcaaataacaaaatcctctacaccaaattaatgagtaagccaatcaatttcgacatttacacaaaaaaaggcttttttatgacatgttttttaatgtatttaggttatggactttcacaaatttttacatgttattatttaaattatgccacaaatttgttatatatttttgtaatctcatattttatttttggtccaattatatgtttctaccttatccaaaataatggaattacccaaatcaagagagaggaagagagagattgatcaatgaaaaatcgtgtttttgcaaatgtcagttgtatatacgaaaatataaaaactgtaaagcgtttgcagcagcagtaagtaattctgctacagcaaaactgaacagccagaatataaaatatttgcagaaaaataaataacttgacacaagagatttgtacgtggtatcagtgttctcccgaacactcctagtccacgggg

SEQ ID NO: 196108 - DNA, 1145 bp, Cannabis indica
tgttatttggtttggcagctagattttcatttgtagaaagatttgtagttggatttgagccagatccagtgagagatgagctgccttacttgttgctaccattaataccccgcaccttcttaactttactgtcaaaactgagcaacaaaccttgtagttcttgtcaagatatattaggtttttcttccacttgaacaacaatagagagatactcaataactagaccataagttacattagacaccagatgagcttctagataagggtctctagaaagggcaagcatatcataccatattttcttctgtctaagatattcagtcaagggtgtcatacctttgcgagtggtgtgaatgatggttttgtgttcatccattttggctctagaataagctccaaatagattctctaaggctcttgagagtgcaggtgaagtggcataccgcatgacttctgttataattgattctatataaaactatagatccagcccatgagaagttggtcactgactatccaatgttcgtagtttggattaatggtgaatccaaaccctggttgtccatctgtagtgatttcagctggtatgaattcaggtgggcaaggtttgactccattgacaaaaccatccaatctatgacctcgaattatggtagacaccgttgtcttccataaggtgaagttatttcgaaataagtacttgagagagaaaggctggtttatgatattgaatggttgtgtgtaattgtttgttaaatttggttagctatttgcagtactagtaccactggaggtttgagcagcggccggggttataattagtagcagggtgagcttgtgaggcacgatttttaggtaatggtgtggggggagtttgagagtttccaatagacatatcggtggatgagtggtacaactctgataccaagttgtgatttagactaaagggaaaatttattttcccagctcaaagaatagagaggagcttttcatcatataagagtacaatacaataagagcctttaatttaggctgtgccgagtggcattatagaaaatgaggcataacttattttaacaaaaaaggaatattctggaggaggagaaaacattttattagaacaatgaaaaaaaacacttacatag

SEQ ID NO: 196109 - DNA, 1290 bp, Cannabis indica
gtagattttttgacgtattgcaaaattgctgtcttttgctgctcttgtttaaaaattctcacattatatttattttcttttcagggtaagttggatccagttgtaggaaggcagccgcagattgaaagagtggttcagattttgggcaggcgaactaagaacaatccctgccttattggtgagcctggtgtcgggaaaactgcaattgctgagggacttgcccaacgaattgcaagcggtgatgttcctgaaacaatagagggaaagaaggtgctcttcatacttttaagtgtttgtttcgggatctgatgttaatacatgtgtgtgtgtgtgtgttttatgtcgtgttggagattttatactatgtcaatgctcaatttaaatctttctttaattttgtgaataataatatcatgagttggtttttgtctgtaggttataacactggatatgggtcttctcgttgcgggcaccaagtaccgtggagagtttgaggaaagattgaagaaacttatggaagaaattaaacaaagtgatgagataatactattcattgatgaggttcacactttgattggagctggagcagcagaaggagccattgatgctgctaacattttgaaaccagctcttgccagaggtgaactgcaggtaatttcatcaccatggaggactaaagcataaacacacatgcgcacgcacacattacttgtatatatgctgtcttattaacattgaagttgaaatgataattatgtatggttttaaagtatgtgaaaaacatggatggactttaaagttggtcaatatgatcaagttactgctgtttttttttttttctaattactaactactaagattctggaggtacagcggggaagtcatagtttcctttttaatggtgcagtgtattggagccaccacattggatgaatacagaaaacacattgagaaggacccagcactagaaagacgatttcaaccagttaaagtgccagaaccaacagttgatgaaactattctaattttgaaaggccttcgcgaacgatatgagatccaccacaagcttcggtatactgacgaggcacttgtatctgctgcacggctttcatatcagtacatcaggtacagaattgtatactattgtcagctacttgttatgtgagctatgctctgccatggaagggaactttccttgaatattatttatgtatcgattgatactcttaaaatcctcttgcttccttttctcatatgcagttaattttttggtcaacttatgaaaattga

SEQ ID NO: 196110 - DNA, 639 bp, Cannabis indica
atgaattatgattaggtacatttctcaatttttcttttaacccaataaaaaaataattattttctgttattgcaacttctaatctaatttattatcctaatgttatttagaccccttcttttttgttaactatgccattagccccatttggtatttgctagtagtctcgttgtttcactatttttgaaaaataatgataataattttgcacaaatattttgctaaataaatagaataagaatgatttgcaagcaaagaaaaagagagaagaaagtgaacatattttgcattaaccataaacgacaaaacatgaatagttttcacaataattgttttgcctaacttttttttttttttttttttggtagtggggggactggaatattgttttacctactttacacgtatagtctttgcttagaaaaggaaaacaagttagtgtgattttactattggtagtggtaatctttctctgttggagcctgttcactttatttttaccctcttttctttttcttattcctctttttttttcccttgacttaattcattttatctagtgtttgtttttcattcttttgatagcttattctcattgagtaatattaataactaatatcgtataccatcgtccaatat

SEQ ID NO: 196111 - DNA, 626 bp, Cannabis indica
aaattgaacaagtctctatacggattgaagcaggcccctagagcatggtttgacaagttgagggcaacactgttaagttggaactttaaaaattcaagagcagatacgtctcttttcttcttcaaaaatggcaccgcttttatcaaagctctaatttatgtggatgatataatagcgattggaaataacaacaagaaagtaaatgattttattgttgaacttaacagaaagtttacattgaaagatctcggtcctttacatttttttcttggaattgaagtgtacagggacgagacaggtctttacttaacacagacaaaatatattgaagatttattgaaaataacaaagttcatcaatctcaagctgtgtcccacaccagccacaacagggaagccaatgtcccttaatgatggagagccattgcacggcatcacagcctacagaagcatcattggaggactgcaatatctctgtcacactcgtccagatgttgcctatgctgttaacaaattgagccagttcctgaaggctcccacgacagcacattggagtggtgctaaatgtgttctgagatatctcaaatgaagcatgaacaaaggccttcacatcagctgtgattctca

SEQ ID NO: 196112 - DNA, 1446 bp, Cannabis indica
atatatatatatagtttgatttcctaatttaattctcaaaatattttaacaattaattatgacgaaaacgttgatagaaggtctcacctatataaatatagggtctcgatcttcgagctcactactcattctgtaaagtaaatccatctaaagagagtagagagagtttgaaagtccagttactcacactaatcagtctaaaacttgtgttagattgcagctcaaaaaaatcaatggttgaagatatttcgatcatttaattatatcgtgtatatatttatttgttctatattttcatatacaattatatatgtttcatattttcattcacgttttaaaaaatgacctattacaaaaataaataaataaaaaataataatattctgcgaacttttttttttccagagcatcgtatgcatattgttctggatatatttgatcataattgatttgtcccatacatatggatttgtataaatccaatggtatacattaatttacgtgaaacggtagacggacatatgatttcatataggccatcatatacataaaatatataaactaaagcttttcttattttagaaatagaatagactttatgtaagtggtgtaataaagtaacagaagtaatttcaatgaattattattagtagtactactagttaatgttttttatttattatttatatttaatttttatttatgaattatattaattgtaataagccatatacagtattttgaataattcagtttatatatagttttgatttatattatatgcttttaacctactagccttgttttgttgtgtctttcttgtgtaccgcattttaaggtgggattccaccaaccatatatattatttgttggaatccaaatacgaaagcaccaacttcattttctttagctttgtccccccaaacaccaatgcctttttattataatttttattcttttttaacttagcgataagttcacaagtatatatgatgagtacataatatgacactcttctttataaatatcataaactctcaatgttgtacatgtattctatataaaatgtaattatttgtgtaacgatattttttaattttttaagttaactttaatagaatataatattacttaacataatattttttattaattttataatattattacatatatttaaaaataaaaataatgtaaatattttatataaagaaattttaatttaaaatatttaaaatatattgtaaatatttttaactacatttttaattttgtttgtttaactttaaattaagataaaggataattctgctcgatttggtacacaacggttcaccacgatatctcacttggattttattaatgtagccgctagctaaaaaaaatcttcaaggatcaaaatctcaaactccatttcaaaaatttttttaaaaaaaaaactacatt

SEQ ID NO: 196113 - DNA, 448 bp, Cannabis indica
taacacaaattttagatcttctaataaaattaaaaaaagataacgacgatcaattatcttgattggaggaagttttggttctttagctgagttttgattcacgaaagagataagtcattttgaaaaatggttttttttttttaaaaaaaaatcaaaatatatgtatattaatattgttaattagtttactaatttatttgttaacattattaattttgtaggtattttttttttagaaaatatgtagaagtttagtaggtttatgtaaattttccagagtaggttattatttgaataagcatgtccttcagttaaacaaatggtgattctttgtcattattcgttaatatttacattgaaaattcttaaaataattcatatcacttatacaataaataaataaataaataataaaatatctaaatactacaaaaaaaatggcttttta

SEQ ID NO: 196114 - DNA, 898 bp, Cannabis indica
aatatattttgtttttgttttgagagaaaaaaggttgaaaggtaaatatttggtgtgtcatggacttattgtggttaggggatgtggaaggaaggaaggaatagaggaaacatcaattttgtgtgtttccaattttttcttttctttttttggaaaattaatatattattttatttgtactttaaactaataaattattaaacttttaaataaacaaaatgaaaaagaaaaaagaaactcacataagtgtatataagtgtaccttattgtgagggtataaatattattttaagagtaaatattatttggaattttgtgatttgtgaaagtcattaattgagttttttattttgttaaataataaattggattttgtgtttttttttaggagatgttgtgtttttttttaaaaggtacaaaatagtagtttgaactgattttttgtttaaataaaatttaataataatttgatctagaattgttatgataagattaagtacatcttttgtacctatttgtgttaaaaattattttcaagttaattatactaaaaaaacattatcgaaatttgagttcagatactattttgtaccatttaaaaaatacaaagttcaatgtgttattttaaaaaacaagaatccaattaataattttgtaaaatttaaatacaaaaaaatattaatatttattcaatcttaatatattttaatttaataattattatgaaaaatatttaattatttataagtagttatcgaatagtagtgttggattaatatttatatatatatttatatatatatatataaaagtattagatattattagtgtatctctagtccctaatatttaaaattattaagaacatcatcctaataaaatctaattatcctaaaag

SEQ ID NO: 196115 - DNA, 1026 bp, Cannabis indica
ttttaatgaacgatgatattgcgagaaatccaagaaatcctagacctcaccagattttcaacagctttgacgggcctgatgtgtattcgggaatcgtaccagttattttctatatctaactcatcatgattactgttattcttcttttcttttcttgtaaataattaattatatatatctaggattattggggaatggatgttaatgcggatactctttggtatgttctttctgggggagctcttggggtgcggcctgtacgccctggcagggttttatacagtggcccaactgacacaattttcatatatttttccggacatggcgttccgggttatctaagtaattctctctctctctctctctctctatatatatatatatatggtattacgtacactaattatatatttgtttgattatttgtaattattatataatctagtcatgcctcaagaaccagatattgccgatatgaaattccgccatgccctagtctggttatatatatagaaagcgaaaatactcaagcatggtaattattattatatcatgatcatcaaattattaattactaatattcaagcttgtagctcggggattacttttcaaggaatggacgaggcttttgagaaaatgaatatatatatatatggtgacatcagcaaatggaacggagttaagttttgcagcatattgtcctaaatatctaccaagcccaccatttgatgtctgcttgggctctcaattcggtgttgcatggacggaggattggtatatatactcatttatataattatataaatatatattaacatataaaattaattaacaatttaactaattaattttttgtttgtatatttgggaataaaaacaacagggagaggcttgctacaaagtatcgcactttggatgaccagtatgaaaatgtaattaatatataatatatacgtatattaattatatgatgatatataaaggaatgatgaggtagctaattgaaaatattatatatatatatat

SEQ ID NO: 196116 - DNA, 1448 bp, Cannabis indica
tatatatatatataataatattagagttttgtataatttcatgcataacgtcctaattttgtatatgtgatcaagaatcatggttatttaaatataaatttttatatgtagttatttattgaatgaacactcatcattatattcaatgaatgatatgtgattatgaataattcaatatatttcgctgctaatcaacataatgaaaagtaatttttaaaatttattgtggtaactttttcttaaaaataaaaataaaataaaggtttattgtaagtgttataaaagaaatgtttatttttagctttagaccccattaaaataaattaaagccaattgtactccaagtaacaaacatcgataatcgcataggtaatctaccaaaaaagatgttaagtggaagtatatgcaaaaaaacaaagaattttattccattattattatatattaatttcgaataatttaaaatgattgaggatgattgtgtttgaagctttattcttatcttaagaaatactttagcaacattaattatacaaagtaagtaagtggctatcatggtaaaagctttaccaaagtcaaacttagtagaaaaagcaacaataagtatattcgtctgtatatatattaacaaacattaatgaccaaaatagatatatagaaccaaaacaaatcatctgatccacagtactacaagtagaggatattcttgtcatttcaatcaagtttcaaaaaaccgcgccaatatttttcatactggtttgatttatataaaatataaagcacaatcatagtgtgacagacacccagagataatatatatagtgaaactgaatgccacgatgaatgaaccactaattgtgtgcccactatatatgggtgtctgtatgtttttggattattagaatatgaaactgctgacatttttataatatgaatgtgtttctgggtacctgaaaaggctgctgaatatgaacataataagtcttaattttgtatatatccagattgtcatacataatatatatatatatatatatatatttgtctcttgttcatgaatgatttggaagtaactagctagtaaattcgtaatgtttctattgttgttgaataaaatgatacatgtctagaaattacaagaagatatatatgaaaagaaaagagtaacaaggaagaataaaagaaaaaggtggaaataagaattaaagggataataaagaaacaaaattaattagccaagggaagaagtatttaaaataaaaattaaaaaatagtggtttgggttgggtagggaatatggtgggaaattgaaatgactttcttggatcctgtgagagacatggttactgttacacatgttgatcaatttagttttggccaacaaaaaataagaataaaggaaacaaggaatgatgaaaagtagaggcaaaagaaaaggaaaatattaa

SEQ ID NO: 196117 - DNA, 733 bp, Cannabis indica
cattaaatgaagcaacagtaacaaaattattgttttacaaacattagataataatggtgtaaaaaaagagagtatataactttaacaaaatgtgaacattgagtatttatactgttaattttcaaaaattaaaaaataaataacaaaataagatagtaaacaatttgaatttattagaataatacacacattttgtatagtatagcactataactgttctcgtctgataatatgaataattattatgatataactcttgtttctcatacaagttgattaattgtagtgacatagttcttcttgtttcttattttatacgatgtgataagctgattatgttataacctctttcgtcttgtatttcaggggacccaattatatgatccaacggctggtggttggcgagatctaggaatgctagatgttatgcaggtgaggcctaaaattccctgctgttatagaacttattaagagcagacaacgctaacatccctcattaagcatgtaatgttgttctgtttcagatatttggaagggccgggagacctcaatttgacaaaagtggtgaaggcatcataatcacgtttcatgacaaactagcttattatcttcgcttattaacatgtcagctcccaatagaaagtcaggtacttgtgcagtttgtgtagatgaatcttaaatgggttgctgtgagttttcttagctgttcacataagatatcatgcttagccaa

SEQ ID NO: 196118 - DNA, 1479 bp, Cannabis indica
cttgaagacaatgaataacctacccacctattaactgtacagaagttagttgcgtctaagatgaaaccagagtttggaaagaagttagtcacatattaagttaagcatatataagtcacaaatttataacgccatagtctaaattcgttagattaaaataaaataaaaaatgcattaattttaaatctaaaatacaaaagttaagttccaaagattttaagatttttttttatttttaatatattgtaataaaaaaaattaaaaaaaaaatgaaaagtgaccgagttggcgggcgggttcgggttcaacccaaaacccagtgaccaatgaaaaaacatattaagttcaaatataaagatacgaggcaataaacgaaaagaaataaataaaaaacaaagttggccatccaacaatgtaaatttatctttgcaaaaatattgccacaaggggcaaactattgtctcggccaataggccattttctaaattaaaaaaaaaaagagaagttaaaaaccaatcctacatagtaggagacttggatgggtcttcatcttctttaaactcatttacatcttcttcttcttttttagctttctcacaataggctaagacttcttcggtaccctcccccaagaaacttgagtccatctcaggattcgccatccaagcttgttaaatagatctcttagcaacaacgttgcaccgttctttagcattggcctcaacgccctcgagcttcacagtggctgcattaagttcttcttggagtgtctgacaagcctcggacttgtccttggcttctttttgggccgcctcaagttcagtcttatgagtcctcttcatctcttcagcctccttggtcagacgggaaatctcctttcgggcatcgttccattctttagcaacaacctcgcgttcctcaatggttttacaaaattcagctttcaattgctttactttatggagaatccgactttaggcgacatgagataagaaggtggcctacacaaaaaaaaatgcacttgaattcttgtgggttcttgaaagaaatgttaaaaaacaaagaaaagaataaggaaactaaccgagagattgaaggtaagactcctctcaagcatctctgttgggctgccattgttgaccaaatcccagtcgttagactggaaagatcagaaatggcgccagcagaatgcagaaaattgcgcacaataccctgaaccagtgcccccagcctcgatgggcaaagtctcaggtgccttactcaaagaagtggtagcctggtgagtttctgggactggctcctcgacatgtggaatggctggagtgtgaacttgaatttggtcttcagaagtctcgaggtctatagactgtgaggcatgcttcttatttgcagtggtcttcctggatctcttgagaggttccacattaacatctgaagaagttttcgaggcagccgtcctctttttcccttttttgctcg

SEQ ID NO: 196119 - DNA, 536 bp, Cannabis indica
tcaagagcttgagatttgagaactagacggtaaatccaagtgaagcggctaaagtcatcaataaagtggatataatacttgaaaccatctttggattgtatatgggagggaccccagaggtctgtatgaacaagttcaaggagtttagtggctctataagtggaaattgggaagggtaatttgtgggttttaccttgttgacatacatgacaaaattgaagtgtttttaaggaacctgtgtggggtatatgagataatattttgcacaaggtagaagtagaggggtgtcccaatttgcaatgccaagtattgatgtcattaaaggcataattatgtaagacagaatgtgcagaaaagagagattgatctttattgatatgtaactgattacaagtagtggaacttatagtattgttacaatcaaaaggttgatcatcattatagtaatcataatctttactgggggaaatcaagttggtggtgagatagcattgttgatgttgctgatgtgagccagaaccttcactcaacatgta

SEQ ID NO: 196120 - DNA, 631 bp, Cannabis indica
attattaataaatatttttttattgttgttaaaacaatgtgtcacattatttcaaattcaaagatggtacttgcagccactagatcaaaatggaatgattaatcaattgttaagggatgaatatgaagcacaattgtactaaaaatttaaacaataaattgtttattatataaataaaaacagaaatgtatacttcgagcattttgaatccaaaaaaatctcctaagcaatgttgttagtaatctataattaatagactaaatatatgtgtgtaaagtttagttgaagcagaattataaacttttttaattaattggagtttttcttttaaaaatcatattttgaatttttaacaatttcgaaagcataaaaagaaggttaataattaaaaaaataaaaagactaagaaacataatcaaactttattccattataacttttacatcataatatagaagaattaaaattacacgaaccaaatcttaattatttaaggttgagaatttggtgaagtatcatcatgatgtgtagggtttgaccatttggaacagttgacttttggttccatcttcactaagaatttggtagaacatcactggtgatgtttagggtctggaccgctcggaacagg

SEQ ID NO: 196121 - DNA, 902 bp, Cannabis indica
ataatttttttttgacttaatatttaaaatatattttttaagaatatgggatgaaagaaaaattaaaaaaataataaggttttggattggaaatataacttcttttacattatttatccatatttagggtgccttcagtaaatttttaaaatcataaaattgaatttataatccttttattattatttttatttttctcccaaaaaactcctcttaaatatccttcaacaacttagattggagaattcacgcctatgacataacaaataagagtagagttccagaaacgaacctcctcttcaatatccatagtgtcaaatttaattcgcttcctttcaccattctccaatttaaagtaaattcaatttctcatcaatcaaaagaattggtgcaaaaatagatgataccttacttgattttcgatcagcatccaagaaggcaccatgctcaccacaaagttctctaccatcattttttcaattgattttggagataaaatttcactcgcttccgatttctcatcctctgattcaaaaaatttgattgcaaggatacttaatactctcgccatagattttgtcttgatcactgaatcatttgaggttgtacctctcttctttttcttctttatagagctcttccttatcccttgaacattactcgaagctgagggtcgctgccataacagagtacaacagaggaaactttaactaatatttttttgttttggtacaaaaaaaaaatatgtcatttgcaagaatgtcatctagaatctattaagttttaagagaaaaattattttttcataaaacttaggtggcgtttggttgggatgaatgaaaacataagaatgagaatgggaagaggaatggatgaaacaaaatttaaaatgtacaaaaaaa

SEQ ID NO: 196122 - DNA, 2154 bp, Cannabis indica
cctttcttgtctactttcatatgtttcaagagagcctattatttagttagtgatagagtttctaagtctttagttttctctataacataaataattgaatcatatttttctgtacaagatattaatgtcttttgtactatatttttgtcagaaattatttcttcataggctcccatttgatatactatttctttaattctagaatagtaatcttttgcggtcacattatcattcattttaagattctcaaaatctcttctaagcttttgtagtctaactgtgcgtaccttaactgttccttaaaactcctcttgcaccgtgtcacatgcttcttttgtcgttgttgcatccatactccgtgaaaaaaaaattgaatgtcatagcttgctataagaagtataatgcatgagaatccttttgttgattatcctctaatgccttcttttgatcttctgaaagagatgtaatatcttccagaatagcgatttcctcttcgataatttttcatagttttctacatgaaaaattggaagacgtagagaagagtggttggactccaaactcatgttgatggactgcgcctggagtggaagtcagagacaaagtatactacatagatgggctctcatgaaaatgatagagttgtgaaatcttgtcccaaagggaagtactagttctcccacaaagaggtcgtgaccagcaaataagtgggctggggcatgagtctcaggaaaggcaatttatgcaagcggtctatggttcttgcttttgataaaggggtctacactagaatagaagatatttaataaatcaaacaacagcagttggatgagcccaattacagaaagaaagtaacaaatatgacaaaaatataggttctatggacagagtgtgagctagccaaagagttcggataccactgatggcttgttaaattagaatagagtaaatagttgtgatttgtttaggtgaaaattttataatgtgtttagtgaatagtgtaatatgatgacaatagtagtatggtaatacttgataggttgttgtgtatatagtagagaatagtttggcttagaaaaggattgtatgagaaagtagtaagctttattgatagtttggatattggttacacaatttagaattcttgatagggtatttgtagttacttactcgtcgttagaattatttcttctagatttttcttttactagttagaattgtatccatacacatctaaatatttctagagttcacatggctagtatattctacattaaatcttatctagaaattacttaaggttcttagataatttttatcacaaatgtgtaaaaatttctaaactaaagtgttgtagaaatgtgtagctaattttaatattctaatcgtagttaagttggaaagtcaaagagaagccatatatttcacttttcaaagatatcaatttatctcattacaaacaagcatatgctatacatatttctaacaaataacatgcaagtaacaaacatgatgtgtatatatataagataatacattatttatgcaatctataaaccaaaaatataaatatatatatttatatatataactaataattattattaccaaggcttctcttgcagacacgttaggctctggagctccatagttgttcttctgatacctttccagtgtttttagcatgctgtgtataaatatatgtatatcatcacaaaacctaaattaataaatgcatatattatttcataataatctcctcacgaagaattcctagacatttgatcacaatgtaaactaataactatatcacttcatataacaacattttgaataaggattatttaaggatatattagggccaaacttattacaagtatatatgttctacatttggtttatggtaaaaaaattagacttatatattgcatcaaacaaaattaagatagaagatcaaatcagaccttttgtattaatatcttgcaatgcaaaagatcatgcgtgtttgtttcgaaaagaataatagatggttgaatattatatgttgaaaaccatattatatatatatatatatatattcatatagatagatagataaatatttgtgccaagagtataagttgtactgaaagtgtacctaaatttatattttta

SEQ ID NO: 196123 - DNA, 648 bp, Cannabis indica
gagctgcattcacatacacatacacatattttgaggtacaattgtaaatttcttacttctaatctaaattaggtgtggtggccaacttaagtggaaatttctggacgatttgggatcctatgtcacattagcagtaatggagtaaatgtcatgtattaaaatactggctaactcaaagaagagtatacactacaccaaaaattgtgtcttcatcttctttgtttgtacgtgaacacagatggtgttggtgggtgaagataccgttggtctttaataatacaactgggaaactttaaagtcaaattaattaattgggttttaatttgcttagctgtactatatatatatttatatatctagatatagcagatttcgagtgatatataaatggttgatatacggtattatttaatttattctcaagtttaagtacgttcattaatatatatattatggttttatttttatggaaaatacaaaattataatttagaaaagatgtagccatgctccatgcatgatgatatatatataacagtgtacatatttgccgaatttttaaaaagagaagtgtacaataatatatattttttgtcattcaatttacaataaccaaatttaaagcatctcatattttttaacatttttt

SEQ ID NO: 196124 - DNA, 1686 bp, Cannabis indica
aaatattttaaaatatttctaaataattagttattaattaatttctaaaattaattattttatacaatctataacatatagttaggtgtttaaaattattttaattgactaaccataagacaagaaaaatgtgcatttaggttagtttaaaataatattatgaaacacatttcaaaataagttataactacctataactagggaaaatagttaatttattatgtaataatataaatataaatacttatcctatttattcaaaataattaattaattagaaaatattataagcttataacaaattttttttaaaaaaaatattattttaatatatttttaaaaaacatcactaataactttttaaaaaattataatttttatatggtacatatatattttttttataaaatataattttaaaaataaaatatctaaatttctatttatttgaaaaaatgataaatatatatacccaaaaataataaaactatttttttaaaaaaagatttattttaacatattaaaataaaaggataatgcacataacaaaatatcttatattttacattttattttatttttccaattaataatttaattactaaaataaataaaatactataaatatacacatacacgcatatacaaatatatatacatacacgtgagactggcctattggccgtggatggtggtggtcatggctggtggtcgtcgaccatgggaggccggcaattgaggaggacgtcggtgctagaccggtgatagtggaggtggacacagagtcgtgctccgttattacccaaaacgggtcgcaagactcggttctcaccacgatggggatgaggctcgagaaccaccatattcagccttccttcgtctccaacatcgaccattggtcctcaatgatcgatcgaccaccacgaattgataacgagaccaatcaggtcccttcatggctcctcacgtgacccgaaccctatcaagttctctttctttagttctcacgtgcatggccatgcatggccttgcatggatcacatgcacacgtgagaaatcacgtgttttctcctttcaagcctcattgcttatagttgcatccctttgggatttgtggctcgccatttgaggtccaaaacttgtcatctcgatgaggtcgaggtttactccttaaacctgagctcactcatcaattgaggtattgtggatttttaatgttacagtttttaacaaaaatttacaaataaatttaaaataaaaattacatcaaaatctataccacaaatatggtgtataatttttctagtaaaactgtaaaattcgtaacccgaatttaccatataattaacgattcatattcatgcataaaaaacttaattacatccattcacaatatatcaatatatataaatgcataatcaccaaacacagtatttaatttatatcattatgaagatttctctgataccaattgttagtttttatggtccatatcagaagtagaagcaaaattttgataaaataatttttatctaatatgaacattttttacctcttgatacctattaggatatccttaattttttttgtataaataatcgaacatctaatccagaacttgattgaagaatccacaatttgaacttctaagtcatccttaatactcaagaatatagtgggctatta

SEQ ID NO: 196125 - DNA, 1203 bp, Cannabis indica
aaatagaaaggtataattattattcttaaacttttcattagttattagttatgtactatttattgtaaagagttgctgtataattggtagagaatttaggtaataaatattaatatattatttttactttaattgaaaagaataattatttcatatattgaattatttattatttaaatttatatgataattataattattaactttttttatcataaaatttttaaatgaaaaatatgtcctattgactaatttataagtatttggaagcacaatcacggaacacaaaaatgtggaactacacgtctgaaattcacacccaaaggtcgttgccttgtgtaaggctgtcatatatacccttcagccgccctaagcactcacggagctattataagattttattatcaatactatatatttttgttgagcaatcatatgattcactaagaaaaacctcattttcattgtaattattcaaaattttataaatatattttcttagtttaacttctacgaaaaactttaaatgaataacaaaaaatagaaaaaatcagaagctgctagccttctagttatacgtaccttcactggccagcatctctctgttcatcatctcatgcatttgtgtagtgtgacatggcattatatatacatatatattagctaattatgtatacgttcgtggatcagtcaataattcacactgagttaggcacatcattttcatctacttatcatcatcatgatatcatttaataataacaaataacgaccacgtatatcatacattcatttaattattatttagttaagcaaaacatttttagcttactcacacattcattattaattattaataatcttgttagtttaaaaatttacttaatattctaaaatttattaattatataattaaaagtaaaagtaaaataatttgattatttatttgaatttttgagtattgtttaacatattgcaaagccaaatcattaatgttcatattattttttttttgtaagaaaagcgaaagcaatatatatatattaaaaaggatagcggttaaacttcgcggtcattacataacagatcccccaatatagagaaaaccaaaataaacaccaaatatcttgtgggtgaacgcccacttgaccagttatgggccgtgaaattacaggttcgactacatagaaacgacataacttg

SEQ ID NO: 196126 - DNA, 1353 bp, Cannabis indica
ctctattttttagaatacagagtcgggctcttctcttacccatatcgaatagaacatgctaagccaaatctcttcatataaaccttcttattgatgaggagatctccaatttttgttggaaaacttattatggaattttatcaaaaaaaattctgactgtagaccttctcggtaaaacagaccaaaatttttattatcaaaattatttgaactgtttcaaagacccaacatgtttttttttgcattgggattttttattaaccgatataaatatcgattagtctgcaatatcttttttgatagaaaaataaaaggatggctccacgtgctttgattcattatgtgcattccaatctaggagcactaccaaagtgtttcaaagaaggattatcttgacgtagcaaggcattggattctcaccaatatttgcattgctcaagctgacattctcgcttccgctttgcctaccactgcttgcataggtgcttccctctaggcagaacgctcctctactgatgcatttttaacctgagttgcttgtttgacaaaaagtctctctatatataataatgggattgtagcaggcacaatttagtggtaaaagtgtgattcgttctgttaaccccttcctctgttctcgcctacatatttgggataaatctgactaacattgaacaaagttgcttgttaaacgagataaatctagcccattcctttgttctcgtctacatataggggatattttaagaaatgaacatagggaatccactctattacataagttgattcctaacttttatgtcatatcatgacataaataagcagtgtgcgctcctctggaagcacacactagaatgagcgataaattttgattggtagcatatttgatcaaacgtgttattttctcacccactataattctcatactatctcccataaactgattaataaactctacattttttttgtttgatggtgaaaaatagtgatttcacttcatagtataggtcaaagtcaaaacacgaagaatggatttctcttttgtaacataagatttaattcaagaaaaaatcatgtgtatatatatatttttattgatcatgtatgggggctgacgctagggccgaccttgagttgaaatgggccatagtaaaaaaaattgagctcttactataaagataaatgatatttttaaaaattattaaaaaaatatgtatatttttaagaagggtatttttttttatttaggctcctaaaatgagtgggcactaggcgcgggcctagctcgccttagcctagggccgaccctggttgacgccggtctagtgtcgaaaggtcaaggaagttggtgac

SEQ ID NO: 196127 - DNA, 1873 bp, Cannabis indica
ttgttgttgtagactaccccacagcttataattctatgttatgacgaccaacattggtgaattttggggccataacttcaattcagcacctatgcctcaaattctctactcacttaacgagggtgggaatcatccgtggagatcaaaaggaggccaagaaattttataatgtctctatcaagcacccagttctagtggtcaatggagatggaaatgaggaccaattgtgtgaagaagatgaattagatcctcaagtaggaatgggggtcccttatctgctaataagagggcctctccgtataccaatgattggaaatttatgggccgaatatcgggtgccaaatgcaccgcattcggaacaaaataatggaatgtctaaaaaagaggaaaagatgctcaaagcctggaatatgaagggaaatcctttcgccttcaaattcattcacatagccaaaaaatttcacaaaaaaaaaatattaaacaaccaacagacaatcacagaagaatgtgaatacttacaaattcgaggtcgaagtgaggtggatggcactgtcaagcagcgacggtagtattgtgcttgacaacatcaaaggaaaagtatgaggaagtctggtttccttaagaaattttccagtttggggctttgaagaaaagggataaaaagtaaagtattgtgagagatgagaaggcaagcaatatttagagccattaactcacaatcctggctttttaatgatcttactgttcccttcaaattccacaaaacacacaataatctcacggttatggggaagtgtaaacaaacacattcatgaggggacgtttggaataatcgagtatccgactgacaccctatatttatggcttatctgggattttaattttaagaaagtgaatcggcatcatcaaaattgaggagcaaaaagcaagctgacgtgcaagtcgttcactgtagggcgtgtcgcatgtccatacaaataagcgtgctctgcacaggcatgccatcacattacaaaccctctagaggaaatgaaagagtcagaataatcgcaagtccaaactcacaaaattgtgagttgggacttggaggaaaatgttattatggcaagtggagaataggccacatgtctacatgatccacgtaagcatgtggatgatcaatattaacataataattttttagtattctcctcaagacgtgaggggcgtccgagagtgcacgactagttcccaaaagacattgaagtcaaagttaaactttgtccttcaggaagacacaagccttctggatcatatagcgtccgagaactgcctaagtgttcaacacgattcccaaggaataatactgtaggtgactacttcagcgtaggtggtaaagtaaacctgccatcgaaatagagatattattaggatttagtccatactattctgacattacgtcttcctatgaatgctaattgatggttaatctttgtgttgtcccatcgcataaaagataagtcatatctcaccaaattcctacttctgaacttagcacttgtacacgcaacaacatcattcatacacttattaaaacgccatgtaaagcttagaggtaaagcaaggatgtatctatccgtccaagaatatcccaactctcaacctataaatacaaagagaatataaaagaaaaaaatgattcgaaaaatagaaagaaaagagggaactctaaattgtaagagagtgtactcacaaataataaaattattactcatcaataaaaattattcataaactacgattaattaacacttgaatgacgtaaaagtatttttctcaactcataattgatttttttaatacaatatttaaagttaccaaaaatctaaatgaa

SEQ ID NO: 196128 - DNA, 600 bp, Cannabis indica
cccccctgctgctggaggttcaccttccttccattggccacgctttccattcccaagcccaccttccggagggtcatcaccaagtcctcccggaggatcaccttctttccaatggcccccacattttccatttcctagtccaccttcaggaggatcatcaccaagcactccagcattccagtttccaattccgagaattccagggttcccgggcacaccaccaagggctaatacagctcctccaacgaaggcttaattattaattggtttaagtttatatttcgtttcttatttatttatgtttattttcgtttgttagatgcttttagttgtcgttagtctgttaatgttatcattagttcacatactgtgaactattatcaataaagttatttttagtaatatctataaatgtctgcgcatacgtacttatattataacatatatatatagatattaatcattaccttaaacccaagaaaagaaaaggttacgtaccataatgaaacctataaatactcaatcttaagagtaatagagaaattcaaacaagtattcgattattacccttttccatacgaaattaaaattttattatat

SEQ ID NO: 196129 - DNA, 1410 bp, Cannabis indica
caacatttgcatatggaatacgcaccatttgcttcttcacattggcagtgttaggtgacatctttgcacttaacttaaaatgaggtacaagtggtgtactaacaggtttagtcttctcatccatgcaaaacatttacaatactttcttcaaatacgtactgagtctatgtcagacagactgtacttgcaactctgtttcttatgatctccattccaagaatcttcttagcttctccaagatctttcatttcaaattctgaacttagctgagtctttcgtctggcaatctctaccttgctcttagatgaaattatcatataaccaacttataagtgcaaataaatgaaagtaccatctttgagtttccagaagtatacacaatggtcggattttctgcgggtgtacttctgctcactgatgaagctgtgaaaatgtgtgtaccactgtcttggtgactgcttcaaacaatagtgtgacttgcttaacttgcgaaccaaattctcatgtcttggaattttgtaaccatctggttgagacatgtaaatctcttaatctaaagtaccatggaaaaaagttgttctgacatcgagatgagctaactccagatcaaactgtgataccaaagccagtaaatgctaccatatttgtgtatccagcaggccttttaatctcccttctcggttcagtagtggcaatagattttgattgttgatttactggtgatgaagctgagagaacctccacctcaattgagatctcttcttgatcatcactatcatcttcaccatgatcttcaataatattagtttggatctttcggtatctcaagctccactttagaagagtacttgggctttcattctccttctatggtactctatcttagcataacatacttgtgaaatgttacatctcagcttaagacaatcttctttgattcaccgcactaaagttgaaaacctttagactccttcattaaagcccaagaaaatagctttctttgctctaggatcaagtttggatccaaatattcgtaaggaatcataatcacaaacatattttaagaccgtacctctctaggtattttcccaattagtgcagtcgtagggagtctattgactatatgggttgcaaatgataaagccttaacccaaaatgctttgctgaatttggattgggatagcatacatcgaactttctcaaccaaagtacgagtcattcattctgccatgccattttgctacgacgtacatggtactgaaaattatctaattatctcttctgcttgacacacttctacgaaaggggctaatttgtattcaccaccattatcaaatttgagcttcttcatcttcatgtccatttgagtcttaatcattttcttccatttaagttagatatccagaacat

SEQ ID NO: 196130 - DNA, 1445 bp, Cannabis indica
cacagcttagaatacttgttggccaataggatatttgatatcaagggccaattaaagtgcactgattgtaagtatgagtacgagatgaggttggatttggtgagagaattcaacaaggtgaggaggttcatcgagatgaacaaggacaatatgtatgacagagctccagccatttggaagcaccctccttaccccacatgcccaatgtgtaagcatgagaactcggccaggcctgtactcactgatgatcatctcaaaactgattgttacaattttaactggctgttcttgctgttgactcaattcttggggagttgcactctctctcacctcaaggtttattgcatgtataatgagattcatcgaactggggctaaagatcgagttctatatcttgcttacttgaatctctgcaagcaacttgacccttctgggccttttgaccgttgatcctatctcttgttcatcaatttatattgttagtacttagttatgtgttaattaattcatcgagattatgctaaaggtttttttagttagtttttctttgataacaaggtttttagttagttaattaaatttcttgggcagagttaagtttcttattcatacacactaaataaaataagatatcatctttgatcataatgctctttcttctcagtttgttgcagtatatatattttcaaactttgaataaaaagacattatatacatatataaatactagattaatactatgcctccacatatacatatatgtgaacttagtgttatatttttttgtttttattttagttagtttatttttattttttaaaaaatattattcaataaacaacattatttttatttagtttaacgttagtacttttaatcttataattttactattttttgttaaaatttacaatttaaattgctccaataatttttgtatgggctatttatgtccattttaactgaaatttaaattagtaaaaatgaaaaaaaaaattaaaaaaaaaaagttactttttttatttattttaaataataataaaaagatatttttgaaaacaataataagtaactacttttcttttaaaaaatttaaatacttaatggatttttgttaagtgagagcactatttttgatcttacctataagagcattttttttctagttttaattggttgaatagtgaaagtatatggagttagaataagtggtggaacatgctattaatagttttaatattacttttttaaaaaaaaaaaattaaaattgaaacagattcttactattcctttgagcttttatcagtcaagtgataggctaatttggcatcataacacaaatggtatctacagtgttaaatctggcttccaccttgcaagctcattctctgagaaagaccaagaatcgtcctcggatgattataagacgtggtggaaatattttt

SEQ ID NO: 196131 - DNA, 1103 bp, Cannabis indica
agtatcctctcgaatgctctgccagtccatggtctccttgctaggagaatccccattgaaaatgagttatgcccattatgtggagtggctgcggaatcgatggaacacatgttcctctattgcaacattacgtaccatctttggaggtcctccctgtggggggtgttcccggtccctgacgctaggggtcgtgtttgggactgggttaaatttctttggaatttgaagtcaaactgggtggacccgaacaagctgttcctctatgcttcaatcgtcgtgagcacaatttggaagacccgtaatgacaaggtacataattctcattcaagtaacataaggctattaatgaaaatagttaggatccaaactatgaatatgaggacaaacctagacgtagcaaaagaattagatagaaaaatgttttggttcgaactttttgacctatttgctagaaggtgaacctcaaagttatgaagaagctacaagctcttctaaaggttgtttatggaaacaagccataggtaatgaaattgagtttatattgcaaaatcatacttgcgaggtagtagatctttctccaggatgtaagcctttaggggctaagtggattttcaagaagaaaatgaaagcagatggatcaattaacaatcgtaaggcacaacttgtaattaaaaattataagcaataagaaggccttgattactttgatacatattctcctgtgacgagaatgaattctatcaaaatgatacttgctattgcagaattatgcaatctcgaagtacatcaaatggatgcaaaaataacttttataaatggggatttagatgagaaaatttaaatggaacaacccaagggcttttctacctcagaacatggaaaagtttataaattggtgaaatctttatatggattaaaagcaagtaccaaaataatggcatgagaaagttgaccatacaatggtggcaaatggattcaaaattaatgaatgtgacaaatgtgtttatgtcaaagaaacagataatgactatgtcatcctatgtctttatgttgatgacgtgcttataggaagaaatgataagatgatcaaatctaacaaaagt

SEQ ID NO: 196132 - DNA, 1568 bp, Cannabis indica
ttcgttttacaaatttcatttgcttcaaaaattttgttaatatattgattgttaaaaattttcccctaaaatatacaaattatataattatgttcttttgttaggttctatttttcctaccaataataatgagtatttttaatttctaaactttgaccaacacaccaaaatttgccttttttattgaaaaaaaaaaaattaattataaaatgttatttttatcaattattaaaaaattgaagaaaaatctgataaaattcttaaaataataaaaaaatatgtaaataatttaaagtaaaaaataaatcaaataaaatttaataaaatcctgtaaatattttaaacaaactatgtttttttccaaaaaaaacgaacttatctatgtgtcaaaattcatttctgaaaaaaaaaaaattatttaaattccaataagaatatatacttatttaaaaaaaaattaaactaaaaaaattacatttacttaaacaaaccaagatttttgagaaaaaataaataaattcaaactttttcccctgaaattgaattttacacaaattaaattttaagtatactttatttcatatctaaataaattttttaaaattaaaaataattggctttttaaattgcttaattagtttcactagatgaaaaataggctttctctttagtttttaagttagtttatcttcgcttaaaaaattctcttcactaaagacaactaaaacaaagatgtagatcctaaaatcaccaaagacgtatggaaatctatgtcttcagttattattacgaagatagacacatgtatttggttattgcataataattgaagatcttagccgcaactttaatgttgaggcttatagattggctaagcatgcctttaagatagacaatgaactttcttgaatggaagaaatccctccacctactgtgtaaccttgttacctttgttattttaaccattatctgttaccccaacaaaaaataaataaaaataaataattgaagacatgagtatttcttttatttaaaaaaatgatatttataccctaaattgaggccacccttaacaccaccgtcgagtcccaaacttacgaaatcctaaaataaaaatccttaaatgtacaatattatttttttaattcaccaatgtttaaaactaccatatttttgagcaccatcattaatttttcaaaaattacagtggatttcccaaccaccaccacgatatccaaaccctaaatcatatgttagagattttataacaatggaagaaaatcaagatttattacaactctattgtaaaataatacaaggactaaaataagagattgattaaatatatgttacaatacatatatatacactatatatattacatatatatatgaaaggtagaagagaagattacaacacatgtattacatgtattacacatgtgttacactatatataacaagagaataatatatatatataaacactcactcacaaccttgagtgtagattagtggagatcaccatgacttgaacaaggtattacacctttgtccaaaagcttattt

SEQ ID NO: 196133 - DNA, 842 bp, Cannabis indica
ctcccttttagtttcaacttctactactctgaaagctagattcaaaactcttcaaagataaaaatccacaaagtcatgttttgtaagagtagaatatttgataagctcctcaattacgataacctcatcgagagcatcttcattatcatcatcatacccaataaaaataatttttaagccttatttggtcgtctacatgtaatttattgtgtatgaaatctctgaatgtgaaaagagataatgtgggttgaattgtgtgttgatcattagcacaattatggaaaacatctgatcccaaagtcttcagcttcacatctctaaggtctccttttaatacttttataatctatatatacatgacacaccaaataaaaataccattagtatataagaattacacctaaaaataaataatattgtagacaattaatgtcctacatgaaataaacagtaaaatattgagccatatataaaaaaaatgaactactccacctatcaccaatcaattttaataagatggaagctcataatataaatacatcatttaacaaaatatataggtgcacttaaattcgaacatatttatttggtgaacatttaaacctggtatatatatgtgttaaatatttttacataatcaatttatattttttgtataaaataactgcacatgagtttgagttgctccatttttattttctaaaattgtatttctcttgctattttaatttgattaactagtagatgtttatataaatatttccaaaaattaataatgtactgtgagatttaattgagagtgccactcaatatttccaacatcaattaatatatatatatat

SEQ ID NO: 196134 - DNA, 2245 bp, Cannabis indica
aaaaaaaataatctctataaaaataagtgattaaaagagacttgtactaatcatattctttaataacatggataaatacatctcacatgttgtaaaagcaattgatgaaaataacaattcaaagaaccaactcatccatttatagtctaattattactttttttcttcaagttattgtgtctctattccactaccacttctattgcttattttttcccatgaattaattatttatgccattgtataaagagtactaggtttttttttaacacttgctcttctattttatttaggttgtttcactttttattcacgccctcttaatgagaaaaagaaatggtgaatttataactgttcacatttatttattacataaaaatgtatatacatgtaagagagaatctttaatagaatgttaaataagtggtccaatgctatactttgatatttttataaaaaagaaaattctacagttatatattgaaatttgtgttaaatttaataaatactaaaatttagaccaaatttgggacaaaatataatattgtgcaaaatttagaaaacaattaatgtattttttttaatttacattatcatttagcattaatgatttaatttaatatattttttaattgtaaaattgtcattattctttaaaatatatatatttaatttatagattatcaataattaataataattactttttaagtcaatttgtatcttaatttgttattatgtattagagtataattataaaaaaaatatatactaaaatgtagcatttattaattttttttttgtgctaaatttaacataatttttaccccatgtactagagatggtaagaaacatgaaatgagcatatactcaaatcttgttttttagggaaagcttgattaattaaagtaatgtcctagggttatcatgtaccatatgcactacacatatattatggtacaaaatgtaatgcaaatcaaacatgcattgaaggtgtgtaaggggaatggcttagatatgaattcaacggcttagattgtgttgtaaatatgggttgggttttttaacatgacacgaaacaagcacaagcatgatcaggtacgaaaaaatatgagtttagcaacgatacgacataatgctaaaaattggtaagacattgtacgaaaaatatgtgattaattaagcacgacacagtacgagaaggacgaaaggcacgacatgtaagttttaataaacaagttcgaaagcacggcacatgacaaatccaaaaagttttttaggacgacgacacgaaatattaaaaactatataataataataataataataacaaagtatttgtcaattataaatcaattaaaataataaaaaaaattaaatataacactgaacattataattttataattaaatattaaaatatgtaaaaataaaactatatattaatttctttataaattatgacataaaaatttaagttttgtaagtaaatattttaattcaaataattttaattatttttttatatgatttttgtaaaatattattaaaaaactatcaaaatataattgaaactataaaatatacatttaatttagtaattaatttattaaaaaaatatattaatattatatataaaaaagtaaatacgaactcgagtccgaatacaaaaatagattggcctattttagaaaatatatcgacacgaataaagtacggcataaatccaaatataacacaaaaatatcgaacctaccctttagaaatattaacaccgtgtacaacttatattttgaaaaacatgaaaaaatatagactaaattagcaacacacacaaatttatagcactgggctaatatatgaattcaatttcaatttagaaaaagaaaatgttaattgagttcttttcctttcgtaaaaaaatatacatactcaattgatactacgaccaaaaaaaacatttattacacaatactagagaacggaggctattaatgtaatttcacatatcaattcgttctctatcttgaaaaaaagaaagcgggaaggagagctcaatcaacttgctcaacccaaagcctgccaatctggagccgcacatgatttccaggacctttaaattctaaattccgaaaatgccctccgttctgttgcaatttattaattatcgtcacaaccaacttcttatttagagtctaaactaaacgataatttagtatcatgtagataatactttatccagaac

SEQ ID NO: 196135 - DNA, 2489 bp, Cannabis indica
tttgagcagaggtggagaaaacaagttggtaataagttcataatccctatgaataggttggacactattcttgttcccccaacatatggtattacttcatcaaatgatcatgacactgaaacatggagtgttcaactattccgatccattgatggtggggctgtctctggttttcctgagaattctagtgaagcatcaaaaatggggctcgtatctggaaaaaacaatgttattgaacgcagcattcaggatgcttacatcaatgctattagacgagctaaaaatttcatttacattgaaaatcagtatttcctaggaagttcatttggatggaaaactaattcagatattagagttgaggatataaatgctttgcatcttatacctaaggagctgtcattgaaaattattagtaaaattgaagcaggggagaggtttgttgtatacgttgttattccaatgtggccagaaggaattcctgaaagtggttctgttcaggctatattagattggcaaagacgtacaatggaaatgatgtattctgatatcatccaagctcttcaaaggaaaggtatacaagctgatcccacagagtatttgagctttttttgccttgggaatcgagagcaaactggtttggcagagtatatacccccagagagaccagaacctgacactaattacagtagagcccaacactctaggcgtttcatgatttacgttcattcaaagatgatgattggtaagtaaagcaactccctcttcaacaatagtcttttctttatgaataatattgtggcatatatttttagcctttggtccacccccttttttttttacacgtacgtttctctctccaagtatatagtagcaccattcttgtttttgtgtttttttttttttttttttattttctccttaatttgtgttgtctccaaaaaaacatgcaatccgggtgcaccatgcacagttcttttgtgtttttgataggaggataggtgtaattttaatttttatatataatattgtgtattatatatagttatataattaagaaatttttataatataaaatgtagggttcaaatattagtacaaatcattatttaaactttaaagtatgttatatttttctaaatttttaaaagttttaaaaatattttaaataaccccattatatattctcatataaaaaaaatataaaaaaattatgcggatgtagaaaatagcaaggagtgcgcttgagtagtgagtaaacttctataatatataatattttatttattttaaaaaaattaaattaatttactatgtctaaaataggattcaaatatttttttttcttttattatacgtatgcaaataattgactattttgacggagtctcttttttttttagaaaattattagaatttttagaataaaatataaatacatataaatatcctacaaaaagtaacagcctactataaccttccaatctatatttactaaatttgtaatatgtgatggtagctataaaatacaaagtaacttattcgaaatttttatgacagttgatgacgaatatataatcattggatcagccaacatcaatcaaagatccatggacggcggtagggactcagagatagctatgggggcattccagcctcaccatctactcggccacgaaccacccagaggccaaatatttggttttcgaatggcactgtggatggaacaccttggtttcttggagaaagcttttgaaaatcctgaaacccaagactgtgtccaaaaggttaatgcttatgctcaaaagtattgggaagcttattcaactagtacattcacctatgaggtattgccaggtcatcttcttcgataccccattgaaataagcagtgatggtactattggtgagttaccagggtttaagttcttccctgatactaaggccccagttttgggccacaaatctgattaccttcctccaattcttaccacctaattaagtaggccacatctctactcaaattgttgaaataatgcaatcatgcaattacaattaatttacataaattatcttacatgtacagtatatataatcatatttgaaaaaaaaaataataataatttgatgtctacgcaaattagttaaacagccaatcaattaaaataagccacatgatgaaattggtcatatcaaatatttacatagtggtaagcttttcttttagagccccaatgatctattggaaagggaattaatttattattcaaaatgataaaaagagtgttcaaataatttctctaaagtaacaaaagattttggggtagtaatttattgttgtagtttatcaaagagttctgtacttaattttgtttgttttctattgaatgatatcatttaaaaaaaaacaatcaatttgctggttaagattagaaataaattaagcagcattttatttatgcagtgttagtatcagtgtcatacatacaatct

SEQ ID NO: 196136 - DNA, 1020 bp, Cannabis indica
gtatgagtacctagaaaatttattagttttttttttttgagaacaagaaaatttatagttgaatacaagaaaaataagttggaaagtgttccgaacatgataatggtactaatgaattagagaaatgttagtatttttgtaaagtgtaatatttatttgtgtaatttaatattaatcatacttattttaatttgataaaagttatacagaattgataattaattataagatgtcatgttatattagtgttacgtactttagtgtcccataacaatgctcaataaattatagagtattagtacacaccacaatagggcaatgtgtctggcagcattggctagagattacttgggaagagttttgtggattgttatggacaagttaacctgctttgatgcttttattggcaaaattgtggctcgtcttttagccattgagccggtaatttttttgaaacaccattttgtgataattgagagttattcttagacaattattaaaactttaaagaggactcatttcgtttggagtattggtatgtgactacatgcattaatgtaatagactctctaatttatttttaggttttaattcttcttttatctatagactttgtaattttgcaatacataatatggctaattggacttttgctcataacttaattggtattgttcactaggaaaatagtcaactgactcggagtcaaataatcactgattaatcaccaataaggagttaaaataataaataaaaagaataaacaagaattatagaggttcaacccttttgtatatggataatgacctacttttcttttagctgtattgattgtgagataatgacacgcagatcactaaggtagacaaagtgaattctagctacagctctcaaagtgtttatagagaatatcttttagtaaaatgctcttaaatgcgagaatatgatattaggttccctccccttgtgaatgcatttactatttatagggaaagggttattacaattagctccgtaaaa

SEQ ID NO: 196137 - DNA, 1690 bp, Cannabis indica
atagatcaccatgtgaagatcccatacccgcattgactccgaaagaccaacctagacaagcagttttcgaaatttctagaggtctttaaaaagttgcacatcaacattcctttcgcagaggccttggaacagatgcctagctatgtgtttatgaaggagatcttgtcaaagaagaaaaaaatggaagactatgaaacagtggcattgatcgagggtggtagcgctatattgtagaagaaactccctcccaaaataagagatcttgggagtttcgccattccttgcaccatcaggagaatagaggggataaatgcattgtgtgacttaaaaggcagcattaatttgatgcctatgtcagttttcagaagattgtagttgggtgaggcaaagccaactatagtaaccttgcaattagctgatcgatcgttagctcacccaaggggaatcatcgaggatgtgttagttaaagctgataagttcatcttcccagctgattttatttttctggacatggaagaagacaaaaatgttccaattaatcttgggagaccattcttggcaactcgataagcattgattgatgttcagaagggtgaattgaagctgagagtgcaaggggaagaagtggtcatcaatgtactaaaggcgatgacttatccaaaggcaagtgacaactgcttctttgttgatctgtagatactatagtggagaagaagaagttgatagaagatcctttggaatggagcttaaccaaagatgagttgaatgagcaagaaggaatggaggcaatgggatatgctaaatggcttgactcctatgggccattgaataggaagtattatgaagagttgggggttgtgcataagaagcatgtgccatctacagagaaaccaccatattagaactgaaggtacttcctgctcatctacggtataaatttttgggagaagacaagaagcttccagtgatagtgtcaacttcactttctgatgtggagactgacaagttgcttagagtactccgcgtgcacaataaagccattgggtggacattggctgacatcaagggtattcagtccaattccctatgatttgacctcacttgtgtgagttactacttgattacgtgcacttgtgtgagttactacttttcaattctaggctgaaactatttcctggtaaattgaaatcaagatggtctggcccgttcacggtggtaaggtgtttccatatggagctattgaactaaaaggcgagagcccagagacatttaaggttaatgggcagcgattgaagctctacttggagggtcatattgaccaagacaagtccgccatgattctggcgcccctttgaagaaaacaatcaacgtctggctataagacgataaagacagcactcttgggaggcaaaccaagttttaattgtgtttttagttgaacattcctaattgttttttcttactttatgttagtttttgttcattgaatttgtaaactaaatgtttagtttattatttgttctcaaaagagaaaaaaaaagtattttgggcaatgcctagtgggtgcgatgaggccaacagtggccgcagtgagataaagctttcgcacggccgcgacgaaaagttaacaaaggggggataaaaattctcgccatctcgccacgacgagatggcccaagcccagtaaaaa

SEQ ID NO: 196138 - DNA, 988 bp, Cannabis indica
gttgcgagaggtacgactgttatactccctattctgcgatctggtagtataattcgaaacttagaaccaagttttgctggttcatcatcaaagcagaaaattaagattacccatgaggatatccaggaagaggtggatttttggactccttctattgtgtgttatgtgcttggggctaatcccccaacgtctatactagatggttttgttagaagagtctggcaggataaaattgaccaggtgggaatgatctcctatggggttttcttggttcgtttcaagacaattgcagaccgagatcatgtcttatctgggggatacatattcttcaacaaacgacctgtaataatgaaggcctggaatccaaacaagaattttaaaaaagaagatattcattcagtgcctatttgggttcaattgtagggcttggaattgaaatactagggtgaacaagttctgttcaggattataagtcagataggaacacctgttatgttggattctttcactaaagcaaaggagaagttgaattatccgagaatacttatagaagtctcattgcaacaagatttccctaaacaaatagaatttgaagatgagcatggtgatgatatcacagtctatgtaacctatgaatggaagcctaaaacttgtgctcattgcaaaggagtaggtcactctactattgactgtaggaagaaagaggggaacaaagctgagtgggtagttaaaaaccagttgtgtagaatcgggcaaagacaacaagtgatgaggatgggtttttattaccaaaaaaagtgtggaaagagaaaactattgagcaccaagttgcttctattgtggcagtggcaaactcttttagtagtttgcaacaagttaatgaaattcagcaagagattgctgatgggaatattggaagggaaagtgattcattgctggttcatgaagacatagagacctttggggaaacaagaggagggggagatcc

SEQ ID NO: 196139 - DNA, 2329 bp, Cannabis indica
gcaaacttatattatataaaaactatatttatatatgttcgtttgcttaaatttttttttatttaaatattttcaatttgaaaaattaatttattttaaatatataactaatttaaattctaaaaatagaatttcttttaacaataacattgcgtatatatataatatactatgtatatacattaaggataatatagacagaaactgttattaatgaagctatatataatatataagctaggctggtccactaaatgtgagatatattaattgggcccatgtaatggtatagtttgtacgtgtaagaaaaagtatagtgtatctgcatgcagcccatgcaaagtttaggagcagcccatgctaattacaacaaccacatgcatcatcgatcatttgcagtcatatcagagcaggtctgctagtgctatgtgttatcatcatctttcttcaatttcttcattctcatatctaatttgttggagtaacacatacatcttgagaatataatagtacaataaagtgagagcgctaatcatagatacagaatctataacttctatctggacatagaagtgaaataataatttctttcgagctttgcgtaatagagataaataaaagagctcttatttcaataattatattagtttactgaaatatcatttgtagaatattacgtgttttaagaataaaatacattgagggggtagaatggtaaatttgtccctcatcgatgtaaattatttatagagaatctttgattattcagattataatgatagatagttcatagtgtattcatatcttgaaacatataaaatgttttgtataattaagagtgcgattccgaatctatagtggcgcaaagatggattaataagttagagaatttacttggtaaattctagatttacttattgaaagcttggttagataagcccatggtccccacactagttgagataatactgcttgtaagactcagttaattggttttaactaatcaattataaatctaaaattaaactatgtcttatatatgaatttttactaagcaagggtctaattgtgaagagaggaggttttaggatttatttattaattaagagattttattaagtctaattaataaataaaataaatgataattttatttgatatttaattttaattattaaataaataattttgacatttaaatgattgaaattggacaatatggaaatagtgaaaaaaaaaagataaattgttaaataaaatgacaacattctaactagtggggcccatcttatggctggccacttaaggagaattttagccaattgtttgtcttttttaattccatataatttaaatctaatcctaggagaaatcctatataaggaataagatggttctcattctcatccaccctaagttaacctagtttttattctttgtcagacaactagaaacttgagagcctccttctaaagaattcaaacctccctctctttctcttcatatttttcgagccatatagtgacagagaacatgcccacccatagaaagtcaagtactcaatcataatgaggaagacgatgaagaatccaacacctgaaggagaatagggctcagatcttgttaatactctgcaacagaaaggaacaagggttagagatctgaacggaaggagacatattattccgctgccatcactgtaaggttacttaaactttacatgtgtttaattctattgttttagagaattcatatttagggtcttaaacaacatacatgttagtaaatctagatcatggtaaaataattcccaataactggcctcagagccatggtaatgatttacttttatagattaaaacaataattgtgatgatttggatgtgttcatgttggtttatgtgattttttgatgattgtatataaattaaaaattttcgataaaaatattgttagttttgtactggaactaattttttttttggaaattatatgaaaaattaatgaatttaggcttttacagaatttaatttggatttttattgaattagttatgtttttttcaaagtttaaaaataaaatatctaaggggaacaacccacatgcgcgcggatgcatgttctacctcgctcatgaccgagcttcaaatagctcgtgatcgagctatctcatacatcccttgtctgaaggagtagctgaccgagctagctcgatcaagatggatgcatgcagcctcatttcacgcccatttcccctgttgcgcgcacgagaagtatgcaatgcatactcccctgtgtaattttttattttgtgatatttcaacttttaa

SEQ ID NO: 196140 - DNA, 686 bp, Cannabis indica
ctatcgatggatttgataacgtggcaatacgctaagtatcgctaaaatatgaaaatctagggttccaaaactgctagaactggtaaaccgaatttccaaaactagaaaactagttctcagggttcttcctgaggaaacggttaaccagttctatagggctagcccgaaccgactaactgcttccctgtaggaaaccctaaaaaccttactatcaactcaaatttacccctaattttttctatctctccagaccacctagacaaaccataacaaacatatttcaagcaatagaaacagctataaacttcagaaaccaattctaccattaaaagacaaagtttgagatcaaaagttcaaaccttgcctaaattctataatcagctgcaaaaacaacttaaaatcatctaaaccaatatacaaacacctaaaaaaacatagaattaagcttaaacaatttttagagcaactctaactcaggattcatgtatgaaaacctagtttttgctatatgaactttaaagaggagaagtaaagagattaccttgaacttgaaattgactaaggttactagaaattttgttggaatttccaaaaaataattagaaatttaagtactttttggttgctttgatctgggtttggccgaaccctaagggagaaagagacaaagaatttcttccaatttt

SEQ ID NO: 196141 - DNA, 1238 bp, Cannabis indica
actaatcataaagtaggattgttggtgaataagtttcgattatatttaaatgtgttattacattaagtttatgcacatataattggcaagattgtttatggtatgtgttttctgtgtttttacctacaaaacacgtggcattatcagagatcaagtggatatatatatatattttttaaaattctaattacaatttcctattacaattttttagttaaccttcacgttcgaaatcacatgccgaaatatatatattttgttttttttatagaggtattcgttatagttacagtatcaaccctctatttttttcaaaaatttcgaatagtttatagtaccgaaaatagagttcctgatattccagtttactacacgcattcaaaaaacttcaaacgtatttttggcgctgtaaactatttataattttttaaaaatttacaggaatgatgtgttgtaagcataatgaacactccgtgaaaaaaaaatttgaaaaaaaatattccgacatgtatttccgggcgtggaggttgactaagaggttgtaagaggagattaacagtagcactccttataataacagtgtcaaaagaaatagtattatgatatttgttttagacatttaaaatagtaggagaaatgattggtgtattgattaaaatattttataaattattttaaatatatttttttttacataaatggtataatggtaattacatgatcattataatttttttttatcaatgacattataagttttaaaactaaactaaacaataaaaaaattaggggtgctatacaatgcatcccaaaaaatgatgcactaatatctcttttactgttttaagaagaaaaaaaaaattctaattttttttgacctcatatatgttaaaattttttgtaaaatttaaaataatttataatatagagagcaatattcaaacaatttattttacgtttgtataagataaataagtcacgtgtgcaataaatttttaaaattttataaaatatcttaaatactatcatgtacaccataaggaaaaaaaaaattgaatgcctaaatcaatatgatttttttcaaaaattagaatgtcacactaaaccataaaccaaacatatggtctgattaacaaggacatcacttatgaaagaattttgctaactttcataaattccaagtcagacaaacttggacggcttagagacgttccttgcaaaccaagcaacaaaatgaa

SEQ ID NO: 196142 - DNA, 3472 bp, Cannabis indica
agtttgtgagcagaacttgttgggcttggactgggtttggctccatccattttcagccgacttaggagagtggtaatgtatttagtttgggataaatgcatgccagcagaggttcttacaacttccactcccaaaaaatagtgaagggggcctaaattcttgacatcaaactcggtatttaagtcatcaataagctgagaaatatgctgattgttggggccggttatgagtatgtcatcgacataaacaagcaataatattaacgagtcaccactcccggagatgaaaagagaattatctgatttagagctatgaaaacccttgctgcagagagtgaatttgagcttttcattccaagcccgaggggcttgtttgagtccataaagagccttgttgagacgacatacgtgtgtaggatattgaggatcaacaaatccgggtggttgggtcatgtacactgtttcttttagtgtcccattaagaaacgcattagagatgtcaagctgagtaaccgaccagttgctagatacagcaagtgtcaataagacccgtacggtggctggctttacaacgggactaaatgtgtccgtgtaatcaatcccaggagtttgagagtaacctcttgctgggatcagataaagcttgtttgagagtggtgggttctttgggtaaaatggattcagggagaggatgaagtgtagaagagtaggcttttggttgtgaatacctactttggatctagtgatcatatgatgggttattgggtattatggatagtaggtacagtgggctgtattggattaggtactggtgtaggcatggtagtgtttggtgtgacagattgttgatcatgagatgtgggaggaatgagagggtttgtaatgttgcagctgttatttgggaaagtagttgagtgggttggttgggaaggaacattggtggtagggacgggtacaactccagcagcagatggccttggatcaatgacagtattcctcacagcatcaggtataggagaatgaatatggtcagtagcagacataggtgtattaaaagatgcagaaagaaaaatattgaacagaggagaatgtacctgatcttgagcagctggagaaagagcagggaaatcttcctcattaaaggcaacatttctggcgatgtacattctgcctgctgaattttcacacatatatcccttgtgatgcagagaatagccaacaaagatacatttctcagatcttaatgagagtttgtgagagttgtatggccgtaaacgtgggtagcaagcgcatccaaagggcttgagcagtgtgtaatcgggtaagctatgaaaaagacattcaaaaggagaaatatctccaataacctttgtaggaagcctgttaataagatacacagcattttgaaaggcaagccaccaatagtgcatagataatccactttgagcaagtaatgtgagcccggtttctgtaatgtggcggtgctttctttcagcacgcccattttgctcatgatcatgaggacaaggatgttggaaatggactccatggtgagagagaaatgaggctaaagacctatactcccctccccaatcagactggacagattttattggtaaaccaaattgtttttcagcaaacactttgaattggagaaaggtattgtaggcttgggacttaagggataatggaaaaatccatgtgtatcgactaaagtcgtcaataaagtgtatataatatcgatgcccttctttcgaaggagcatgtgaaggtccccacacatcggtgtgaaccaactcaaggggttgtgaggctctagaatccgatatggaatatggtaatttgtgacttttgccccgtttacaagcctcacaaaatttgagatcttttatgttggcagatatgtttaatgttgccaagattttggcaagaacattaggggctgggtggcctagcttggagtgccacaaattgatgttggatttttcagtaagataaagagcagtagtagacatatcagactgaaaagaatttttatttttattaatgttgaaactgttacaagtagtggatgctaaagaagcatcaatggtattacatgacttatcaatacaagattcaacatgtaagggagtgacagggactgtggtggaagacacagcagaggtcttttgtgtgggctgagtggtggcaagattacaatcaagcttgactttggatgatggaaatgaactgtgagacaatgtgtataagccatttttaagcctccccttgagcaggactttccctgtgcgtttgtcctttacaaaacaacacttagagtgaaattctagaaaaatatggttatcctcagtaagcttagacacactaattaggttctttgtaatttgaggaactttgataatattgttaagttgtaaagggacatgagaagaagggatagagaggttaccaacatgactgatggggagacgttttccatttccaacagcaagtgtatctgatccagagtaaggaatttcagagtccaaaaattccattccttgagcaatatggtttgtggctcctgtgtcggcataccagtcgaagtcatcgccaaattcttgaattgcagagctagaataggcttgaggctcgtcttgatcatcaatctcagctatgtaagcacgaggctcatggatcttgggtgtcacaaagtttttgtcaaatctataatgacaaacggcggctgtgtgtccagctttgtgacatacttgacacaggaggcgtgggatagatggatgaccacggccataagatcttcccggagcacgattggaagtgaaattcccacggccttgaccaggataggaacgatatccaggcccaaaattagatcgagaattctgaacagagagatttgccatcattttggatgttgaatctgttaaggtatagtgcctttctaacctgctttcatgggttagtaacagagattgaatggattctagagaaagattgtccacaagactagtgacatgaaacacaacgggatcatactcgggtcccaaaccattcaacatatgcataatcaaatcattgtcatcaaggggatgaccagcagtggataaagaatcagcaagaagcttgactttatcatagtaatcggtaacagagagattacctttctgaattgttgaaagctgggatttgatttgaagcaatcttgccttggattgacttgcaaaacgatgttctagggcacgccaggcatcgtaagaggagtggtattgagcaagcgatccaagaatcgtttcagtcatggaggatcggagccaactgagtagcaattgatcttttcgtctccatgtggtatattcggggttggtgttgccattgacgagggtgcgaactggaggatctccgccaagaagaatgtcatcaagaccatgtccgatgacggtggggataacttgcgatttccacgcaagaaa

SEQ ID NO: 196143 - DNA, 952 bp, Cannabis indica
ctaaccctgaagcccaatgagcaagtctatcagccaaagtatttgctgagcggtgaatgtgagaaacgtgggtagcaaggagatgagataaagcatctttaatctatcgtatataggttgattctgaccatttagtaattgtgtctatttttatttttattaggagatattaattatatctagaactattattagaagaagtaacaagtatcttattcaaatttttaaaattgtttttaatttatgtatatcagtgggctaatgtgaccgcacaggaagtagctgtgctttttaaatgaataaataagttgtttgctagatgattgtctattattttatttttggcatttatactctttagcgtttagctgtatgtttatggatgattttggtgattgtttaaataagaagaaaaaaaaaaaaaaaaaactgaatccatatagtgttcacgtgatgcgtcgaaaattcaaaccattgacaaattactactaaaaagttgaaaaattaataaagctacatatattctagcccgaaattgtacacgtctctaccaacctaaatgacacgtttctcatgaagataaaatatggaactccaccggtttggttagtgaaaagtgaaaacaatttttcacatggtaaaaatgtaaatgttgttggtggcccttatataaatttatacaaatctaaatcaagtatatcacctcttactttttactaaacaatatcaatggctttcaacaagactctcctagcgttgctactattggcacttgtggctgcaacaactcatgctcgtgtggactttctggggctgtttgataataggccttgcccaccacctggtgagtcttttacactacctaattagggttaccttggtcacttgaataaattttttgaatgaataatatttttgtatagtaaaactatagtttttgtttttattattg

SEQ ID NO: 196144 - DNA, 1479 bp, Cannabis indica
ggcagcagtattttcattggtaaaagctgcaccagttgtgatttcagtgggcacagaatcagtattgccattgttaactgctgtagaagatggtgcatttgttgtttcagtagtgttgagaatggaatttgagtctataggagcagagataacatttgagacttcagatatgggcaactgggaagtctgagctgctgtagcaatattatttgctggtgctgttgtaggaatggcagagatgtcacagtgggtggctggtatcattgatggtgcctgcacagggttagaaaagctagagatagtatgtgtatgagatgaaatagatgcattatgatgacttaaaccagatgaggagtgtgtgacagtaggaataacagcagatggataaaaggaggctatagtttctggtgttataggagattgctgatgtgaagcataggaaattgagattcattaaaaatgacatctcttgatatgtacacacggccagaagtgtcaagacacttataacctttgtggttaatgctatatccaataaaagtgcaaggtgtagacctaaattgcattttatgcttgttgtatggtcttatattgggatagcaagaacaaccaaaggtttttaggctagggtaatctggttgtatttgaaataatgtctcaatgggtgatttatgattgagaacaggtgtgggaagtctattatgaatatagacagctgttctaaaggcctcatcccaaaattttaaaggcattgaagcttgggcaagaagtgtgagaccattctccacaatatgtctatgtttacgttcagctaaaccattttgctcatgggtggtaggacaaggatgtctatgaatgataccagcctcttttaatgtgttagtaaaggacctatactcacccccccaatcagtttgtaaaactttgattttggtgccaagttgtaactcagcttcagctttaaagtgctgaaatgtttttaatgcttcatctttggttttaagcatatatatccaagtgaatcgagaatatgcatcaacaaaatggatataatacttataaccattgaaggaaggggtatgagagggacccaaagatcagaaacaacaagttgaagaggtatagtatatgtagtattagagctctttggaaatggaaacttgtggattttcccaaacaacatgcttgacaaatcgaaactgaatttttatttggacaaagtatattacatgaagtaagaacagacttgaccactttctcagaggggtggccaagtcgattatgccaaacatcaaaaggggaaatacaagtagtattattggaattaagagagctactacaatgaaaaggctgactgacagtggcagtaagagtgtgtggagaatgagcaggttgctgtgaagtgttgccattgagagttgtatgcaaatgagagggcagcaagtgcaattgtgatgatttaaaggaatacaggccatt

SEQ ID NO: 196145 - DNA, 1803 bp, Cannabis indica
gacacatccactcaggtgtagtagaagtggggcgttgattctgttgaatgtccatttgtcctcctttgtttatgttacaatttgcaacttggtattcagccacataattcagagcaaattgtaataaaatctcaggaggtttggatttttaccatgaaagtcgttgtttcgttcattccaaatactccaacatatgcaagccacttgttccaattcttaagtagataatatatctgagatatagaagagaagtgacttacaagaagcatgatgattcataatatgtggtatttgaataccagaggaaagccacacttttttagctcttttgcaagcaaagagagcatgaaaggttgtttcctggtgataggagcagagtgggcatcggcttgaatcagcaacatgtcttctatttagagtggctacaactggcaggacatcttgtagaacccgccatagaaaaattttgatcttcgacgacactttcaaataccaaaatctcttccaccatttagattcagaactggaagaagattcatcttccaagttatttaacttaagtgaaagttgatatcccgatttgacattatatattcaattcgaagtatagtgccaaatttgttgatcgggatgaggatgaaagctcaaaggaatgtccaaatatgctgaatatcaaagggaatgaaactttgctgcagcaagtgagtattccaatttcggtcaggtgtaatgaagctagatacatgcaagtaagggtctgctgctagaaattgcagaggttcaaaagtggaagttcctggcagccaactattagattcagcaaaatattttcccagttccaaccttccatctaaggcccttttgaagtaattcctttccccaaactatacatctccatgtcatagagggatgaattctaatatcagcttccaaaaaaccagaattagagtaataccggtgcttcaatagggtgcttagtaatgagtttggattcaaaaaaattctccatgcttgcttcgccaataaagattggttaaaatgaataaagtcacgaaaacccaaacctccttcacatttagcatgacataaagctttctaatttttccaatgaatgcctgtgcctgtagcattggatccccaccaaaatctattcatcattttttcaatttgatcaattaatttttttggtagctgaaaacaactcatagcatatgtaggaattacttgcacaactgctttcaagaggatttctttcccagcagccgagaagagcttttcttgccaagaattaagtagcttcctgattttatttgtgatgttttggaataatatatgcttatctttacttgaataagaaggtaaacccaaatatttctcatgtagaggttgaatttgcatttgaaaaatctgttgaaagcttgattgatcttcgctgctggtatttggagagaaggataggcttgattttgcttgattgagtagctttctagaagctttccaataggagtccaggagcattttagtgcggttccaaaggggctagtagccttacaaagaatgaagctgtcattcgcaaagaaaaggtgtgtaatggatggagcatttttagtgattcaatggccttaaaaattaccacgcatttcttcatgttataatacccgggataaggcttccgaacaaataatcaaaagataaggcaataacggatcaccttgtcgaatccctctccctggaacaagatttccttgaatttcgccattaacgaagaaagagtatgatacagaattaatgcaccttatgatc

SEQ ID NO: 196146 - DNA, 610 bp, Cannabis indica
atggagattcaccttgacaataatcagttgattgcttcggggtaagacctccctccacccattgtcggagaaggaggcgctaatggtcacagacttctagcaagaggagaaaatgtgaacattatcaggccttaagtaggaggagagggaacgagtggacaagatctcaaacaaggcaaggagacaatcgctgtgaagagatcccagtgaacaagcagcacgacggagtaaccaccttcatcataaccgaaggtaaaggtgtgacataaaggaagaaggtcccatcttcaccaaggcaccctccaccaccaacaccgtgaaatctcggtaccttgtagcatcgccccagaaaggagaagcgagccaactctgtgagtcaaaaatcccaaacttgccactatgaagacgaaataaatgatcttcactggaagaaccaaaggctgaaaactatggtggctgacatgcaaaaggtattgagcaccattctcagaggcgaaactcaaggttcacatttttcgtataaaagttactaataactctatggtatagagttatttttattggctttaaacttgagttactcatggttcgcacttttcgtacaaaagtc

SEQ ID NO: 196147 - DNA, 1267 bp, Cannabis indica
ttcgcacttttcgtacaaaagtcaccagtaagagtgcgagatcccaatcgtacatggtgagagaactccatgtcatcaacggatgacaccacaaaggatgagagtggaaaggccctatcacaaaataagaacccaagaggtcattcaaagcaacatgaatctacccaccggggtaagatcacaacgagggaaacattgtgtagacttatgaaagcactttagccaaagaatcttatgctaggagacactgcgcttgcacccccttttcaagagtaaagcaagcaaaaggtgtcatcccataaccatggtggaaagtcgcacaataatgggatgagagaattactactcacaggctccatgcaaaccacatggaaagtccaagttccactcaccaactctcaagaaaggatgaacaagagaataaaaaagctagaagtagagatgcaggatctacgtcaaaagatggctatcacattaaagggaaattcagaggatgatgagtttgatgaagaatcccctttctcaatagaaattcaaattgaaccacttccacccaattttaaggagtctcgcatgacgccatatgatgctacaactgatccaaaataccatctaagaggttttaatgagctaattaagatgaaaaatgtgtcatgcaagataaggtgccaatactttgtggttacacttaaagaggttgcatacaagaggcttggaccaggagcaattacatactggaaataatttttggaggaattctttcaacaacataaagtgacgagtgattacattgtgcctgtaacgagtatcacaaatgtaaagcaaggagagaaagaaaggttaaagagatacatccagcactttattgccaaagtcgccaaagtaggaaagatgtccaacgatgaacataagtttgccatacctgctggaatatagagtcttagagatggacataagtgagtgtcctttgggaagctcgtcagacccttatagggtctattagacaataccccaatactcttaagctgatacattcaagtgaagtctctgctatacaacttgtaaaaattaaatatccaaaatattcctataagtaaagttctactatgcgagaaaaagttcttagcgatagcaagtttgcttttagtgtgcaataataaattaaagaaggcactcatgtgggcctctgagttaaagtgaatgacgctgcacacttgggggtaccaaaaaacagagagggggggatttttcaaatcgacaaggacta

SEQ ID NO: 196148 - DNA, 1095 bp, Cannabis indica
aacttcacaacagaatggagttatcaagcgtatgaatataacctttttgaacaaagtgaggtgtttacttcttagtttaggtttgggaaagccttattggggagaggctttagctactgcttgttaccttgttaataggagtcctaatagattcatagacttgaagaaatcttatgagatgtggtatgacaagataccaaacccgaaacacttgagagtgttcggatgtgcagcatatgtacatcaatccaatgataagcttgatgctagatctgtcaaaggcatttctaagatatcctatagacacaaaatgttatagaatctgcataaactagaatgagaaactcaaggtgatcagttttagaaatgttgtgtttaataaaaatgattttcctcacttgaaagctgagaaggtcagtgtgttacctgatgcagtttcatctggcaagagggaaggtttggtagaatttgaaatcgagcttaaagaatttaaacaaagtgagaagagtgacagcataaacacaactccagatgagactgaggaacaaccagatctgtttgactactagcttgctagagatagaactagaagagaaatccatataccagcaaggtttgcagaagttgatctgatggcctatgctttctcaataaatcattcatgtgacacaccaaaaccattgagtatggaagaggctttaaataaaaattacaaaaaagagtggtcgtgggctatggatgatgaatcaagctttcttagaaagaacagcacatgggtcttggttccaagacctgaggacaagaaggtggtctcatgcaaatagattctaaagattaaagaaggtgtaacagataatgagccagtaagatttaaggcaagattagttgccaaagatttcactcaggtagaagggatagattgcaccgaggtgttctcacctgtggtgaagtataagaccattagacttttgttgtcaatggaaacttatcaaggtttagaagtggatcagcttgatgttaaaattgcatttctaaatggctatctagaagaagagatatacatggaacaactacctggatttcaagtggaacaag

SEQ ID NO: 196149 - DNA, 3693 bp, Cannabis indica
ttaggtgaatgctctcgacactcatctcagtgtgagcacttagctggaacaccaggatatgttcccccagagtattaccaaagactttcggtgcacaactaaaggggatgtgtacagctatggtgttcatacttctcgagcttctttcggggaaaaagccaatagaccctttcgagtttggtgatgtacaacaaccttgttggttgggcaaaacaacttcataaagagaagagaagcaatgcgatacttgacagtgagttgttgaaagagagtagttcaggtgagtctgagctttgccattatctaaggattgctttcgagtgcttggatgataggccgttaaggcgtcccaccatgattcaagtgatggctatgttcaaagaacttcaagtggatgattcagagagcagtgacatacttgatggattctcagtaaaagaaacagccattgatgaatcataatcaaaatcatcatgaaatcaaatcaaataaaaaaaattaaaaggcagaggttagaggttagaggtttgagatttgtgcagtgtaaataagatgatcaatagagggataggaaggaaactagagattgagtgagtgagtgagtgaaatgaattgaaaagcagcattggcattattacatacaaatatggattcatttgtttttattaagggtggtggtggtgatggtgatggtgtttttagtgttttacttacctaaacacacattgacattgacacaaaaatgagattgacattgacaaacaacaacaacaacaaacataattgtgttatgttttttgttgttcatacaaatctttctctctctctctcactcaaaacatttttgtaaagttgtagcattattattattattattactattggcaaattcaatttcagttgttagttgttgcgttggaagaggatcatgttttgtttagttataaatatcaaattttcatatacatatataataaccacaattctaggaagagcaacactcccactcccactcttttcttgtttgtatttggaataatttatttaattaggaatacaaaaacagagaaagtcaaaaaggaaataagaaaagaaggaaaagtaaagaaataaagggtggtttggttcggttgtctattattattattatatagttgatatttattaaagactaattagcagttaaattctcttatttttaaatttttatactctattttatttttttagtaatattctcttaagtttattatttttttttttttaataaatttaaagtgttactttaatatcaatattaaatactatctaaaaaacaaataaagaaagttaagtgtaaaaaattaaaatagatttggctgtaaataacccattattaaaagaattgaaatattgggttaggctgtaggcaggcatgtgttgtgggacatattacattttattattatgattattataagtatatataggatatataatataggggttattattattaattagggaatcctaatatgtaataatgttttgttttttctttggccatagccacaatctccgcattttcttcggtctaatctcattttcttcggtctaatctcataataataataataataataataattaataatagattaacaaatacttgcttttggattttgggtggattttcttgtctgattcctactactctaattaatatttaatttaattcattattaataatataaaactactaatatttctcatttcccaacttgttttggattttatttttctttttttttttaatgcatcctcatcaatgtaaaatgtgacttccacgactcttaaaatcaaagcgtgtagagtagagttaagacttaaatagtagaagtaataattagaaaaatgctaaaaggtaccaatagtttttagtacatttttatgtgtcaatatcgctataaatttacttaagtatcaagtctcatatagtttaatatattaacttttaaggaatattattagccaattataaagcgatatgtttaaaggtgttaaacaccattgatgctcaatagcaatactctaacaattaggatatagaattgaaaatttatttagtggacaccataaatgatcattttgatagactatttatctgtttcgacgtttatattttttttagtttttatgatcacgtacggtataactatctaagactacttataaatttatagaaaattttgaataatttacaatgatgaaaataagatttaaacagttatttactacgcgtctaagaaaaaatgatagcccatacaacaaaaaaaatcttattttcggtattgtaaactatttagaattttctgaaaatttacaggtggtcctaaataactaaacatacacgatcatgaaaaagagaaaataactaaaaggttttctttagggatgtttgcggtgcgagtggtggggttgtaacattttttcaaaccaaactgcatatgctgtttttgtaatttctcaaatcgcaatcgcaccgcgagatcttaaaactgccactgtgaaaatacaatgtggtgcagtgcgatttgaatggtttacactatcatcattatcaaacattatattgaaaaatttaaaaattaatctaataaaatttgaacaatacaatatatattattaaaattttaacatcataacatttattaatcatcaattcattatattgaagtgtctctaaaaaataatgtaatagacacatatattacatatatttaattttttatgaaaaaattaaaaattatatgtaaaaattaacaaatttgtaatacatagtgcggtgtgattgtaattattaaatttaaaattgcaaattgtaccacattgtagagtttggtaaacatgcaaactataactccaccgcaaaaaattttaaatcatatttttatacagtataatatgatattaaccgtttatttaatgtaagcgatttaataaacacttctaattttgaaaatctatcaaaaactctttttcagagggtgttatgtagacttagtatttatcaaaaaaaaaaataaataaaaatataatacattatacaaaattccgtagttttggaaatttgaggtataattatcccaaagaaaatgagctccaagtacaaatggtgggctatctagaaacttcaaataaaggagtgaccagtgaccaccgaagcttggcccatttgtagacaaagagcaagtgtaaggcccaagctcacttaagatgaaggcccaaacaattactctggaagaggagggaaaagatacagacgtgacacgtgggaagcggtgagagtgacaagtggcgaagagagtgaagttggtagtgacaagtgacgacatagataaacttggtcaaacaatcctttttgactgagtcatggtcgtcgtcactagtgggacatgttttctctctctaattaattttgctttacacaattattgaaaatgaaaccaaatttatttaaataaaaattcaatatttatttcttccataattaattaattaattaattcattcattcattcatttatatgtcacccacgacgacccctttccgtattgtccatactcaattttttctttaattttttttggtaatgttttaatttgaaattttggatgcattccatttttatttgagtaaattgcggtataaat

SEQ ID NO: 196150 - DNA, 1123 bp, Cannabis indica
tattatacacaatcataacttcatgttttgaaaagtacttaagttatagtaaactacaaaaaattccacctaaatacctacaaaagttcaacatctagccacaaatatctctttaaactaatttgtcacatcagcatctaaaatggaaaaatatatttgactaaaaaatcaaaggtgggcaatctacttcatatattcttatgggcttaaataaaaatgacataatacgaatagtcaagactcaaaagcaaaactaaatgacctcttcttaaattgggcccatagtcaagcccatagaaaaagaaggcattattcaaattttattgaaaaaaagtacataatggggttgttgattgtgaaaagtatgttgtctacattttttttgattgaaatctacatctaaacaagtatcaaacacaaaaggcaatgccgtgtctaccacttcacttatataaatatatatatacatatatttttatatatatatataaaatgtcaagatctatcattttcaaactctcactcatctaccttattatttcaaacacgcaccttttagttattatattttctttttttcaacaaaaacagtgagagatcccaagacatgaaacgtgttagtaaacttaacatagtgatttttgattcatgactcaagattggcccccacttaaaactaaagttatgttgcaattattattatgattattttcttttgttattgtttagtagtgtatatatttgtttatgttcccctacaacataatcatacttatttgcaaaaatttgttggtctatagcatcatcatagtcatcaccatcatgaaatttgccaaaatttattgactttattaccctttattattctaaagatgttgagtcttattccctaaggaaagtggttttattgggatacaaaatacaataagaagaaaaccaatcttatttgattgtggaccatttgttgggtcaacacaatctctaatctattctctaccatagaagtaaatttttaactattaaggttgaaccagaaccaaatttgagtctcatctcttaaatggagaaagacaaaccactattagtgtatatattgtttattcttttctccttttttaaaaat

SEQ ID NO: 196151 - DNA, 1258 bp, Cannabis indica
aatggctggtcgcgaccataggcaaaaatggaaaacacgcattctgccaatccacccaagtcgcgaccatagtcgcgaccagagaaaaggttcgcgactagggcttgtcatggtcacgactactgatacatttttggcaacgtcaacagatttttaaccaaattgtcccgtatttttgccaattgactgaatttgaactacaatgcatcgggaacttgaaacaaggaaaatcaagcgtagaatcgctccaaaaaggctaccataactgagaaaatacttattaatgtgacccgaaacttagactaaaaatagcctaacaccagaaaattaaaagaaattaagaacgaatgaaataaatgcacaagagaattggggaagaatagaattatattaaattaaaataaagtgtcaagaaatctccattaataaccctaattaaaagtctagctactcatagtcattgtaaacatctcataacaattgattaagaacatgagaaaagagtagaagaaaaaataacttgttgaataaatgttgataaaagcctccagagccgctttctgtttgaatttttttttactcctccattgtctttcttaaaattgttgaaaataggcctttatatagctaaaaaaataaaaccctaattttctcgcagtttaaaaaagtctgaccgcgactctacaaagtagtgttgcgacccgtgtcttctaggcacgaaatcccggccatgatgctacaaggtagcgttgcgacacttgaagcacaatttctggcagaaacgaatgcaactttccaagaccttgctgccaaatatatgcgtttaagcaccctggccctgcaatccagtgttgaggcgctactcctcactttccaactcttcaacattaaaggctccaatcgcactagatcttttggatttcttttttggattatttttttggtgctatatcagcaaaacttcatttaatttatcctatatgcacattttttttctcggattcgttctattcttgttaatgctaaacctaaaatattaataactaaaagcgtaaaaattgcacaaaatacaactaaaagtaattaaaaatactttaagatcctaattaaaaataggactaattcagtcttaacaaactttcttaaacttgacctttactcgccttcgagtaaaaaatgcaatccgcctaatgatatttgtcggtttggtcgggttacccctttaattaactaaaattgttaattttttgtgttcaaa

SEQ ID NO: 196152 - DNA, 1770 bp, Cannabis indica
agttagacgatcttccactgcaaagactacgattacattgttagactctttgaactagtcatggctaggaccaacggacgtgtcgtagggcaccccctatgaccctcacattgttgaggaggttgaacaacctcaaacttatcagccaagggcaagcgaggttaaagaacctgtggccgagcagcccatggctagcaaagatgatgaggctttgactagaatagatagtgtatttgaagctaaagaggctatacttggtgtagggctgggtactgttgagaggcaatataagacttgcactgtgattttgaacaaccctctagggtcttatgatgaaaccgagtagccattaaatgctcttggtcacccatctgaggttgggatagaccatgtcttagatgaggctcccgagctgtaggttcttaagtagggggatcattagagatggatatcccctccattatctctatcagccagaacacttgatgagatcaagagaggaggactcattggaggagtctgttgtgacagacctaccagggaccacttggtccatcgcttgacatttaactagatggcttggtcgaatcctcatttggagcaaggggcagtattacccttgcatccttattttagggacattgccaactacttcgaacggtgtcctactcagatcaccccaaaaggcatcaagtaccttttgacgcattttattctttatgtagagttgggttggccttagccctcaccctatgaggttggatacttcttaaagttaaaatccattccaaagcaaccccagtttggatacttctattttagccaattggtgtaccaatggttaggcaacaccaatagtaaatccatgtagaaggttgggatgtattcttaaaactacttcattgcctaggaagtcaggtatgttcgtcaccgcttgtagacggtacccacatacactcactctatccttactcttcgattgagcgctagggcaaaccagcatattaaggttattgttggctagcatactgaggctgtggctagccagcatactgaggttgttgccagccaggctacaaagccttcttctcaagctccacccaggctgataccgttgttcagggtttgactagcttagatccacttgcacttgctgatgtttaggcacttttgttagttttttcatgcttttattttgcatcattatcatgttcttgtatggcatgtacgccttttacttttgaacactatttgtatatggccttaaggccttttattttggatatatgatcgaccaggcagtctttaatcctgactttaccttcttttgctagacatataagtgtccagacttactttttatgtctcgtttgaagtatgcatctttcacttaggtttcaattttctcttatcaaaagctttaaattttgattaagtttagttgtacatgttcgatgcttgtacggtgtgggtgcccccaagtgatcaaccagacttatggtctcttggtcacttacaattcatcaagtattatagacctttgcctgtgtatctttttggagggacctgttgtacacatgtgaaactaaaattaaagattaactttaagaagttatcttgttagcaagttgtttaacacaatattgaactgaaaatattatttttattgattaattagtcgtaaatatgttttgttgttgtgcaatttacaattattgattctaaaagcttgcaaaataaaaaaaaatctacttctagaactcattctat

SEQ ID NO: 196153 - DNA, 4177 bp, Cannabis indica
attaaattaaattatgtttcacttaatatttttagtaattctcctttaacatgcctgaattaatgtatgtgattaaacatagaacaataaattaacaaaatttataataataaataatgggattgtgagtcaaggatgcataataattcatattaatgtgaaattggaatatgaaactaattaacaagtatatggaatgaatgaatagattgtaataaagatgatggaacttgttcatttgactttctaacattccagaatacgacatatatgctagatctggttaggaaggaggggcatgtgggtggatggatgtggccccctttatcttttctcttcttcaatttttataatattttgtattttttttttttttgtaaatattatttttattgtgtatttaattaaattattgatttaacttcctattttattaaataagtaattaaaacttttttttttaaaaaaaaactaaaccctctaaagtgtaaactgtacacccggcctgttatttctttctttagctttgctaccatttcaaccattatatatgttaagatatttccatctttatttctccaaaaaaaaaaaatctctatcttactttttttcactattacgtgtctcaatatttttttttattaaattacacaaatttattctaatttgtttagaaattacaaaaacttcccctaacagaattttcttattattattattattattattatttatttttttgttttttttttgaaagaaaagtcttattaacaaaaaaactaggaactacaccaagttaggaagatcagctgtacaaaaattagctaaccacctaggaaaagaatgagtaaaatttttagtggttttagttgcaaggcatttccttgctaacatattagcacactcattattgtttctatgaacatgaacaatggtattacaatttaaactctcccttcgcaacttgatttggtgaagtatagtgttgacagcacgtaaatgagtgtcttggttcttaacagcatccacaatttgcttgcaatccgactgaatctcgatggggctggctgctgtgtccggttgatttttgagagcttccaagatggcccaagcctctgccatttcaatcgaacagcacctatgacagtagaccataccagcaagcaaaattataccttcctagttgcgccagataaatccagtacctacaccagcagctcccatttgcatggcagcgtcacagttgacgacgatgtgtccagaaggaggccggttccattgcttcaggtgaggggattccagagtatgcttcttgtcattctgcaccaagggactcgatcctgggtaagctgagaagacccattcgatcaactggacaccattcatgacctgtagattgttccatttcctgttccggttctcccaaatggcccacataattttaatggcatcttcaaactcactcatgtttagttgtgcctttaaagtcaccaatatatcaaacatagaccctttgttaatatgttcacattttttataccaagggacaagtttccaaattggtttaactttagcacaagaccatagtgcatgagtaagagtttcagcttggttaccacataaatcacagctaggatgaacagtcatacctctatgggacaagtttgtttttgctggcagccaattatgacaaacccgccacccaaaaagcttcatctgaggaggtagttgcatgctccacatcatcttccaccatttgtgaatgtcttccatattagagcatctagtgggatgtatattgatttctctaccaatgcgataaccactcttgacacaatgtaatttccatttggggtaaacggccatatcaaagtatcctccatgtataagtctataggaattccatgaatccaagagatgtcctcctcatggaagtgttttttaatttcctccagtttccataggccgtctgtattgatgaagtggtgaagtttagtgtgtggttcaatcccaggcctttgtaaaagcatggcccccgagggccttggtatccatttatcttcctaaacccgaatctctctaccattccccactctccaccgagccccctcttgcaaaattttcctaccccaacaaattcctttccaaacacacgatgcccccggccggaggacaaccagcttccatgaaggatacatttggatagtagctgttctttaacacccgagctagtaaagattgaggactatggataagtctccacccttgttttgccaaaagagcttggttaaattcattgaggcttcgaaatccaaggcctccttcctctttgggtttgcagagtttgtcccaagaaccccaatgatgaagctttttttcttttgtatccccccaccaaaaattggcagcaaggctatggagacccttattagtttcttgggaagacggaagcaactcattgcatagctcgggattgcctgaaccaccaccttaattagaacctcacggccggcttgggagaacatagaagccttccaacctttaagtttattccacactttgtcctttatgatctcaaacacctcttttttccttcttcccacaaaactaggtagccccaaatacttagcatgatgtgagacaaggcgcacccccaatctagtagcaagattttgaccgtgagaggaggagattcttttccccatacagacttctgatttttcaaggtttatttgttgacccgagagtttggaataacgttgaaggatatgcttcatggtgtcacactcctcttcctttgcattaaggaatacaaagctgtcatcggcgaagaaaaggtgagaaactttgactctatccctcccaaattgcaccccatttatgctcccagccctttcggcatcatggataaggcaagaaagaccctcggagcatagtaggaaaaggtatggggagagtgagtccccttagcgaagaccccgtgtaggttggaaattcccgttcttctcccattaataagaatcgagaaggacacactttttacacacctcattattttctcaatccattgctcctcatatccgagacccctcatcattgtgaccaagaagttccattcaactctatcgtacgccttggacatatccaacttcagagccattttattcccgttgccaaatctcttagttttcatacaatggagactttcaaacccaactatggcattatcttgaatgagtcttccccctataaatgcactttgttcctccgagattgcttggtggagactttgtttcattcggccagctaggcattttgccactatcttatagatcacattgcataggcttattggtttaaattcagtcatgcgagttggtttaggaacttttggaatgaggcataggagtgtgtcatttatgtccttcacctgcatcccttcattgaggattcccaaacaaactttagtgacttcgggaccaatgagagaccaatacttcctatagaataaacctggcaagccgtcactaccgggagctttttgagggtgtatggcacgcattgcttggaagacatcctccgatgagaaaggctccaaaaggtagtcattggtagctcgggagattcggttaggaatgagcctctaaaattcttggaaatcctcattagtagcttgacatgatgtgtatagattcttaaaatagtctcaagccactttccccatgtttcggttccctgttacccaattaaagttgtcatctatcagccctttgattatattttttgcctttcgattgctagccttgcggtggaaaaacttaagtatttttatctccctctttcagccatattgctctactcctttgcctccaaaatttctcttctttgtcaagcaaaatgttttgtttgcgttccaattcctgtagctgttgccattccattgtgttggtacttcgggtcaacttagaaattttctcctcatattccttattattattattattattattattattatttgaaatgggaatgttataaatttctatatataactaaatatatcatcattaagtcaactctttgtaaataataggaaattttttaaaaaaatatttttcttttatgttttatttacaattttacggtctaatttttttaataattacaaaaatatact

SEQ ID NO: 196154 - DNA, 1280 bp, Cannabis indica
aataacttgatctctcttgaaagtttacagagaaaatgagcagcacaataactgttttaaacaaataatttcggatccttaattttacaataaaattgctccttaatttataagagaagtttacaatagaaatagatttctcaaaaatccgttaacccacgaaataaaaaatatatgaaaattcctttaaattaggattcgattacatataaaatggaaaactatatcgaattgtatgagattcagaccatttctctccgaccagatcaacctatgcttattctatgcagtaaattatacttggttcgtctgctattacatcagtcctagtacatgccttgagcagggcatttcgtcaaactctttctccacccatgccttaatatgatgatacgtgtcacccgaaggaacgtgccacatcattcgaataaaattcaggataacagaagtattttttaaaagtgatgctttgattaaggaagggttgctttggtggatgtcttggatcagccataagaccatccgtggatcaactcttctcattttattttgacaggtataaaagtacagcaattaatgaagccatatgcccatgcatgagatcatgcaattaataagccatattactatgatttgttgggctttatgaagagcaaaggaatgatattttgtagaatggtaagggtcttgctagatcagtagtgtcatctgtgttgacttatttttatcaatggaaaagtgcaaatttattatctcattcggtgtcatttcatcctctgatgttgtggttgaagtgcactggaaattatcttgtgttaatacggtgaaaatcaatgtagaccctttggtgtaggatggcttgctctagattcagaaggaagcttgctttttgcttcagctgttttcaaacaaggcattgtggatctagcagtggcagagacaattgggttaaaagaagctttaagttggttgaaatataaagattttccacatgttgtcattgaatcagattgtcacactacaagaattgatacttttccagcatatttttacgctagcaaaacttgagtattatgctaataaaatagaatcttctttgcctatgcatttttccattggcaaaagaggtcggtactagaacttttgacggtccaaaatgaaaaacggccaacaaaactaacgccttgggaagagttttatttttgccagtacattaacgcattaagacaatttttacttttgatatactaatatttaaatttttccaatacaattttacg

SEQ ID NO: 196155 - DNA, 1496 bp, Cannabis indica
tgtgtttgatacatttggatttttcacctctattgtcaaggtggtcgctgttagagtactagtgttaggtttatctcccaagccaatctttaacaacttgatttcattctgtgcttcttctttacacacaaaaatctatgctctttcattaaattcattgatattcctcataggacaaccttccaaatcatcccataattcaccccatgtagtagataaatcagttgtaattccaccccaaagagctgttagctgaatgctatcattcaagtttctgacttttgtagcacctgtattgaagcgactcattgcttgatactagtcaaggatgacgcctacggtcaatgatctcttatagcttgaaactgctttttgaaatccatcgacaagtgttcctaggatgttatggaatggttggtgaatttatcaaacccactactcacaactcctgtcaaggaagttggaaacaatatgcaacacaagttgttggaaacatttcttcctggcattatagtgttcaaattgtttaaatgggcaactcgatcagtggttccatcatattgcgagtcatgtggattcttaaatcgctgaggaaattgaaaatttaagatgtcagggtggaatcactcagtttcttcgtctgagtcatatcctggcagtttggcatatctccatcttgatatttcctaaatttttcctcatattgtattactcatagttgaatgggacccataggttgttaattcgtgttttgattaagttcgttatgaaaattaggtgcatttcgattgaagtactcgtaatggtttggttgccttcaatttaacctctcatggaggtcaggttcaagatgcctttgcttataattactcacagacctagtccctaattatctttcaaattggtaactgcgcaagttacttatacttacttggtcagtaaaataatgtcgagatttgctcccatctcacatttgtctatttgttctagtgggcctactatgctcgtaggatctggattctcttatacttgaacttgcttcgtgcatctcatctcgcagtggtcttcttcttctttgaaagagattaaacacacgtcccctactcaagtaagtgtgcatattttctttgtctatgctagaaggcctttgtggatacctagggggacgaccaccagacctatattcacttcgagaatttcttccatcattactagggattacttggtttcctagatgcagttacctcgcctctgcattcacgcgacatgattcttgtatgtcagtcagttcattccctttattcgcaaatccatggaaagttccttaaacatcatgttgatgttctttatttcttgtattacttgggttgggttgattttctctatccattgggacatccctcgcactgccatgtggttcttctagagcatttatggggttccctttgttattttcctggttgtgaagcctcgagttcttcctcctagtcttctta

SEQ ID NO: 196156 - DNA, 1332 bp, Cannabis indica
atgttatttggatggccctaaaaatcatatattttagtttaaaaatataattaaaaatttatatttgtgtggcatgcctagtaacattttctagatttgtcaaacttgagtttccctttgggtccctttatgtaagtggaatttgtacgaatttaaatggtggaccaccgaaatttcagccaaaaatttgttgaaaatggcccatgtatcgttttaccacaattatttattgactaagttaagggtggaaaccactaaattactcaattgtccatcttaattgctgtgcctactcagttattgccattgggcgtttttttacttttcagtcttaccaattaccataacttgaaactcttgactcataaatcagcattaactgtcaattacatttttttacctgtttgtcaaaatccttgactgattccccctcaaatattcagtttctttttttatgaaaatgtgcatcaagtcaaaacttatattactattttggtgcgtgtaatgaatatgtgaatttatgttttcaatcaatcaaataatgccgtttcaaaaaaataaaaaaaaaatcaatcaaataatacattgtttaaaatttgaaaaaaaaaaattacccataatattattttaaccttttttctttttaaaatttactgtagtttttgtgtgagttgagtttcgaatttctgtaaaaatgaaaaatctcaaaaaaaaaaaaaaaaatataaatatttagttttgtttaaatttaatattgtactgttatttttggagtttgttgtagtcccatttgttatcacattgtctaattcttgtattgcaacagctctttcacctgaatcagaattgactcccacatcaactgcagcagcgcctgatgctggtgccatcaatgggcatgccccggcaccctcaccagggagttctggtgcggcgggtgccatgtctgcttcggctggagcattacttgttgggcttgcagttgcatcattctcttggttctgagcttggagtttgatcttttttgtgagagaatagactactgtggggggaatcattttgttattttgcttttgttattaacaccatttgaggttctctttgcatagtttgttcttccccttatattaggtaaaaacacattcatttcttagtacaacttccaaacctatggagatttggactccctctggctaatgtattaaattatcttctattatattgttactttaaattattttgtgatatctattctccttttctggttaatttaaagatattaaatcattcgattttgtaaacttcagaactgaatatcttggagcataattt

SEQ ID NO: 196157 - DNA, 1663 bp, Cannabis indica
gagggatcattctttttagcctggcgttacaggcatttctaattatggttgctcccttcagaaaacgcacctccaataaattcttcgttttcctactttggatgtcttatttgcttgctgattgggcggcgagcttcaccgttggccacatttccagcaaacaaaatgacgattccggcagggacaagggttgtatgccaataacaaagcagacgacatcatacaagccttttgggctccatttcttcttctccaccttggtggtcctgacaccataactgccttttctcttgaggataatgagctctggcttcgacacttgttagctcttgtaactcaggttagaatctcatttagtgtactgttgtctattaaaaatttaatttcattaaaagaaagaaagtaattaaatggcttaattaaagtcatttcaaactaatacaatttgtaaccaaaaagataggtattaaagttctacattggttggtataatatattttcgatctacttaataagaagaggcttatccttttctaacaagttggttgatttccaataagtatattaaaaaaattaactacaatacaactgtgttgaatgacatatataggttcttgcgactgcttatgtcttcatccaaactgttccggggaacattctctggaaaccgacgattgtcatgttcatcggtggaatcatcaagtatgtcgagcgaactcgcgctctctacaaggcgagcttaagcactttccgagcatccttgctcgaaaagactccaaactacgccgaatacttgtcaaaagcctttagcaaagacgtggtacaaggacacctaaaagagatcgagatcgtgaacttggcccattactacttccagattttcaaaggtctaattgtagattccatcttaagcattgaagagcgcgacgagagccgtaagttcttcatgagtaggacggcaacagacgcttacagagtcatgggggttgagctcaacttcatttatgaagtgctctacacaaaagtccaagtggttcataacactgtcggctatgtattccgattcttggctttcacttctatctttgccactcttgtactcttttactctgtcgacaaagacgatttcaaggcttttgatgttagaactacatacactttgcttcttggggcaatttttttggacgctatagctctttttaatctcatcttttcggattggagtgtggttggaatgtacaagtactcaaaaataagaaagtcatgtgtgtcgagaatgttagagtggttactcaaattgcaagaaccaaatttgcataattcgggtagtaatttgtttaaaaggagaataagagcaacactatttgggcggtggtcagaggtgatatccgggtacaacttcatcacatataagagaacgttttgatgatatagaaattgatcaagatcacgtggaatgttgttggaatggggtacttattaacaagataaaatatgcctatggtaaagttgccaagtgttttacaaaaatatctaacataatgattgatattttgggtttgacaggtattgtgaacgaattaaagtacaccattggatacagaatgaacgagcacctatggaatttcatctttaaggagttacaagacaaagcaaaggacgc

SEQ ID NO: 196158 - DNA, 1069 bp, Cannabis indica
accacacacatgccacgtacaaaaatgtatatattaatgtctcaattttgcacaatcttaattgtccaattatataatatatattatatattttctacaaaagtagagatgaacattatattacaaatctcactttctttttatttatttatatatatttgtcttaataattaatttggttagtgatgatcataccctacatgtgtccttccacagtaaacgtctttctccttaaataccctatccttcccaagaggagtgtgtccaacacacttatattcttcaccaaaataaaaaaactaacttctttcccacacacatcttcttccttattttatttttagtctctcaatctcaacatctctctcccatggcctccaaccaatcaaaatttagtggtggtgatcttgagcaacaaacaccccaactagatctcgaaaccaaagatttcgactactccaaacgctctcaatggctgcgagccgccgttctgggtgcgaacgacggcctagtctcaaccgcatcactaatgatgggaattggagcagtcaaacaagacattaaagtcatgattctcacgggcttcgcgggcctagtagccggagcctgcagcatggctattggtgagttcgtctctgtttattcgcagctcgatattgagcttgctcaaatcaaaagagagaaaatgaagaaagagaacagtgcagttgttgttgcaacaactgcactggatgatgatgagaaagatgatttgccaaatccgttgcaagcagcggcagcttcagctctcgcgttctcagtgggagctatagtgccgctgcttgcagcatcctttataaaggattatagagtaagactgtgggccgtggtggcggcagttagcttggctttggcggttttcggttggttgggagccgttttaggaaaggctccgacagttaagtcggcagctagggttttggtcggaggttggctggccatggctatcacttttgggttaaccaagttgattggttcgagtgggctatagatggtttttggcaacaaattatcactattcactactatt

SEQ ID NO: 196159 - DNA, 863 bp, Cannabis indica
caaacaatccatttccttctcaccagagtgttttaggtaaatgtgtatgtactatgttgcttttgattctaagtctaataggataagttatggagtggtggtttgaagtgataaagagatggttgtggctgacttagtagttcttgatgttggcaacttcatcaaaactatttatgagggccaagctttgctttgtgcccacaattggtctaaagtaatatccttgctaatttctagtataaactttgattctcgagatgtagctaatcgagtaatgtctttctatgacaatatttctctactttcaaaatgtaaatggagatattaaaggttcattgtctttttatcgtttatcttagttctatcatacatgtaccaagacaagctaatataatggctcaaaagttagctagaaaagtattagaggtatgcactagctcataagtaagcttgaaaagtgttaagaggtaaataaatttatttggaatagttcaatttcaagctctcttcaaatcttataagtttggttttatttttctaatgaaagtttagattttaaaataaaaatataaactaaagttgcgttttgtaatatttttcgcccagatcaataaattaatcccagagttccaatatcatctcggacaggggtacctaaatttccatcttcaacataattaaacaaagttcatcatctaggtgcaggttagagtctctggctccattcgttcatcccagttcattggaatgggtgctttctagttgcgccaatgaaggcttgattaccttaagatcccagtctaggatatttctgttggaaattattttattagtatctatatttactaatatgtatgttgatt

SEQ ID NO: 196160 - DNA, 636 bp, Cannabis indica
taatataataaataaaattaccagaaaagaaaaaaaattataaccaaaacactcaaaacgcctcctcttattcctccaccaccatcgacatcggaaaatgaatcttcaagacagagaccaatcgttcttactcgtccacctcaccaaaatgctggtgccactgatcccaatccgactttcggtacaaagaccaaaaaagaataccaaaacaaacacctcaatcacctagaaaatcagtcactgaaataaaaaaataataacaataaaataaattaaaataggaaaagaaaactccctttgaagataaactgagcattgaagatggaggcgttggcacgcatcgagtcagtatgaatatcaggatgaatcacccttctcgctaggatccactcgatcagtacgactaacatttctcaaagaacagcggccatatcagagttggaaaacttatctagtccttgaaagaaaagaaaaacgccgtcgacgatatatcaagaacagaagctttggtcaagaacttcttggctatctccaaggcttgattgatatcatcgggaaaaggtccccaagattcgaaccagaaattccttcgagagatctgctttaggagactgaggatcggaaggttgatgagaa

SEQ ID NO: 196161 - DNA, 1625 bp, Cannabis indica
aaaaaaggaaaaaaaattaaaaggaaagtttccatttgccttgaaaaacgtgatcagccacagagccttgaaaaacatgatcaacgtaatttgagtcttaaatgagtctactttgatgaaaacacactatcgaaaggtgctacaaaattcatggatatcctcctggtttcaacaagaacaaatctaaagaggccagtgcaaatcaaatacaaactatggatgacagtagcagcaaccaacaagaaactcaggctctcctcccacaattgaccacgactcaatatcaacaactactcaatttgcttgcttcacagcaaaatggtatatataattctgaaccatctacctcatctggtaatacaggtatcttactatcccacaatactcaatctattttacataattcttggattatgaattctagagcaacaagacatatttgttccaatatgaaacttttccaaagtatacgtaagatacttgctaccaaactcatcttgcctaatggtaactgtttttatgttaatcaaagtggcactgtcattctaaataacaaaatcattctcactaatgttctttatgcaccaaacttcaaatacaatatcatttccacaagctatatgacaaaagatattgttgtctctattattttggaatctgatagtttttctatccaggacaaagccaaccggaggatgattggaaaaggtagcaatatcaatgatctctatatccttgatgaagcaccagatccttcccaaatcctatccatttcagctgaaacttggcactctcgactgggacacttatctcataaaagattagatcttctcaaagaaactttacattgtaacacttctgttttacataaaaataaaccatgctatatttgtccaattgctaagcacaagaaactttcttttcaaaataataacaatcgatctaattgtatctttgatctcattcattgtgatgtatggggaccttatcacattgcctcacacactaatcacaaatattttctcactcttgtggatgaccactcacagtttactttggtttatttaatgcagcacaagtctgatgctaacaacataattccacagtttctatcctatgttcaaacgcaatttaactgtatttttaaaactttcaggtctgataatgcacctgaattagttttcaaagatttgtttgctaaacatgggataatgaacgattttacttgtgtggagacacctgagcaagatgctgttgctgaaagaaagcatcagcatttgctcaatgtggcttgagctttgttctttcaggcaaaatttccaatcgaattctggagtgaatgtgtcacggctacaacatttttaatcaatcagactcctactcccttgcttaaaaataaaactccttttgaatgtcttttcaacaaacagccgaattatgaacatctcagaactataggatgccttgcctttgcatcaactctctctgcacacagaaccaaattctctcctcgtgcaagaacatgcgttttcatgggatatccccaaggagttaaaggatataagttgtttgacatcaacactaatgaattttttctctcgaaatgttgtttttcatgggaatat

SEQ ID NO: 196162 - DNA, 927 bp, Cannabis indica
ggagattgagtctgtatttactccttcaaaccatgtttatttcatgcacggcgcccccaaaaatgacgtgattaccgttttgactcaccattatgtgtacaaatggaaatggccatagaagctttatgaattaaataaaaacccacgttgattaatgctacttcgtatttcagttttggactttgttgatttttctttttcttcagtaaatacatttacttgtttcgttgtttgtattgtcattatcatcatgtattataatcctcattaaacaatgtaataattgcgttgttaggaaacattagttagtgtacttcaagccattacactttgtacaaccatagcattaaagtaattcaaacagatcatattaaatcagcataaaaattgtagtaattttgaaagattgcttagtgtcaattttttttttccccaaaactgttgatctatcaagacctgaattttttatgagacaaaataacaaaacttaaaacacttgtctaatattaatgttgattcttgaagtctggatgtagtctaagaaacagttatcttccttcgagaagtgtaattcaagagccgaaatttcagcattttcttcgtctgggaagattcgcggcacacctgcaaaaggcaagagacgcaagaacccatatttttaatatcttacgagttatgaggaaaaaatgatgcatacagtaggtaatcattattatctttttatcagtctctcaatatttggaattctaaaaactatagcaattactaaatatgtcgacaaaaaacttgaacttctttcatgcccgatcattttagcgacctacttcagtaagtaatcatccattatgttaaaacactactactaagtgatactcttgcttattcataagggatccatcatctgtagctatcttaatagcagaaaac

SEQ ID NO: 196163 - DNA, 712 bp, Cannabis indica
tagctatcttaatagcagaaaacaatgtacttatttgcagtgttttgctcttctatcaacctacatcattaccctatttcatttgaaaacattaaactcaagtttctgactggatactaaaaaatatggtaagctgaagatttgcccttaccatggtaacattctcttgcttctccagccataagtacaacatcaccacttcggaggaacattgctactggaggatcctctttacactttccacccaaaaggaaaattgctttacagcccaaactgagagaaagacaagatataaccaattggaagacatttttgcaccgtaaacaaaagaatatatattaatgaaccagaaaatcagatcattacaaacatagtaacatacctcaggcttactataggtttactccaatccttttccatgtcatcaaggtgacctccaagcgtatcaccttaaaaaatatcaaggaatcaaagtgaatttgagacttcatttgactctagatcatcaaaacatttcaaaagaataacagctttaagtcagaaaagaataagactcagtaattttcctattatggtgcaatccttcccttaataggggtaatttacaagctttcttacaggtttgttcgataactttgactgattctatttcaattgtcttgataagttttcatttattttgaatatgtttttaatgaaaaagaaagaaaga

SEQ ID NO: 196164 - DNA, 968 bp, Cannabis indica
ttttttttttttgagaagtttttctagccagccaattgaaatttgagatgaaataacaaagtccaaacctatatacaccatttttatgtttttttatgttttcaaatcatagaatccaaaaactctccaattattcttttacttttttattttgagatttccaatcaatcacatattcaattttttaaaactcaaaaacattaaatcacactacaaccaatcacatatttagaaacaatttttcatttacaaaatttaaatttttgtttccaaaacaaatttttaaaaaacacaatttttgaatcacaaaccaatcaaacatacaaatacaaaataatgcaactcaagcttcactgaaatttatgagagcaatcatatctcctttatcttttttctaccagagttcatttaagtaatagtcgataaatcaggactaaattagtttgcccaaaaagattacgaaaattctatcttatatgatttttttttttatatagaggagagctaattataactttctattacaatctcttagtcaaccttcacgtacaaaatcacataccgaaatattttttttcatagcgttattcattatagttacagtatcattcttgtaaatttttcaaaaattctgaatagtttacagtaccgaaaacagagttcctgatattccagtttatcacgtgtgttcaaaaaatttcaaacgtattttcggcactgtaaattattcgaattttttttaaaatttataggaatgatgttgtaagcataatgaataccgccgtgaaaaaaaaatttgaaaaaaaaatattcccacatgtattctcgagtgttgaggttgattaagagattgtaacaagaagttgatggtagcactcctcttctttataatatcaagaaagtcaatatctattattacatgttattcgttacacaaggaaattgtttcttccttttttttttctttt

SEQ ID NO: 196165 - DNA, 1015 bp, Cannabis indica
gaaccggttatatttcaattatgttcgctttgagctattttgtgttattagtttttattcattatgttatagaactagttctatttttatttatatctgagacatctatttctggtaattttttcggcgacagtaacttttctcttgatttctctgtattgcttggatgctttgcactcgatgttcgccactgtgaatagttagattcgttttgacattcattcggagggggcatcttcccagcggttaggggacccccattcccctttttgaccttgggtttaatgtgggggctaactgctgggtttcttatctttcaaatgagtgaagttcttcaagaccttcacaaacacggtttctttgggttcgacaaagaaattcttgagctccatcacaccaactccatgtcaaatcccaacgtgtctagtgccaaatcctccaagaaggggccaaagaagcttgccaccttggaagaggttatgcaaggcccatttgcctacaagaaatattcttgttgttccaacgattaggaggccaatgaaatccattctactttgacctgtgcccatcaactggagaagatagtggctgtaaatgggaccaaattgtctggctctggagtttatcatcgtcttcccagagatgaagagacaccgaaccacaattacaacaattttggagcctggagccagacccatcttatgtccgaagccatgttacctctgtaggactatttcattgatttcttcgtatttgttggacttacgccatgccaactgattcctcaagcctaccacctgctatcaagcctttttaatttttatgctgctaggggttgggctgctccccgccccgctgaaattttatatttttacaaacttctttctgtgcccaagaagggtgacaaatttaaagatggtttttacaagttgcaagctcatctggccattgaaaccccggtacccttcaattttcgaaagaacgttaaggaatactgtcatatatgtttttcttt

SEQ ID NO: 196166 - DNA, 1298 bp, Cannabis indica
cctaatgaaatagcctcaatgagcaattcaaccgtacccgccactccaaacttggccttgttcttgtcattcattgccaaactacacactaaggaggaagctagtttgcctgattcttgtgaaattgtttccaatgaggcaatcatggaattgaggtgggaaattgtttccatacttgccaaagattttttcaggccggggtttaaggagaggttaaagagaatggctaaagaaagaacttggatggtggaagaggaagaagacttgatgaggttgagtaaggcttgtattgctcctaattctgattgagctaccaagttcctattttgagggctgaccttggtgatggaagcaagagcttgaagagccctctcttgggcatcatagttatcagattgagcttcagagatacacttaacaattttatcatacacaattgatgacatttttttgtttgatagatttagttacacatacaacatttgttcaaattattgataacatagtttgttgggattagttagagaaatatttttgagagcttttgtatcaagaaaaatatgtgtggtatatatgtatatacataggtgagtgagacaaggttgtagatgtttcccatgtttgtaagttattagatggtaacaaagcttacctatgtacatcaggtgctttggattcttcgttttttccttggaatctatctaaaatcaagatagaatagatacaatgaaaccaactacagagtttattcttatgctattactcatttgtaaaaatcataattacagaattaattgggtttcaactttcattcatagagtagaagtagtgtttaactttggaatgaataaacaataatattaataactaagaagttagaaacaaggagcaccagtggtctagtggtagaatagtaccctgccacggtacagacccgggttcgattcccggctggtgcaaattatgctgtgatgatatttgcacttctgtgttggaggggtccatcaccattatcttatttcagatatgaccaagtgcttctgagctttaacctttttttttggttctacatgtgtttctgtggttcattcatattcctataattatattcatttgattaatcaatccaatttttattatattaaacatattcctaaggcaccgcagagtagtagcagttggtattggaagagaaattcaagacaactcagatgagagtttcttggcaaagagatcgaggtcgactccaaacaaaggataggctgcttagatttattatttgttctgatgttgtttgt

SEQ ID NO: 196167 - DNA, 2316 bp, Cannabis indica
caaatttcccttttttttaataaataaataatttttaaaattaattaaatagggaaaaaaataaaaattattaagacagaatttgttgggataagatttgtcaggacaaaagttgttaggacaaaagacaccaaccgtgtcctaaataaacaaggtaggtgaatagcattagtcttatcactgtgggatttatcttttcgagttaattaattatttaaataatttaattagataaatatctaatttgaaaaatagttatagatatttcaaggttgttgagatattcactcaagtagttgagagattttttcataaatatcagtagccgaaatcggttatagatatttatttatttaaatagttaaataatgtttaattaaaggaatttaactactctaaataaaagtttgatttgagaagtcaaaagtcttcttttcacaatacaatttcaaaatacatagagagaaaaggaaattggtttttctctgttgttcttgctcacgtgttgagaactcaacaagaacaaggttgtacactttatcctaatagccttcactattccttgtgtgtggtggatcgatttggaagacattggtatgagttcaaattgcatatccctcatcaatcggattatgagatacaacatacgagaagttttaaggatacccttataggcttcaagaagtatactctaaatttattattttattgttttgatttaatgtacacatatttggagatcttaggagctatggtacaatgataattagataatataaaactctttcactgtgtacccgatttagtactataaaatcaataattggtatcaagagaagttccatgaatatgtatacttttaatgttatgtgggtttagaaataagttgagcccgacatccccaagaaagacgcagcatctctacgcttgcacatgtagttgctaaggatctgacttggaaaaaaggcctttttgcatttagaaatcaatgattgacccacctcttacaccaaagagtcgggagtgggaggaatacctttctttatcaagtagggcgtctctggcccaaactaattgcaggaatagtcccttcatgcgggacatttgtgaacaaagccagggtcactacctcctcaatctcgtcttcatcatgactaggagtgggaggaatgcctttcttcgatccaacagggcatctctggcctgaactaactacaagaacagtcccttcgcacaagacaactgcaatcgaagccagagtcactgcctcctcagtctcatcttaatcatgtccaggagtaggagaagtcccgttgggcatagagatagaaccaagaacataagttggctcccagtaaaggtgggaaggtttcatgatcaaattaagggcacccctagataataaaatgcctgtcaagcctgactccttcagatgatgtggcatgagtagattcctagcagtccttccatctttagaaagatcaaaatacttctgtaaggtgcttaaagaatcgatactaagcacaagacttccatggttgctcaaaaaaagtgagagactaggtcaaatggagtaaaatgtgagagattaataaaaactaagcaatatgagtacctaaaaccttaaactcaaacaaaacagaggttggcatgtttgtgaccataaaaaacttgaaatgcttgaagtgaaccttagaaggcatcctagcgacaccttgaatcttgggagaaggtatctttgaaaaatgataagtcctgagaaacttggtggaatgatggatgttgtgaactgaatgaaattctacagccgaagggaaacacccatgtacccccttgaatgcaatggaaaaacttgtcaacaagacataagcaattggacgaagctaaagatgcacaatcccaaagtaagacagtatgtcaatgaaatacgggtggagagggagaactgggccatccccatgatatgcgagctatacaccactctcctttcttgaggtgcaatggcgaactcctccaacctaggattgtgtactgtcaagttgcttgaatcacggacattctaggtgttcatcactgcacggatatcatctatggacatggagctcttaacccccacgtaaatgaaaggaagaacatcattgggcagtagcggaatggtttgcctggacgcaaaaagaagaacattttcttggtccaataagatgagatgattttttgggtggggccgtacccgtatatacatagaaacgataagtgctagcctcacatttttatctttttttggagttcctacacggctgggtcttaatccttggg

SEQ ID NO: 196168 - DNA, 1482 bp, Cannabis indica
cgatggtgggcccgatgtcggtgtaaaaatagaatttgatatggtccgatggacccgatagtgggcccgatggcttgacagtgtagtgaaataaaagagagaagaagagagagagggggtgatgtaaatggaaggtattttagggatattataaaatgtgtcatattctacaaatatcaaatattatgaatttagggaaattttttttaagcatatgtaagcataaaaaaccaaatttccctaagataaacagttaaaatgtaaactaaaaaacactataacagtacaaaaaaaaaaaaggaaaattactttttgaatacacaaacccaaatccaatatccattaaaatatatataaatgccaaattgccaatacacacaacgtgaatcacacatgatcataaagtcgtttctttctattatggacgtccaaaccaggaagtttcctcaccaaatttaactataccacataattatatataatcacttcagccaaaaaaaaaattatggcgtttggtaatatttttattttttaatttttaaaataaaaaaatgaaagtagattttttgtttttaaaatcttgtttttaaaaaacaaaaatgtgttctataatcacttttatttttaaattttaaaaacagaaaacaaaagtttgttatgtaaccacttttattttataattttaaaaacaaaaaacaaaaatgtgttctgtaactatttttattatttaattttaaaaacaaaaaacatataaattttgattttttttcttttttaaataaaaattgtaaaaatcatttatttttatttttaaataaatatataaaaagaatcaaataaaaaatactcattagcatctttaaaaaattcaagtaatttgaatttacgaaactcattatctacaacacaaaactgacaaagttataataaaatatgaactaataattgtccaatcttaaagaaaatatgaaaaagttctaattgttaataaacttcactcattatcttcatcgtcgatttgttctccatatatgatcagtaatttcatcaaggatattagtcatttcacgaatttgatctcttgaaatgctaaactcaacactatcattcaaagtttcgtggggtggacctgaaaatttataatctgaatttgtgacacattccgaaagaattcgtgcatcattaactgatcatttccatccatcaacaacatagataacttctcaaaaataactaattttaaacctgcttgaaaactaccacaaaaattaacaagataatattttaaccaaacaaagcatatacacaaagacaaatatatgaaaattaaaggaaacaaaaaatgtaagaaaaaccacataccaagattaaaaacattatagagaatttcaacaaattataacaacattatatatcaaggaccttattttgtgtataataacaaaccaacaaattataaagggataaaattctaataaagaa

SEQ ID NO: 196169 - DNA, 1375 bp, Cannabis indica
gtaataattttttaattacaataaaaatttttttgactaaatgtgagatttagttatgacaaaaagttacttataactaaatataatatttagatacagattatcactaatttaattttagttacaacaagtatatattatgactaaaaacacacaaatcttttttgtcacaatactaaaaaaaaaattacttattatgaaaacataatatttagatacaaattgtcactaaatttagtattagtcacaacaaatagtaatttttataactaatatctttagtgacggactttttaatgacaatataagaatagtgacacaacatgcccttaaatataacatcaccacacacaatagtagtatataaatatatataaatactactttcaaacgaccaatcactcataacataacaatggagatccaactaccatattattcctttccaatccttttctgcttattcatctttctcttcatgttaataaaaatactcacaaaaaccacttcatcatcatccaaactcccaccaggaccatggaaactaccactattaggaaacatacaccaactttttgggtcactaatccaccaaaaactaagacacttagccacccaacatggaccattgatgcacctcaaaataggccaagttccaaccctaatagtctcatcaccagaatatgccaaacaagtgatgagaacccatgacatagtcttctcatcaagaccaatggttctcttctccaaaatcatgttgtatgattgtactgacctagtctttgctccttatggtgagtattggagacaactaagaaaaatcttcatgcaagagcttctaagcacatctagggttcaagctttcaaacccattagagaacaagaggtttcaaacttgattcaatggattggatcaaatgttgggaaagaaatcaatctcactgaaagaattaatattttgatttatgggattgtttctagggcagcttgtagtaaaacaagtctcaacaatgaagaaattgtttcacttgttgctgaaggtgtggaggtctcattagggtttgagcttgctgatttgtttccttctgttgagtttttctcaagaataagtcaaactaggcataagttattgaagcttcaacaaagatctgctaagatatttgataaaattattaaggaacatcaagagaagaaagctagtggaaatggtgatgatgatgatcaaggagatttgttggatgttcttttgaattttcataataataatggtggtgatcatgaaggattttccttgaccaatgagaatcttaaagctattatttgggtaagattttcttccattcatttcatgccatacttatcttaatttggtttt

SEQ ID NO: 196170 - DNA, 3414 bp, Cannabis indica
tttctattgttggtctttcttctaagtttcagcaaatgcccaaagcatagagttattacttggctcgcttcatggcagcggctcccaactagagatagacttgctcgctttgaaatatctactttaatagtgcttgtattgttttgatgagaatattgaaaaccattccctttttcttcatctgctgctattaggaaggttaaggatgacattggaaggtggttgggttggcaaatgaatctttatgatctaaatagcattttgagactaaaaaagaagaaaatctctcaagacaaaaggaaggtcatcatgagtgctatttttgctagtgtcagatatgaggtcttgacagatcataatgttgcgaccaatgaatatgccttgaataaatcctccctggttttgagcaattaaatctggaagtactgatttaagccttgcacaaatcagctttgtagcaaccttgtaaagtacattgcaatatgcaataggtcggtaatcactcaccagattgggacacttaatttttgggataagtgtcaagactgtgtggtgttgatttccttcaaaagctgacatgtgtggaggaaagaactaatagcatcatagatatctgccctaataagatcccaattgtccttaaaaaaggagctactataaccatccagccccggggatttattcccatgaattgagaaaatagctgctttaacttcatccaaggaaaatataaaaagtagtaattcagcttgcatacttgaaattataggacctttttttatgacagtaggcaaaacttattttctattagctaacttactgcctaacaaggtcatgtaataatcaagaaaagcatttgctacctcttgaggatcatccactcttattcccatagcattagcaatggaaaggactcctattttctactcttcgggtcctaatgcaattatggaagaaagttgaattagaatctccatcttttatccagctcaaattaaatttttgttggagaaaagagagatagtcattctgaatttttgcatattccttcctagcttctttttcctgatgctgaagttcaccatttaaggtatcaagttgcaatgcctgcaggtaagaattcaaagcttctttggctttaagagcagcagcaggaagatttgcaaaagcctacttgtttaaatctttgaaaattagcttaagtctcttcaatttagtaataatttgaaacatttttgcacctgatacatgttgtttacatgattcagcaaccaaattggtataattaggatgagaagaccacatcctaaagtacttaaaaggcttttttccacttgtgatagtatcataaactgttaaaattgctagtgaatggtcaaataagccttcattgagaagcaccactttagcagttgagtgtaaatcaagccatttctgatttgcaagaactctatctattttggaatagattctatcatctctcatttgcttgttactccatgtaaagaagttcccgtaaactttacatcttcaagttgacaagtttctacacaatccttgaagtcacctgaattattgaatctagcatgcttgccaatcctctaatatttgctgagaatcttgttaaactcaccaagcacaatccaagggtccaaaccagcaagatccataaggtctgtccacaaatcctccttccaacctcatcattgaaaccatagacaaaagtgacaaagaagcttgttttttttgtctatgttttcaacaaaaaggtggatgagttggcttgtacatttgacaatagtaataataaagctaataggattccaacaaacaataatccttcccccatcatgccatgcattattaaaagtaaaacaccatccaaaaaacattcttacatattaggtaccaaggttctgagacttatctctcgtctcaaggagaccaactagccctactttttcattttcaatcaattgcttgattgaaagtttcttttgttggctatcgatccctcagacattctatgacataattctatccattagcaagagagggaactgcctcctctcctgtgttaacttcttgatcttgtttctgcatactcacctcagtcccttctctaagggaactagtttcagcaacatcctctaaagcttgaaagtgattgttggtttgagcaggcttgatacctttgatttccttaggtttccagcctttcaagactggtttgaaaccatcttcatccactaatgcagtatttttcctttccattttagacttctgttctggttttttcacaatccatacatgttttccttcagtgtttgttcctacaatcagccgtgttatgtcccataccatggcagtgtccatacataattggcttccattcataggatattgacatcgtggtattgttaccattttcattctcaaaatctatagtctttagaaaatcctgctgcatttcaacttttatcaaaactctaggatagctgagtttgtctctattttttgtagcatcatccaccataataggctttccaacttgcccaatgatcttgaagagagattttttaccccaatatttcaagtcaaggtcatcataggaaccaccctaacatcctctttcttgaaattgattttgggatcccatggtttcagatcataattggccttctgctgaagaatatatatcctcctctaaggatctcatctctatcttcatttgagttaaaccttatgagaaaaataccataagaaagcattctaacccttttgtactttatcacttcacattctcctaacaaatccttctaagattgataatgggggattagcacccaacacatagcaaactatagaagggttccagaaatcgatttcttctttaatatcatcattaataatcttgactttgctacgagtagatgaattcgaaaatgaatttttcaggtttctcatcactgaaccaaatcgaagaacaggtggaacaaggaaattaccttgagaaatgctcctagagcatcggttcgaggcatctaggaagtgaacaaaatccttcctaatctcctcatgttgtttgatcaatcgcaatgaagatttgggtgaaaagggctcaggaattgcctcctggatttctggaagtaggttctgatcaagcacttctcgagaacgatactgctcttcttcttcagcatccgaaaaattaatggtttgattccaagaatggaatccatagatcttgttttcctcacatcagagctcgaattaggacctgtcttcttggacactatgctttgaatcaccttctcctgccctttggatctgtttttgccattgcaccagctcaagagctgtaagatagagagagagagagagagagagagagagagagagagagtagttacg

SEQ ID NO: 196171 - DNA, 1332 bp, Cannabis indica
ttttttttttttttgaagtaagaaaaaattattaccttcgagataaaattacggccatgagagaaataatcttaattctttttgaaaaaaatgagttttaagtattttcttcaatcataatacaattaatttaacatattcacaataatttatcttaatatttcacaaaaatgttaatattattttttgataaaaaaatgttaatgttattgaaatattaacaatatattcaatcttaatatttctttacacaacgttataagtttttaaacaatcacgttatattaccaaatgttcaatatataatcaaaaaaaattacataataaactaaaaatttaaaaaaaaaaattaaaaaaatacatcaacaccgaaaaaaatttattgttacgctttgaatttttttatttataaaaatacttctttaataaaaaaaataaacaatctttttattattttatagtttatttatagttgtgttattattataattatcatgaggttattttttgttgtttatagtttatttatagttgtcgtgaggttaatttttcattgttttttagtttttttttaccttttgctaagtaaaatgtatttttgtaattttacaaccatatttttataaataaaaattttaggttgtaaaattataataaaacataaagaaatgtatttttaaaaatttctcaataattaaatagctatattttgaactaactgaaatttataattagatgatatcattaaattaagtaaaatggttaggtaacaactatatatatgtatagctaaatcccataatctctactcaactacaagattagataaaattaaagatggcaccaacccaaatttctgaggaattagaagccagcctatttgccatgcaattagctggtacttcaatactccccatggttctcaaaaccgccttggagctcgacctcttggagatcatagctatggcaggtcccaacgcgttcctttccccttcggacatcgctgcacaacttccaacaaataaccctaatgcgtcgatgatgctagaccgaatgttgagactattggcaagctacaacgtgcttacttacttgcttcgtgataaagtcacaagcgatgggaaagtactagtggagagactgtatggtctggctccactcagcaaattcttgaccaagaatgaagatggagcctccattgctcctctttgtctcatggtccaagataaagtatttatggagagttggtacgtatacataactaattaatgagaaattaatttgtgaaaatattacatttagtttgatgtttaagattatatataatacatt

SEQ ID NO: 196172 - DNA, 693 bp, Cannabis indica
taaagttccttcagtgtggctttgactggtacccaactttgtttgcaagctgcatatctattgggccgtgggccccaatacaatagcctattgtccaatgaagaaagcccatgaagaatgattggcccaatatcaattgccacgcgtttaccacttaatacttaattgtaatgtagtagtagtaggtgtagcagtacaatacaataaatattatatatatacatgcattttgttattggagcaccaacaacatctatctatcaggtacaaaaaaatttgatgggtgtattgtatgtacctttaattgtaggccactaatattctcaaatgtcttttttataatataacaagtctttaagtaacgaatcaaatgccttattttatttttggtgtgaaaagaaaaaaattactaaaattcttattatacacccaaagagccaactgtggattcttttgtctgattctgatagtgacacgtgtattttcttgtgatcattttcaatgactgaagagattcgtcttgtcccttatcaattcaataggcaaaaaaaaaaaattatgggcatttggggcatcaattaattgatcaatcatacctaagaattttcttggtaccctttttttttattttccaaatttcaaataaaaatatcatcaataatctaagtaagtcattagcataaaatatcttat

SEQ ID NO: 196173 - DNA, 1142 bp, Cannabis indica
agagagagagagagtcgtacgagttagagagagataagtgaaaaatcaatcatattttttcttttaaaagtatcgctctattctcttatttttccaagttgtttgttatattaatatatatcatatatatacatatatatactgtgttatctcaaattttgtccccctgacgtggcatgtcaacatagtcaagactgaggacacgtagaatacaacttgtcaataacagggcaaagtctccttacacatcatgtcaactatgaagggttctgaagcagttcagcaaaactatcaagcaacaagcaaaaggagttaagcaactcgtcaagaccctaaacaaccatgtctggctgccaaggggagtacataggccgactagaagaagcttgtatggtcagtcagggtttgaacataagctcgcacgccaaagattaattcccaaaccaaaagggcctgttcgaccaaggatgcctgacctttgtaaggaaagttgtacaaagaagctagaaaggctggccaacacatactaaggttgactagcacatactaaggttgaccaaaacatactaaggttggccagcacataccaaggctgacaagcgcttaccaaggctggcaaacacataccaaggctggtaggcacataccaaggctggcaggcacttaccaaggctggaaggcacataccaaatctggcaggcacgtggaaaatctggtaggcacatagaaagctggcagatacatgccgaggctgtagggacaatacctggccagccataggtggtcataggccagctagaccctaaaaaataggctggccgaccaccttctgcatacaactcctaccaactgagcaaagttatgagacaggcacaatagcaccaaaaaataggggttttccctcgagatatcaatcttattttctaaggatttagttatccttttttgtaacttaaataatagataaaaagattatatatccccattttaaagagatgtctttacctacttgcattagatcttttgtaagccctaccctatataaagggcattaggtctctctaaaaacctaagtcattccaagtcactccacttgcatagcaaggccttagctacacatgaaagcctctctctctctctct

SEQ ID NO: 196174 - DNA, 2123 bp, Cannabis indica
ttgtcattgtgtaggtaatcaacttaaaatggtacacagttatcatatataaattgtagaaggattttttagttgaagaagataacctgtcagggctaatggttttcctaaaaccctcatacaccctatgaccttgcaatgctctagccatgttgccatcatatgagtaaacaaacacatcactttccaatgccacaacatagtctatagcagcaagcttattctgtgaattcatgaaaggcattaactcttcctctgttgctaagctgagcttagtagacaaattaggaaacttttgtttaagcgattgcataccgtctttaccataaatttcaccagaaactatgtaaatttgtgtatcagatggatatccaagggccataagaaatatggccacttctcttggtgtcatgggacaattcccatggagtctttggaccttagcattgatcttcttttctttccaatgctttgtctcatacctcatttttgtaagctcttcatgctcatttatggtaagcttgtggctgcagcctgtgaaagctagcatatccttttcatatctacaataaaacaataacaacaaacagatttgatagttttaaggctttatatatatagatatatgagttaattatcattatagtgacactagtttttgattaaaaaaacacaccttaaatgtaaagcaatgtaaggatttttattccttcttaatctttcaactaagatcctcccaagttcttcgatatcttttctaaactttaatgcatcatacattgcccgacatcgaagcctttgagtagaaaattgtacattgttagctagcctcgaattcgtttgcagaaactttatcactttctctctctttattagttgtttttcacgcatttccctatagtaagagagctgaaaaaaaaaataaggtttacgtacgtatcaatatgtgtaatttaatcattcatgtcatcgaaaaataaattaatgattgaacacacattaataaaatgtcatatatatatacatatgtttacctttgaccaagaaactggatttttagtaaggggcttgactgattcatattccggtggaagtgagtctataattgttatatcatcctttaaaacttcaacaaacttctcccagtcaaagatttccttaaagtcactggaaccatcaaaattcaaagtagtgaattagtagatattcttaatcaaattagcatttgtatttgaacttataattagttaaaaaaaaggttatgaaatatcaagctaaccttgaatcattccaataggaactatgatctaaagtaggcatgactaaggttgcattcataacttttgctattgcaaccatgtcacttatctacaatgattgttaaatttcccaagattaagaaaaccccaaataaaaattgaaagtactaaataataattactattacttatatatacaatatagaaaaaaaaaaaaaaaaaaaaaaaaaacaatacatacatattaccccaagtttcatttgattcaaacccccattggcatgagctagaataaagccatctgttgctgttccattctctacaattataataacaaacaacaacaataattaatgataatatatgacatacatttcataaatgtatgtataaatagtttatttagtagaactacttactggcttccttctttgatcgattgacacatttctgaaatttatcactccttggtggcttccaaatttcaagatcctggtacggccgatactgaaaatatatatgaaaaaaaaaacatttcactcatcaaaactaacatggtaacaattatttaaaatatataatataaaaaattatttaaatataggttccccaacaaattcggtttcatatatttattattattattattaccattttattatgaaataaatttgattggaaggtggaagtagtatgttgaaaggtggtggtagtagtggttgtggtggtaacttggagaatatttagaggagttgtggtggtgttgccgttggtgtaactgtaaggaggtgggagcatgaccactaatacatgaaataagacgatgatcgatatgaatgagaccaaagctacgacaccaacaac

SEQ ID NO: 196175 - DNA, 565 bp, Cannabis indica
gaagggaatttgtatatataatcgtgtttgtacatctttgttatgccacttggggagtgagtgactgctagtattatttgacgattaaattcaatgatgtatggtattaactacgtacataaattgtaaataattaattgtttgttataaacagtttgatcatcaattataacaagcacacacatggggtaattgctcttagctagtttcacaaatgtgatgcgagtttggccttctcttttcttttcttcatgacaaagcacaagactatgaaatactaagtgttgtaaattacaagttttttataatatggtcatgtattggataaattcataaagtttcatcttaacaatgagcccattgaagactttccaactactacaataagattgtaaatggctaatggaataaattctgtactttcattttcacaattgtttttaggaaaatcgactctttaaagatcattattatatatacaacattgtctaacgcaggaattatcatcattctcataattgtcaaaattttatcaattgagttgagatggtcattttattttttt

SEQ ID NO: 196176 - DNA, 681 bp, Cannabis indica
aaaataattttataatttggggaatatataatggaatatattcatttcgtaaaagataaaaaatgaatattttactaattgtgactcacatttccggtctttttatgggataacttagaagaagctggatttaagcataagtggaaagattgcttggctaatgtatcttagattcttatcttaatgtatcttttttacatgtctttagaaatagaaatgtaatagctcataatttagatagagaaataaaattagaaagcaaaaatttaattagaaaccagtgaatctctcgaaagaacacatataattattatcctttcctgtgctgaaaggatgctcatataattgatcttttatttattaatttatcatttatcatttatcatttatcatctataattcatgtttatcgtttggtactctaacaatcctatatgaatataataaattatatcaacatcaacataatttgtctaacaaaaagatgacatatataatcaattattatgtctatgacttcaccagttcgccacaaaactagctacaacaacaaaaatattattaggttaatcctttaattaaccgttatctttgacacgttgtcttcttctaaaataaagtcacggagagagaacaaaagttttcacaagaagacaattcctacaattaacaaatataaaa

SEQ ID NO: 196177 - DNA, 524 bp, Cannabis indica
agaccaactcggccatttcaacttgatgttatgtattgatgatgtatattaaaaaaactagaataagtttttcaatatgcttatcacattgttttgagaaataaaaatctaataaggatgacttttgaccatagtcaaaagaaacaattttttgtattagaaagaaacagaataaatgtaatagtaattaaggatatggtttgtagaaacgagataggataggatgaatgaaaagtttataacctttattttttttaatgttgtttggtactacaagtaaaattgaatcaatatatggagagaaaattaattgttaaaattattataatatttgttaccacaattttgggattttgtatatttatttcatttttttcttaaattaatttcaaaattaaaaatttgaattttcaggatttagaaagtaaaggtcattctcggctcttcctcgtctgaaattgataaagcgaagagttttgcaatgtaaggtcaccgagaacaatgattattctaaggtagaatgt

SEQ ID NO: 196178 - DNA, 821 bp, Cannabis indica
aaaagctccgtgattctcgccaatggagactccaacttcagccgaaaaatcctccacaaatgagccagctgtgaccatgacagctcttccttctgaacctgtcattcctgcaccaaacactatttcttcaccttttcaaagccttgcacccctcactattaaacttgacagaactaactatccctattggaaatcacaagtgctccctgctcttagagcatatgatcttgaaggatatatactaggcactaaactctgccctccacagtttgtcgacaacaccattggaggctccattcccggtgaatcacggcaaatcaaccttgggtacgctatgtggcgacgcacagaccaatcgatcctaagctggttactaaactccatctctgaatctatgtttggacatgttgttggctgccaatcgtctcatgaactctgggtcatccttgaccgactttacaccaccagctccaaagcaagaatcctacaacttcgtttccaacttcagtctactaaaaaaagggaagtctcactatacatgactatattctcaaaatgaaaaatatttctgacggtctctctgctgcaggacaacttctttcagatgatgacttgattctgtacatcttgggaggactaggtcatgaatatgaatctgtggtggtcaatttaacctctagacatgactccatcacattgcaggaagtacaatatatgctacaaagccatgaaattcgtctggaacaacacaacagcaccatggtgacttatccactgccaatcttgccgctcaaatgcgaaggaatctcacacttggaggt

SEQ ID NO: 196179 - DNA, 871 bp, Cannabis indica
tattattttcctattacgctagtctagataactcgatatggaaataacgatttcataatatttatacatatatttgtttgctagagaataatatttctaagaatattaccaatttgtaatggtatctaaaataaaaataataataataaatatattatggatatcagtagtgttttttttttaaagccaatataaaatatataaaagaaaattgtgagagtattgatatattattaggcggtaatatttgatcatggaacgtatggaggtggttattgtccaattttagtggagtttgttatagtatattcatttgataagataattaaggtatatatatttatagtaaataaaattcaaatgtttaaaatatttggagtcctatgtgtgtggcacttgattatgaaacagttagttatgcataggtatatgatggcctacgtgtatatatgaaaggcaatgagagaatattaaggatttttatcaattgaccttgtattatgtatgttgaggttagttttggtcttaggtcatacatggagagttatgtgggttagtcagtatagtgataatatattaaacttagttaactcagtgaggtgtatacgtgagcttattattctcaattacatgagctaatcaggtctatattgaccagttcttaaccgattatagcttgagaataatttagaaaaatctatgtgttattatctaggaatttttattagttttatattactagggttgatgtgattggttaagatgatgagttcatgagctataaatagagccttaattcttcacttatttcctcactcaagtagccaaattatttttctcttgaagctttcttcctccctcccacacacca

SEQ ID NO: 196180 - DNA, 790 bp, Cannabis indica
ctctctctctcaatttcacctaaaacagaatgcaatcacatatatattattgtttccaatatatttttactggacataaaagtttaatttaaatttattatttaaatctctctaaattaaatattatttatttttgatttatttatttccttccgaactcataatataatacttaatataaaacatagtatacgtgcatcgcacgtaacaatatactagtatatatatatacattttaagtttaatttaattatatttttattcatattttttatcctatttttatttttatatttttattttttttcaagtaaaaaccacctaagtaaataaataaataatagcaatctacagtgagctaattacagaaaaaggtgaagtggttgtcgtaaagaagtaaaattaataagtgggatataattattaattattatggtctagtggctttacatattttcttaaaaaagaataaaaacagtcttaattcaaactttctatttctaatataaaaaacaaaaaatacaaaaattattttaaaaataattaatattttttatttcgaaaatttgaaaataataattgaaagaatatatttgtaattcatatttcatcgtgttataaaccgtagattcataaatgaatgtgacaaaaaaaatatatagagaaataactttttaatgcaaaatgcaacagttctctttttgacaaaataatattatactattatttagtttatgctaataaaaataaaattactattcatgaatattgaatgtatcatataagacat

SEQ ID NO: 196181 - DNA, 3039 bp, Cannabis indica
catgggaaaaattaggctctcaacgaccctgtgtcccaacactcctcaaagtatgtttaagtactgcatctttgttgcagtagattatccaacaacacacaacgacataatgggacgcccaacattggtggattttggagctgtaacttcaatcaggaacttgtgcctcaagttccttacctattttgtgggagtgggaactgttcgagcaaaccacagggaagctaggaaatgatacaatgtagcccaccaagcaagttgtcctcatagtccaacacataaaagaagagaacctaatggaaatacatgatgaatcggatccctgagtaggagttgagaccacttttgaacccatggaagaagtggaagaaattaaaatttgtgattaggatccaaccagggtaattcgagttgggaaaggccttaatcatgaaaaaggaataaaattgtggagaccattaaagagtcagtagatgtctttgcatggactcacggagacatgacctgtattagtccaaacgtaattacccatgttttgaatgtcaacaaagacatgcccgccatatagcagaaaatacatcctcttgacccagtcaaatctaaagctttaaagtaagaagtggaaaaattattgtataatatctttataaggcgtgtctattattcagagtggttggctaatccagtactagtgccaaaaccaaataggacatggcgagtgtgcatagacttcattgatttgaacaaagcatgccccaaggattgctttccatttctaaggattgaccaaatggtagatgccacatctagctacgagttgctagcatttatggatgcctactcatgctacaaccaaataaagatgcatgtggttgaccaggaatgcaccaacttttggatagataaaggggtataatgttaccttgtcatgccctttcagctccaaaatgcgggagcaacctaccaatggttagtcaatcgaatgtttaaaaacctgttaggaagaaatatagaagtttatgttgatgatatgcttgtcaaatccaaaataagtaagaaccattctgatgatcttcaagagtgttttggggtggtaagagaatacgagatgaaactcaaccccaaaaagtgtactttcgaggttaagtcaagaaaaattttaggattcataataagtcagcgagggatagaggctaaaccttaaatgatacaagctctgctcgagatgtcgtctctgaagaaacacaaggatgtttaaagcctgacaggaaagatagcagccttgagtcactttatttcccggtcaattaacaaatatatcccattcttcaatatattgaagaaaattcaaaagtttgaatggaccgatgaatgtgaggaagcattcaaaaaattgaaggagcatatggccaagtctctagttctatacaaacgtatctaggagaggatctttgattatacttggacatctccaaaaatgcaattagtgcagctctggtccagaaggaaggaaaagtctagcaccctatctattacatcaataagagaatgataggggcagaggtccggtatcttttgatagaaaatttggccttctgtctactgatagcttctcgaaagctaggaccctatttccaagcacacctaatcaaggacttgacctaccatccattacgattctcaagtgggccatggagcttagttagttttacatccagtatgtcccacacatcgtaattaaggggcggggcctagtagacttcatcgcagaatgtaaagaaactgaagtaactgctcatgaacccaaaatgattgcccctgcctagaaagtgtatgtggacggggcctcaaataagcatggattgggagcagggatagtgatggtatttcttgaaggcttgaggcttcaaactgctttgcgatttaaatttctagcctataacaatgaggcaaagtaggaagccttattggcagggttgagattgtcaaaagtggttggggcccaaaaaatagagcttttaagtgactcccagttggttgttaaccaagtgcttggggaataccaaactcgcaaagaaaggatggcttcttatgtcgttgttgtaagagaactgctccaggcattcaaaagttacaagattgagcaatcctaagagaaaagaatgcccatgcagacttcttagcaaagttagcttcaaaaaaaaaaaaagtagaaagattggggggctgcccattgagtaccttctgaatcctagcatcctagccaaggtagaggttgcagtcaccaaccaagaacctagttggatggaccctattaacgtttatttggctaagggagaacgaccctaagacagggctgcttcctggaaggttcaataccaaactcctcgatacctcatgattgatggcattttataccaaagtggtttgagtatgccctacctgaggtgtgtctttaatcccaaagctaaacaaataatgaaagaagttcatgaagggttctgcagggaccacactggaggttccaacctatctaaaaagatcttaagataaggatatttttcgcccactatgaagaaagactgcattgattatgtccaaaagtgcgatccatgccaaatatttgtaaatatcaaagggcccctccgaatgagatcacattaatgacaagcccatggccatttacagtgtgggagattgatttgattgggtctctcccaaagggaaaaggtagagtcaaacatgctatagtcgtagtggactatttcacaaaatgtatagaagcaaaaccaatgaatttgatcactgcaaagaaaaacctagactttgtagtaaaaaaacattgactgtcgatacgggctacctcacaagatagtctcggacaataaaaagtaatttgatagtgatatattcacggagttctgcgagaaatacagagtcgtgaaaagtttctttgcagttgcaagaccacaagcaaatggtcaagaaaaagactgtgaataagatattgaaagtcacgctcaagaagaaagcttctgg

SEQ ID NO: 196182 - DNA, 1195 bp, Cannabis indica
cttaaatgatcattactgtagcgctgctgttcgggggttgtgccgtcagactttattgcgtgttacagtcccaacacgcttcctcccatgcagcattaaatgcgacttgatttctcgggagagacctgacacatcccggagagccttcatgctatactagcttcctggagtaccttgtactccgggtgtctcctccgggacccatgctaatagcgcttcctggtggcataaaaagacttagcaaatctttccaagttatctgatccacgtgtcccctctcgactggtccacgtattttgggcgaattttggagcaacaagttacaataccacttgttttcgatcgtgaaactattttaaaattttttgaaaattaaaaaaaaattagactgaaaagttaatattatataatagttattaaactaaattttatgaattactgatagtgaattataccaataataatatgacaactcaagtatcatactttttaatatttctcttttttaaactatatttgttttgtttcgatgaccactaataatattgtagggtagtgtgatacctctttacatgacaattaaatttggaggagttaccattttctattacaatttctttctcaatttttttgtttaaaaatacatgttagaatattttttttttgtatgacaatatttactacaagaaatgtcacttttactagcagagtttgctactacgctgacaaaaaagtcaaagttttaccagcgcacatttgtagtggctaaatctaacttttaccagcgcatttacgcactgagaaaagtcatttttgccaggacttttcattttgtgttggcaaaagttctaataccaacgttgatttgccaacctcttttgccaacacatcataagtaaattctattttaccaatgcaataccaaacttttgtcagcacaaaaatatgctagcaaaagtaacatttcttgtagtgatttgttatggttacagtattaaccctataaatttttaaagttttttttttttgaatagtttatagtatcgaaaataaaattttcgatatttaaatttaccacgcgtgttcagaaaactccaaaccttatcaacactaaaatatttgaaaattttcaaattttataagaatgattttttagtctataacaaatactgccataaaaaatttttaaaaaaaa

SEQ ID NO: 196183 - DNA, 1787 bp, Cannabis indica
gccatcgctgaagagcgatgggtgctatctcttttatggattcatgcacagtgaaatgttggaggaaccagtgtacaagttgctagtgagagcacttaccaagatgttctctattctagtattttggtagaagagctaactccaaattctcattgtactcgcaaggcttatattcaccgttattatgatcttgtaacttggtacaaaccttttcagttgggcccaagcatgcttgttgcatgatctttgctgtcaaggaatactcttcaaggagtaagtctcttacgaagaatttctttccccaatctgtttgtttaagggcctagtaatctttgttggtggacatgctactttgagttggcttggtctcttctttttcccatttttaaagggattcttctagaaatatgtcatttacttcttagtcacaatacaccaaaagtgtgagagtagactgttggtggatcgggctagccagggtactgaccaggtggtctgccacgttagagttttgcctggccatttggaggaggctatggcccgccagcctgtaggggtagtggccgaccagattgttggttctatggccggccatcctgctatggccatggtcagccagccctttagaggccaagtcaatgctgtagtttgatccaatctacactcgattggctttgcccctggcatgattgtcatagagcctttatgaactcttgtcaatagctattcaacttctttcttggtaacgcttcttagaggttgtattgggataccatgtctattatgctgtgcaggattggacaccctgcagccatccccttaatccctgctttctggtaaggtttttgtgtggaggtatgttgctgtaggtgtactcatgttggttgtccatcacgtctatactcttttaaaaataaggatgcttagttctttgaagaactgagcgggtaccaagttttccttagttatcaaggcgcaactagctagttaagcgagagtgtcggctattacatcctctttggagacttgccttttagtgcagcttttgagctgacaagtcttaatattagcttaagtaggacatgacctacgactagttgagagtcgtggtgtatgtctaggtgtttagcccacgcttttggtgctagcctaaggctagcaattagagcttcatatttagccttgttattagaagctttgagtctaacttttgttgtctcgtgcacccacttcccctagatgctttaagggctaggcatgcatcatgcaggtggttaatccactttctaggttgagttctcttgctcttgctcttgcttgttctttggctctttcgtttctcccaaatcttgagagatttggggagatatgcttttatatttagccatgaagctggcaagagcttagccatttatggtcaagctaggttgacaggtggccatatattggccgagcctcagtggtccacttgagcgatcgaccaagtgctttaggttttgatgaaacctgtcactgtgggagttttagtaggagagggaagcatgtgcacttctcctccttgtcccttagacttcatggcataagggaaacgttaaatttcccttttttccattatgttggtcagagtcatcattgttgcactttcctccactattctcattgttggagaattggcaaagatcatctggactggtcgacacgtcagatagtacttagggcactatgataccttgtgtctgttcaacattgttctgtcctcttgtctgggcttaccgaacaacttcttc

SEQ ID NO: 196184 - DNA, 818 bp, Cannabis indica
aaatagttccacccaattgctttgttaagtgttatttttccaagaaaaaaaaacaaacgattacaagagacaaaaacttagaagctgtagtaaattaaaaaaaccaaacagcatctaaacatgattgtttctacagttgacaaaaccaccctctttccccccaatcatcatcatcatcatcatcatcctgttcataaacacagtacaatgcttttttttgcttacaacctaaacttttgcataagagaaagaaaacccaattttggatataaagcacaaactttttcatccccacatccttgaaaacaaataatagacaagaacatgggaaatccaactgttctagagaatctatacatattccaacccccatccctccctccctcaattttcataccagggtattaaattcaacaacagagcatcaaaataaagctctaggaagaaaaaaagaaaaaggcaaaatccataagaatttaagaaagagaaaaggaaagaaaaaaaaaatgtagaaagacaaaggaaggaaggaagggcctgctaactagttatatcccaaaccagtaaacatgtaatatgggacaaaaccatataaaatctacagacaactaaaacttacccccaacaatgctatgcccttcatatactcaacattattactgtccggtgttgctaattaccatatcactagtagtagtagaagagcaaaagatatgcaaacaagtttgctgctcaaacaacgtgtgcacgtatcggatattctctgtttgtttgtttttttttcactttttaaagtacagtatctcagttcttccaca

SEQ ID NO: 196185 - DNA, 1228 bp, Cannabis indica
agttcaaaacttcaaattggaatttaattttcaataaaaccccaaatggacgagtgaaaatggattttgtaaggttaaaatttgaggcgcagttagacaatcagacgtcatggttgaatacaatcaaaattcctaaactttaaacctaggaattctatagttaacctagaacggttcaagaacaggcgagattcatagcaagaaacccagaaaattaacatgtatttcattgaaaatatgtaaaagaaagaaatgaacaacatacccattggcttgaagcttcttgttctgctcaaatggtgtcataaagagttttcttgcaaatccttcgaagaatttgagagaaatattcgtctggaaactttttgctatggtttttcaagagtaagaattgctaaaaggtcactaaaggctcctattcctatatataagcagtcgaaaaagggaattaatcatttcaaaattcaagttcctcgaattctccccaaaaatttacgttatgtactcattccaatagagtaaccgtcaacacgcccagacatcaaattgtgattcgaggcagaattgtcaattagaattaaatgagccaaaattgaagagaccactagtcaaggttactatagttcatcatccgacacctaggaaacgcgtcacccatccggacaagactccaggctgagtgaagtcctcgtgcgactaggaaggtctcgcgtagacttggggggcaaatgttatcccattttttgaaccttgacgtggcaatagaattgaatgatacatgtaccatattttgtatacctaggcggaggtatttattcctagcagcctataaatgactaatcaacatctataatagtcggttatccgagcaaggttgttgagaagatatccaaccaggtacgaacatgtttatgccaagaaacgtacaagagatggtgacttcaaagactaatctcattggattgagtcaaaggaaatggcaacttgtcctcgttcctatttcatatattgtaattatagaatcattgtaatttcttattttatgcattgtaagcaaaagggaaaccatccctcatgcattaagtctttataaatagttacctggcttcactatgaaggggatcgagagaattgctgctgaaaaatattctagaatgaaaaaagtggtctaacagagaaacataatcagagatcaattgtaagatctttcaagaggaagaacactttg

SEQ ID NO: 196186 - DNA, 868 bp, Cannabis indica
tgttccactgttgttttttagttattttggttctttttatttttgatgtcttctcctgcatgttatcttgttgtgccttagctccccacatttgttgcatttgttatgtttatttttttttttcagccagcttccatccttttttttttgtcttctagatttcacattttcaatgggagacaagactattacgtttttcacattttctggtacatcctactcactttggtatcccattgtgtatggtgttccttcatgagttgctagtcaatttttcttagtgtagtaatctaaacagagcttgtgtatagaaaagtaacttgtccatttctgattatgttgacaagatcaaatctgtgtgtgactctttggccattgctagacatcctgttactgattttgatctaattttacacctgcttaatggacttggtcccgagtttgattctgttgtgtccattatcacttctcaaagtgaaactctttcactgaagaagtttaggctctcttgatgtctcatgagtcaagattagaaagacactctattgtcttggatctttcaacaaaaatggcagctaatcttaccttgggatcaagaaatggaacatacaaacctttcaatggtttaggaagaggtcaaggatctgaaaatgcaccaagatttccaatcgtggaaatggacctctacttgtcaacaacagacctctttgtcaagtttgcatgagatttgggcacactcgtgcaacttgtctctataagtttgatagaaactgggttactccaaaggcgtctactcctcagcctcaagctaatcttacagagaaatctctcaattatgatcctcaagcttttgtggctcaaacagtgc

SEQ ID NO: 196187 - DNA, 631 bp, Cannabis indica
ttaaaaaataaaatttatttcccaataatttttctaggctctattgttgcgccagcaaaggattttttctttccatacgctcttgggggtggcgcctgtatggtttttctgagttgcacaattgtggacgttggaagatgctaaaaaatttatctgtgatacttttgtaggcattgtatgagatttttacaggcgctaaattgtacttggaaaagcgttaatccttaatgtaaaagtaacttttttttgtagtgctactatataactttcatattcatttttcaaacagattgtgataagtgtttatttttgttttgtgttattgacgaaaattgttacacttaaaaataagatttatattttttacactaaaacacatcaaatcttatttgattgaaaaaaaaaatcttaaaattaaaataattaatgattattatataaactttgcaatactggattttcattaaattattattatttataataaattaataaatggtattctaattttaaaggtattttcttgcattttctgtttgtattcatatatattcgtattaatatatacagtcttaatttcctaatatattcacagtcgtataacatagagggttgagatgcaaaatgaccc

SEQ ID NO: 196188 - DNA, 774 bp, Cannabis indica
atattaaattagtatacgctcataaagtattagtgttagatatctgatctaatttaatatttttctcttaatttgataaaatctaattagtaattgtatttaaaaaaattatcatccgaactaatttaattagagctcaaaaatctaattcaatctaaaaactagttgaattaaatcagttttttaattaaatatatgattactaccttatttttaatataataactcaaaaatattaaaaatattaaatattacaatttatttaaatttaatagaccataaaaatattacaatgtgaccatgaatcgttctgaggcgatcgatgtgtggtcttagcatggttgctgcttggaaagtgcatgggcagctccctcctgaatgggctgaggctcttgcacttcatcatgccatatctcactgtctgtccttaatttggtatccacaacattcagttcaagtcaaattgtcaaggattgatccacaaactcaatttgtccataattttagatactattttcggattaattcttattagagctttatgtgataagtttaatattgtgagttttattttttgctcatctagtagttgattctcttgctaaatttatttttcaggttactttttgtacaatctagtagcttgagtatttttcttgtatttaattaggacattattttggcagcctttctttaatgaagttccttcctcatcctttctgagcgtcttcctgcttggtggtgtttttggggtaatttttttttttttgaaaa

SEQ ID NO: 196189 - DNA, 749 bp, Cannabis indica
ttttaaactggttatggcatatattcaactaaagataaatttttgttctgttcgacctaatctcactttatttcacatataacaagtacctgttgtgacatcatggaatgatcttacaatattcatttaaataaatttacatacaaattgtattggaaagaagttaagaggattgttgagacatagatacagagaagattaggggcaggtgcagtagtagcagtgggtataagatgacatgggattaattttagaatgggcggtgtggcggtgggatttcaattgtagacataattattataagtatagagcatagagtaggtgtggagtgggcacatgaaattgcagcaaaaaaggtgactgatttgacattcatttcattacgaaattttatcaagcacttgatgggttggatcgatgtgcatactcatgtcaatgtgggtctcttattctattcgttctattatcctcccttcaatatttaaatcgtacttctttgctatttagaatttttgcttttcttgtgaaaaacaaaaaagattttttatttttctaattatgaattattattgtttatttattaagctccttttatttttcttcttcaaattatctacaataagtttgatttgtaagaaaagataagaatagaaacgggaatgtggataaaaatacaaattaaatgaaataaaattgaaaatgtataacttttttttaacatcttagaatgaaattagtttttttttttt

SEQ ID NO: 196190 - DNA, 1467 bp, Cannabis indica
atatttgataaacctccactcacgtttacgctaggaaatggtatagaaagcctaaggatgggggcagtagaggataactcctcagggtaatttctgctatgtggggtttgtttgggtatagctgaggtgtattataaacctctggagtcaagctataaataagaatgaatttcctttagtgggttttgtcaagtattttgtaatagcaaagaggagagtacaagctctcgaatacctgaggatttcatcaatataattttttttttcacttttcttctcttcatttcacatttattttactggtttgactaatttgataggataatcctatcaatattaccttgcagtccatttaaagctttggtgaaaatattctctaatcgttgtccagtcttcacaaacaaaatgacagttaatgtcaatgtattttgtttgctcatggaacaagtgatttgaggcaatatgaatggtgacttaattattacacactacaattttactagaaatgaagtcataaattttactttagtcaaaataaatcaacactatctcacacacaaattgtgtaataaagtagttcatgtgattttgtttctttccaagataaaaagctttgcaaacatcatacatatgagatagattgtctttttcataaaataaaaattccaagcaatccattagttctttgaccaatttacaataattgatcaaactaattacctcattatcaatagaatttcaaatttgaagaagcaagcaagcattctctcgtagttacatttttcttgaatcatcttgttctttaggaggatcatcaaccaagtgatcatctttgtcaatacttagataaattcgaatcgtcttactccattttaaataattcgaaccaatcaatttatggtttgtaatttcagacatcacaggaaccacatcaaaaacaaccactggtgttggatttgatttgtctctaccataacctcaaaagaaaatatcggaagagacaagatataaacgaacaacaaacaagaagtaaagaacacccaaataaaaagaagggagaaataccaaaccacaacctgagacaaatgcgactaggactaaaggggtcgaaaacgaaccagagactaattaccacccgaaaaaccgtcggacgtgcctacacatgtcgtcgcgtgggatgggtggtagcaacaacgggcggtgcgtgaggtacacgcgcaagggatccaacgatcggacttcgggggtttgtagattagtggctgggtaatcaatctgagtgggtggtgataacaaagacttacttcaactagggttttcaagaaaaggaatcctaaggacaaagaagaacaaagccttaaaccgaaacccaattttttgagatgaactaagtcctaatttttgaactctaatctcaaaccagctctgacaccatgttgtaatgtaaaaacaacttgatttgatttt

SEQ ID NO: 196191 - DNA, 1437 bp, Cannabis indica
ataaaatatgtacaagacccaattggtttgtgttagcggccaacgatgcctaccataaaaaataaagaaaataaactctcctcgttgcatgcatggcggcagacaggcgctgaacactgtatcttccattccacgcgatgatcaagccttttttctatacactgctttgaagtttgtaagacccaacccctaaaagaaccactcatttttcaacttttaatcaaatatgctacaacatttctaatttctttatattttaaacgcttgtcttattcttttttaattttttttctttcgagcttccctatgagttaaccgcatgaaccccactttcacacacacacacacatatatatatatatttatatatatatatatatatattttatgtatcggaaaatgaactgaaaaagaaagagattgttgggcaaccctagctagctttgacttggttttgacatttttggacttagtatggacagatccctctatatatatataaattaatggccatatccttccatccacattttcctctctttagttgtcaggaaacaacatacttaacaagaaaagtagcagaaaattatggaggtgtctataagatttgctagctctctatttgtattaattatgttatatgtaagatattccagtggacaatcatatccaggtataaatttatgtttatattaatttctcttgacactaattaatattaattattcctttgttttttcaatagttataaatttagcttgatttcaattcttctcaactatttgtagccgcttcaaacataaaattattgggttatgtaagaagtacttgtactacaattggagttgctgggccagaagagtctccaatgcattttgaaaaggtatatattatactaatttgttgaatattgttcatttttatcattaatatattattttttttatcttctataaatatcatataacaacacatttttttaaaacatatctatggtttaatttaacaggaaattactttcaataatggtgttcctagtgcacctgatgatcatgaattcgaaaataaaatgaatggaggaaggaaaatgatgatacagtctaaaaagaatatggaattagttttcttagacgaagaagataggcaaggaattttaaagccaaaaattagtaccagtcatcgtcggttgaaggccaaaagggctgatgttatagctttcaattctgattatcatgttcctagacctcatccaccaaaaaacaactaaattaaaaggattcaggagagagtatagtagtgtttaagctgtactagctagtcatgtagagtgtggtgaagtcccctggccttttgtttttatgattatatttctttactagtttataagcttcttaagttatattataatttggcttatatatatatgttttccttaat

SEQ ID NO: 196192 - DNA, 539 bp, Cannabis indica
ttaataaacaactttcttattaactaatttacataacgctcctgatctcattaaataaccataaatttcattaattggttaattataacttgctttttcaaaataaatcctttcattccatcaacaaaatacacaaattagtagtttatttaagataaattattaatttatacgtaatatgacttttttttcaatagtaagaaatatgatttttgtttccaaatatcattatcaaatcatttctttgttgaaaaatttcatttaactttgggaattccgttcaaatttgactaacatagatttgatgtgacattgtcaagtgatgatacatcaatacattaatattagggagtacttcgttgataaagatacaaaaataacaaaaaataagaataaaaataagttattaagattttaactattttataaaaaatatagtttttttttttttttttgtatttttatgttataattttattaatttattattatttgtatgtaatttttaattgttaatttgatgttgtttaaatgttatt

SEQ ID NO: 196193 - DNA, 2126 bp, Cannabis indica
cattatgataatatttagataattgacaacaaattaggaaaatattagtttttactaaaatttgcataagtacacacatatatggttatatagtacaactaactaaccagcaaattatacaaaccctttttacaagttttctatttttttttgggcacattacaaacagctgcagtcaaactatataacagaagtataacactcagtaataactctcattaaatgccctttattggagtttttatgtttatttattttagcttaaatgtcaaagccaaggagagttatataggggtgtgacgacggacttaacctgaagatacttatgaagagcatccaagcccaagtcctttccaaacccactcattttgtatccaccaaaagggcaatcgtcattgaaagcaaagtaacaattgatccatatggtacccgcccttattgatctcgaaactgtattcgctatatccaagtttttagtcaaaactcctgctgccagcccatatctactattgttggcacactttatagcctcatccatgctcctatacatatatatttattggcaattagaatattaattaattaataaactaataaaatttgaaagtatagaagaaaattgttacttgaatttcatcagtgccataacaggtccaaatatctcgtcttttacaatcagcatctcctcctgatcgtcatgaaatattacttaattagatgattttatacattataatagtactgttagctaaatgaactaaatgaacaaacttaccgtaacattggtgaaaatggtaggctcaatgtaatatcccttgtctcctattggcttaccaccagttaataaagtggccccttctctcttgccatgctcaatgtatctcagaattttatcaaactgagttttgtcaacctgaaaccaattaaagaatgcgaaattgtgaagttaattaatgattattaatactataatatttttcattttttttttctcttttttcacttcggcgcgaaattcggtgggcggaggcgcttgtcgtgaaggaagctttgctgaactcagcgttttaaacgagctgaagtagaatctgatgattatagtttggtggttattacttattaatgctctttgatttgtgttctgattttggttttattattgaggattgcaaaattttgtaggtttcttttagtttagtttttacattttgtgatttttagtttttacattttgttaagcaacctgtaaattaaactgcggatttctttggtagattattaaagtttgtctgcgattgcatgaattgatttgattcaaatatatataaactgtttgttttttaataatttttttgttggtattttcggctacaatatttacaatggtgaaagtatacattattaataaatgagttttttttatcttgttttagaaaattacattatacacaatgcattatctttaagatcgatcagtatatatacctggggtccttgacgaacttgaggatcaaaagggtcgcccacggaccaagctttagccttctctactaatttgttcaccaattcatcgtaaatcccttcttgaacataaacacgagaacttgccacacatatttctccctttaattataaaatgaaaattaatattagttaaagcaaacaaaagatcatatacaaaatatatagtataattgtatgcaagtgtaagtgatgaaattaataccttgttaaataggattcctacaagagcaagctcagaagccatttctaaatcagcatcatcaaaaataatgagcggtgacttgcctcctaattctagtgataccggtttcaagttgcttgctgctgctgccttcattacttcacgcccaatctctccagacccagtaaaactcacctataaaaatatacagtatattcatcatcatgaaaccatcattaattaatcaattaatatgtgtagttatgttttaccttgtcaatatccatatgagaactaatggcagcacctgcagtatgtccatatccatttaccacattgagcaccccatctgggatacctgcctatataataatggtattcacatgatacattaatattattactataatacttattaaaa

SEQ ID NO: 196194 - DNA, 1070 bp, Cannabis indica
catagcaagttaaggttatctttattaaagttggtaagctactaaactcttattcttaataatttaaaaatgttatatgagtaatattttagatattatctgtagtgaagtaggttctgcgaataaatatactgcggtcggatgggtggaatatatatgcatgttagaggagttttaatatcttaaatattcatccatagtgatagtgttttagctatataattggtaattaaaattattttgtgcagtaaaatacacacataatgtcgatagacaagagttggattaacaattcaaatcgattgtctaatgattatgaaagtggggctttggcttttgttgagagagctaggcaattcgtagactcgaggggattggtgaaatatccttgtaataagtgtgtgaacgtcgaatttcaaacgattgatgtcttagaaagtcatctctttgtaaatggcttcttacggagttataccaattggaattggcacggtgaagaggaaataataccaacaagaaccgcagatgtaatagaggaagatgagatgatagatattgttagtgacattatgcaacatgccaatgatgtagatgaagagaacgagcatgaggagattcctaagcaaggatttaatagtagagtagattatagtgatttatttgaggagataggagctccattattccctggatgtcaaaaatacacatcattaaatttcatggtgaagatgatgcatttcaaagtcttaggaaagattcctgagaaaatatttgatggaatattggagttattacatgatgcgtttccagccccgaacaaacttcccaaaacgcattatgcggcaagaaagttgatgcgtaaattagggctggggtacgaaaatatccaagtttgtccgaataattgcacattattttggaaagaacatgctggaaaatcaaaatgtcctatttgtggggaggatcgatgggtggacaataacaccaagggtaagaaagtgccgcgtaaagtgatgcgttattttcctttaacccctcggttaatgcgaaaatatgcatcgaggcatatt

SEQ ID NO: 196195 - DNA, 1159 bp, Cannabis indica
aaaatgacttaaatgccctccaaattataacctaggtgttttctcaaaactagggataaattggtcaatttccataacccgtttaacctcgatattttattttctctaaaatatttcccactaagaaataaggttctaaacttacccatttgatcaaactagccatccatcgtatttttcgttgtcgcggggcaaaaattacaaaaaatgcataattcacatacaggacaaataataccgccagagtttaataaaatcttcggaattgagaaattataactctaatactcaataataataatggggtccacaaataataaaattcataaataattataacagtaacagaaattagtgctaattgcctttactaatctaaattactaaagcggtcattacactaactccttccatgttggtaatagatagcaccctgttctgagctcttctagcccgaaggtaagaatgaaaaaaaccagagttgatgtcaccctctttcagccaatttaaattacttttttgctgcaggaaagaataatacttatcaagtgccagtgtataagttatctcgtggaagcttttcttgttgctgcaattcacagttcagggggtcattcgtcagtctatcttggcaaatattgagttcttcctttgctgtcatagcagtagcaggtacattgttaaaataattcctgttcagagcacacaacacctgctttaaacttctaagctcagccacaacttgatacatttttgatcctcttacttgctttgcccaactttcagccaccgaatccttataattaggatgtttagaccacatcctaaaataatgaaaaggcctcttgttcccacttggcatattgtagatagtaagtatagcaggagaatgataaaaaatgccttcattttgaaaaaatacctcagcaggaggaaaggaatccagccaagattgatttgctaaaactctatcgatcttggagtagattctatcttttccatgttgcttgttactccatgtaaaataattccctgtatacttgacatctaccaatttgcacacttccacacattcatgaaactcacttgcttctttgtaccttgctcgaacaccaatcctctcttccttgtgaaggatatcattgaaatccccaagcac

SEQ ID NO: 196196 - DNA, 2915 bp, Cannabis indica
acctcccaaacttgcaactaatacacattgtgccccatgtattaaatcatcaaatcgacttcgggttaattatgttgactgtcatgcagagcaataactgacaggcaacctaaacttttcatttcaaacaattaatattaacctaatattagccagaaaactttattgcgtaagagtagacacattgcacttttgttctgaaactccaataacattggagtccttgacaaatggcagagccattgattttgtattgacccagagcagtgtggtttaggccatctttctccccatgaccagtggggtcgtggtgacgcttcccatggccaggagggccaggaggtctcctagcaaacatgatacgattcctcaaaagtagaagagagaactacatgctaatcagaggaaaataacgaccagatcaaagtaataaaaaaaaaaaaaaaaaaccaacaatagacaaatatatcagcagcatcgtgagtttacaagatgataagatacctctgcataagatttgatccacattgaattttcacaaaatacccgatattatgcattttaagtagaaggaaaaagtatctcacaaaacttctctataacagctcataaatctcacaggttaagtagcttagatggggctgcacgtagcacagtcaatgcttcctcccatctccactggcgttcagctaaaggagaagacgctgcaaaattgacaaccgccattcccattcttcaatgaaacgattagctattgacaccctccactctagcgcatgtcttccacttgtagtcaaaccatcaatttgagcatttcgtagttcagttacagttgagggaacattgcgacgtagtatatcaagtagcaatcctatgaaagatagagccatttgtttgccccttcagatgtaccgtgatcattatgttcccacacacaagtatcgggtgactcagtacgactttgagatgacatgcaatgcgccaaattaagagtgagataatccatgtgcaatagtgaaattataacattcaccatcattatctgcattgtcgacaaattgcatgtcacataatcatcaatatttggaaagcaaatcaaaataataaagttttaatttgacaagcttagttacaaattgcatgagaagcattcaaaaatgaaaataaattaagttttaaaatgacaagcatagatcattatcattaatatataatttcgctcaagacattcacactcagtcatgtgcgaggtaaaaagagggtgtggaaagttgaaactaaggatgtttggtaaaaagaacgagtaaatcctactacccttcacaccatactttctcccatccctcctatagtacaaatcatataagaatgccacaatttctagggttgaagtataacggaaaaagctattctccatactttccacagttagcatcttgtgcaagaatatatacagataacattcaataatgtgtacttatgggttgaacttcttgtggatgaaaagatggggagaagcatgatgcaacaatataaactactaaaaataaaaatctagatagcttaaagctgaaaaattgcaaatcaaattcaaaagaccttgcgtggaatattagtaatagcatccgtgtggctttgtagatctttcaaatgacaaaagggctcttgatgatgactttctctttcaccagacatgctcttctgcattgctcgaagtgcaagaacagctgactctagtgcataacgcatgtgcataagttcaatatcctgcagcctatgaaggaaaaaagaaaaagcatcatcaacgggtatggaagaataaatgattgtatctctaagctataatgctcaagttcttcaatcaagaatgaacctagggattagtctcaagtatactaccaacatcaactcatatccgaacaaaccatgaatgcaacacacataagcagccttacaggttagaacaagcaatcagaggacacaagtttctgtatttatcaacaattacaactaaaacatgtgtaggaaatgagaaccaacccatcaaagtcctagtcattacaatactgttacgcaacccttaacaacatcagcatcaaaaaaatgtgtgatggaattagcatcttaatctgatacatagtgaagagcaagcaaaaatggctactgataagcagcactatgccaaaacgcctaccaatagacccagctattttgtacaatcgtttgcagacttgtagggcaagcctaatgaaataaaattaaacaagcacccaaaatagtcatccctatgctacttatgttagaatactcacctctgccaggttgccgagctagaggcagccggctgcatactgatcaacttaatggcatcttgaaattctatgtgtggcacaacatcaaacaatacctgtacacaatcatatgatcacgtattagcattcttcatttatcatcgctacaacgatttaggaaatgtaaactacataatcatccccactaattcaatgttttttgctgattgaccactttgttattttaaattgaaacattttttcttgttacacttctattatttgcaatgtgccgcatctgtttaccattctttttaaaagaataattgtatcatttaccctagttagaaaaatgaaaaacttaacaaaaatcaaatagcacttaaagaagttggcctaacatgttcctttttttaaggaaaaaaatacctttgttatcaatatgaggaataatacaaagtaatgagatcaataaagttggcctaacatgtgactatatattagaatttccaatcttgagaaagctggatttggcattcgcaactttcaatcaggttccgcagaggcatggtctggtaactgttaagatggaagtgtatacatgtgctcaatgctcaaacattc

SEQ ID NO: 196197 - DNA, 1076 bp, Cannabis indica
ccttagtcaggtttcaaaccacgagctccgagtttcctgaagctcaactttgttgttcagtcatcgttaagagctgtgggcgtagaaacttttggatccaatctagttgtgtttgagatccattgagtggaatgaattttaaaaatgggatttacttgtaaagatctttcagacctcatcaatggtttcgcaagcttcgtcattgacaatagacggtcattgtgtgcggtgaaactccaatgaactcagggatagaggtatgcctagggatggggatgggtgcgggtgcgggtcaatgtgtagctataggaagaagatgaagtaagggtggtgtggctggaggaagaagatgaagtgtgggtaatgtggctagaggaagaagatgaagtgtgggtggtgtggctagaggtagaagacgatggagaaaaaaaaagaaaaaaatgattttaaaatatacatttttcaatttaaaaatattttaattaaaattattatttagaccaataatatttcaacacgtggtaattttgaaaaaataaacaaattagttaaatttaggactaacagatttacaaaaaatgcaaccttaaggattattgatgctatttttggaggttgtgacttatctgatcaacttgaatttttcgagaacttttgctgcaaattttctatttatataagagcattgctattgagcaccagtgatgcctaacaccttttataggtgacgccttataaatagttagtgatatttcctaaaggttattttcttaagttatatgagactcgatacttagttacaccaatagtgttatgacactgaggagggtagtaagcactagtgatgccttttagaattattgatgaggaataagtactcgtgactaggggtggttctagatcccaactaatccggaccaaactatttgagatcggaccaaatgaactctatgtgaatggattggtcaatccagactgtttataattttttaatttggtcacatttttaaaattactggtagcatttcaaatcaaacaaatccgtataatttatttacatatacttaatatatata

SEQ ID NO: 196198 - DNA, 1308 bp, Cannabis indica
cgatgagatttaccaatctagaccaagttgttgatcattactggcattaaaatttgttcatgataattttacatgattagtgttcgaaatcatcaatgttagccttaaattcttataggtacgtctgttaaggacaatgttgcggtgggaagagcaactacacaccgaagcaagtttcggacaagataagccaagaggaaagtcttacggctcggttgttcttggggaggtggtgattgtttgttggccccacggcgagataatgagactgagtaccggtagcaccgcggccgatgctgctagacgagtcggactcgagggaaaattggctttagttaatggccaattagtgttgcctaataccaagctaaaagatggtgatgtggttgaattcagaatttgatgatgatcacaaaaaatttgtatttgtgaaaataattgggggaataagcaaaaatgaaattgtataaaaaaaatgtatctttattgttctttttttgttctttccccttaattcaaggaataatgtatataaaagaattttcaatattgtacatataatgtcaaaattccacaccaaaaatatttaatgaaaaatgaaaattctttgtgaatgtctttttaaattttgggatatatatttgcaattataaaagcaataataaaatacaatatatgcaataatatacatgtgttaaaagagaaagttttatagggaatatactcatcatgctctctattttgttgaaaaaatatatttggggattctgtattttcatgttcattgttaccttatatttaaaaattgtaaattacataaataaaagtgtgggttgaataggataaaatttggttaagtaattttgttctttatctttgaggggttttttttttttttttctacaattgagtgctaataaaaaaagaaaaacatttaattttgcttactttctgctttagtgttaattctactacaataaaatgtgcaatactaatttccttttatattttttctaatatttaaataaaattataatagctaatttatatacagattatgttttagtatattggtaaagacttatcaatctatgcttttagtcacaagttcaaataaatcattttttgtatttctttttttagataactatatctatccttaacactcaacaatatctatattacatcaatattattctaaaattactttaagtaattaaaaaaagttgtaattttttttggcttaataaaaaaatttgaatttaataaaagaaaatacttaaaaaaaatcaaatttaaaaaaaaaaa

SEQ ID NO: 196199 - DNA, 2347 bp, Cannabis indica
tgggtcaactgtgtacgggtttgcttttgtagattgtgctgcttaaatttgggttggctccatcaaagatgatgcatcctttgctggtttgggggctttagttgatgcaggtatgttctgttaacattctgcatgctgactacattgtttgtttcaatcaaattcaaagcttcaaaattgagttaactatatcttttggatttgactgtaggtgtcacctaaagaagtttgtatgaagtagaggtgaattatttctcaaaccacccatcatctgtcccttaactatttcttccttattttggtcgttattagccatttttgaagttacaacagaactttgaatgtatagttgagaatatacgaatatgaatttctgcaaggttagtccaaagaagttcagaaagcactcagaaagtattctttaacaggtcattagtcacaactcctttctaattttgcagatgttgtgcttatacatgaacatattccttttgtaatgttcgaatatttcactagagtaatattcttctagcagttactccagtgtgctctacttgacatacatgctcttcttgtgtgcacagatattttcattacctagcagtatgtgtatttgcctgttaaatacacaaaatattttaaaaaaataaaaaaaacataaaatatacttagtgtaatcagttaatttagattttgaacacttgttttgaaaatattagaatattgtctttttgttttgaaacttgtaattaaatcaatcaaattttgtctgcaggttcttcatctccacaattgactccagtgcagccaactactgattttgcagatgctcctgaagtaagaaccttaattcagctaaaaggttacttcaaggggtcttcaaatatgtgggatcaatctcttggcaatgtgatgcaccaagatataactttgtctgctctcgggggacttatcaatcatctatctagattgatggtgagttttgccctttgcgcttttatgtgtagttgcttaatgcaaccatgccaatcccgttcaatgacattgaataatttgtattcaatgatgttttctatttgctgttgttttcaaacagttagatgatgttttacaaaatggggatgtattaccataccaagtgtataggggctgcctcaaaatggatggacagacactgataaatcttgagatattcaataacaatgctgatggtggtacttctggcaagtgcttcttatgcactttattttttagcattattcatttgagattattcctttttctttgatttggtgttttacattgctttattaacacggtaattaaattttcaggtacattatacaaatatcttgataactgtgtgacatcatctggtaagaggctgctaaggaggtggatctgccatccgctgaaagatgttgacagaattaattataggcttaatgttgtcgaagctctaatgcaacatccagaaattatgctagttgttgctcagtatcttcggaagcttccagacctggaaaggttgttcggacggattagggctactgttaagtcatcagctactttgtcagtgcctgtatatggaaaaaaagtgctgaagcagaaagtaagtctctaattagggaaacttttcttgaaggataagagggttaacttgtgcaagaaaattttattccagatagttatccacccccaagacttcatttcttttgttggattttcaataaatgaatttatggtaaatatatattgtattatagctttggtgatgttgtaagcaatggtataagtaaagtgaagttttcttgctgggggtaatgtctattctttaaaattttaccacactaattcactagggtttcttgttgctactttctgcttattcaaatattggttattcattccatgtttcaactgatgcatagtgcagcactgaatttttacgtgtatgataaatgaaatcttctgttttctaacaaataattttattaattatatttttttaataataaaatctttttgtgtggtgcaggttaaggtatttgggactctagtgaagggtctcagggttggctttgatttgttgttgttattagagaaggaaaaaaatgaattttctcttctgtcaaaaatatttagtcttcctcatctgagtggaagtggtgggcttgatcaatttctttctcaatttgaagcagctgttgatagtgactttcctaattatcaggtctttttgcttttctgatttattcattttttttgattagcagttgaatatgatattcataagttgctgtttttctacttttgtattgtgagtaacttcctatgattgtctatg

SEQ ID NO: 196200 - DNA, 664 bp, Cannabis indica
cttcttctctctctctctctctctctctctctctctctctctctctctctctctctatatatatatatatgtctataaataaattaaaactaaatagtgaatttaatcaaaattatctcttccaatttatagttaacatccttacataaataaataaataaaaaataaatttatttgaaacaaataaataaaaaataattaaagtgacatttcggtacacttcctatttttttcgatattcaaaaaaagtaacttattttacttcttataatcatgtaagttaaagttatttagggtcaattataaatttttaagaaaattcgaataaggactcaaatgtcgaatacaaatttcaaatattttgttgacttttctttagtatatgtgtggtaagtaagtaagtattttaattttttttttcgaaaaatttataatgtcaccttaagaggcgtttggttaagagaaataaaaatataggaaaaagaataagaatggaatcaaatttaaaatttataaaaaaaaatattaatttttatatcttgcattgaaatgatcattctttctattttattggtcaaaaaaaaaacattcatttcaccaaaataatagaaaagtcattctattagaatcacatacagcatactaatactttaaaatgcaacca

SEQ ID NO: 196201 - DNA, 4057 bp, Cannabis indica
tgttcaccagctcaatatctatcatcaaaatcataaaacacacaaaaaaactcacttacaactcttcccataaagggactcaaactacccaaaaaatttcaagcgagagaaaccaacgagagacttcaatttggcctataactattaataatttcaataatttgtttcttatcgtttaccaaacacctttttattagagtttgcttttatcttttttaaaaactgtgtcaaacgggttcttaattctaaattcttaagtagagtgttttattccttaattgtattttatcctatagtttaattgttttattgccaaaattcttaattgtatagttaaatcaaaagtaaagtaaagttaattgtataattctacctctcggaagacttagttctaataattgggcataacattgtgattttttgagtggaaaaatatttcaaagataagttttattttgttataataataattgtgttttatccctaatttaaaaattcacaacattatcattgtatagtgtgctaatccatatttttctatatctatttattttgtaggtagtttggttcaggtgcttgtttacatcggatctcttgaattgaaggtggtctcaagttgttttgtttaaatttctgaattaatttggtctaatagaagtcgctatgtctgtagtgactaatattctgattttgtatatctttggctagacaattagcttgttgattgaaaatttctttgcgtcgacaattatcacagtgtgattcagatcactctctaaaaaaatatccttttttttttatttcttaacataaatattaagttattgttcaatacctcactaaaaaaaaggatggttcaatataagagataatccttcagcctcccatatagtataactaatttatttcccactttaatttttgttagagaaattaaaaaaatcataattattttcttttaattttttgaagggaatgaaagctattcccaaatttatggtttccaaaactgttatagttactttattaaaaaaaaaaaaaaaactagttatttttacagtaacatttactaggctgttaaaacgttgacacgatttctgaagacggttttcgaaatgtctagaacaagaaaggtattttcccccatctctaaatgaggggtattacagtaaatccatatcctaaaacttataaattcacactgctacagagagcccattatcagaatcgcaacacgtggcacataattcatttcagccctctagtaaattctttttctgaacaacccctctagtaaatttcgagtgaacttcaactctctgccacgtaagcaaatattaggacaagtcagctagggtccacttccactggtcctataaaagccccaacccatcccatatcgcccaccattcacatttcactcactaaaaaactcactctcttcactcttcacccatttcagaagagaaaggaaaaaaaccacagccatataaatatatatatacacctccatccacaaactcactaccggcgattattggtcaccggagaaatgaatattccggcgactttcatttcgattactgtacgcaatgctcgaatctccgatcatcgccgacacgttttccatgaaaatccttgaccggaagcgatcttgtttcgcttagttacagtacacgttattcgacgcttttccttagccgaaaaaaaaattaaaaagttattaacgatacgatacttctagaggaaggtaccgatttttctcccttcgttcgtacataaattttggtatagttttcctttttgtttccgctgttttctttttcatttgttagattaacctgataatctaactgaaaaacaaaacagcgaatgtagatggaatattgagaaattggattgattttcgttaattttttttgttgttcgtttctgtgtaatttgagtgaatggtttttgagttgtttagatagactaagctctgaaaatggagcagaaaaaaccttttagttgtaattagaagcggaggtagtttgaagaaaagaattttttttcgttttctctttctcttcttcggaacgatgccatttccgatgaagatacaacctcttgatattgatcccgaatcggttagggaacctgcggttcgaaccgattcagctaaaccggtgttgaaatcgcggttcaggaggctctttgaccgccagtttccgagcgtcctgaggaattcttcaacagaaaagacaacaaatgttaatggcgaaccaactcagtacaaagatggaggagcagccactgtgtttgaaccgagttcggtttgcttggccaagatggttcaaaatttcatcgaggaaaccaacgagaggcaaccacctccacctccacccaaatgcgggcgtaaccgctgcaattgctttaacgcgaacagctacgatagctccgatgatgaattcgacgtcttcggcggtggtttcggagactccactacctccggatcttttggcggcgacgcctccgacatcctcaaggtaaaaagaaaatcttacgattctcagcaaccaagcagaaaactgaaaattaatatgtttcgtttactgatattttcatttttggccaaaaatagagtctaattccttgcgcgagcgtagcagagagaaatctcttggccgatactgctaagatcgttgagaagaacaaaaatcacaaacgaaaagaagatttgataaagattgtaaccgaaggactctcatctatgggctacgattccaccatctgtaaatctaaatgggaaaaatcttcttcattcccagctggtacagtctccaattctataaaccctaaaaaaacaaaaacaaattgaccaagaaaaaagaaagaaatagagaaaatctgaaattgatttatgtttggtttcaggtgaatacgagtacatagatgtggtagtagaaggcgagaggttattgatagacatagatttcagatcagagtttgagatagctcgatcaaccggagcttacaaggctatcctccaatctctgccgtacatattcgtcggaaaatctgatcggcttggccaaatagtctccatcgtttctgaggcggccaaacagagtcttaagaagaaaggaatgcacttccctccatggcggaaggccgattacatgagagccaaatggctctctcctcactccagaaaagaccccatcgccatcgctgttccagaatcggaatcggagaaggtcaagtctgacctcgaatctcaggacgacgacgggtttagcgattgcggtgaattggagctgattttcggcgagaagagcctgccgtcggagaacgatcccggcggagctgccgccgaaaaagcttttccggcggatgagaaaatttcgtcggagccggttacggcgtgacagccaccggcgattgaaccgaagagtgtagagagaggaactaaaatcgttaccggattagcttctctactcaaataaaaaaaaaaagttttgcatttacatctttttgaaattttcgagataaaaaaaaataaatacataaataataatataatataaaaacatatataaaatgaggagatcaaatattagcacacgtctcctctctctcttcgttttttttttcctttttgccctttaactcgtgtatgtatatgttaagaaaagtagaaaacaatctcaattgtaataaaatagttagaatttgaatagcaaaacaaattaaaattgttacactagacatttcttttaaatttttttttatttactataagttcatgattgaatcttagattatcaattagattacttgataagtaaatagattagtttgaattttggggcacgggaaaaaaaaaaaaagataaagttaaagtggagcaaccgtttgttgaaaggtgaacaaaaggaggatgagactttcttttcctaattttctattcttttacttttcgaaattcatctcatggaccatttttctctctctttctttttcttttaaaaaaatgaaaataaaattacttcgtaatatttaataataatggaac

SEQ ID NO: 196202 - DNA, 4607 bp, Cannabis indica
tttatacaaaatactgctgaatacggggttcccctatttataaacttttacaactggtttcaagactggtattacaaaatagggttacatttccaaaatgcaatcaaaagatggatcctgtccactgaaagctgggacttagcggttgatatgtacatcgtcgggagacctctgactcatggctgacccactttccccttcaatttatctgcaccacgaagcacccatgagtcacaaagactcagcaagaaaaacaaataaaatacaaacaatgcataatatgagaaatcataacattgtataaccaacaagttcatcacccaatacaaaaatttatccatcgtgtattaaaacattacataaacaattagatgtcttataagacaaaccaacattgatgcctcataaagcatccttaccactcgttaaccacgagcttcaaatgtcactatcatttctcgataaagcaattgataagtaagaaacctatctgcggtttcaagatgagtgattactcattttagcaacggtaatgaccgtgtctttaccttgattataatcgagccacaaacgataataatcgtgtctcatatgacatgcttagtagtgcaaatgacttttcttacctcaatccaatattaggtgtgtaggccaacctgagtggaactatgctcgacgatcctgggtcctttgtcatgacaatgaaacttggtaaacaatttaatcgaattctgaaataaatcataattttccaactggacaaactctaatccccactgacttagaaataacttaaacatctcaaaataccctaagctaggctctggaaaacaccctaggccaaaaccaggtttgagaaaaaccctagaatttcccctgctggccaattggttgactggttcaccaatggcctgttgaaccggtcgactagttttggcaatttgggaaaattctagtttttcacctcaaaaccgaaccaaaactccaccgaacgtactcgaactttccaaaacagttctaaaccataattatgatatactcaagcaataaaaactaagtaattcctcaaaaattcagattcaccaatgacaattaagttcttaaactgaatcttttcaaattcacaccttagcagtcaagaaatcacccaatacatacataaacaaacctaaattaatcctagatacatactttgaacttaatccaacaccatagccccaaaaatcacaaaatctcttaaccaaactcaacctaaaccttagaaattcaaagagaaaagataaaagacttaccttcaagcttgaacaacacctagggttagttaattaaactagaaatgggttgatttgaagaagaaaattgcttggttcagctgggttctagggatgtcaagggaagaagaagaaaggagaaggtgatattccttacttaagtttatctttatttttctaactaaatattaaaattaataataataaatctaacatcaaaaccctatttcaatataagacaaactaatatacaacctaatgcatttaaaaaaaaaaatattcaacctaatgaaatgactattttacccctctttaaaaaaaactaaagcctaaaattaaacctagggtattttggtcatttttaatttttcccgaatgaattaacaactcaactctctaaactaggccagtataattctaatatatctcaattttattgctgtgacaattctgaccactccgtcaaggttccacagccgccgaatgtgaaaatattttatttcgaaaatggtatttacaatacccacataatctgataaaatctctgtaattaataaattacgcttatttattcatttaatctcatatttaataaaatatgcctaaattaatataatcataattttttagatattacaaccatcccctccttacagaaaattcgtcctcaaaatttacctaaatatcttgggatactgctcccgcatctgcgactctaactctcaagtcacctcttcaatcttgttgttcctccacaacaccttgactagtggaatagtcttgttccgcaatattttttccttgctagtaggatctgaaccagttgttcttcgtatgacagatctatctgaagttccatatccttttgaagcatcaagacgtggaacacgttgtgagctacagataaagtagggggtaaggctagccgataggctacctgaccaaccctttctaaaatctcaaatggaccaataaatttgggacttaactttctcttcttttcaaatctttgaattcccttcattggggacacccgaaggaagatgaaatccccaacctgaaattcaatatctctacactttggatcagcgtagctcttctgtctactttatgaggcaagcatatgagctcaaattttctcaatgtcctcactcattctttggattgcatcaggtccaaggtacctctattcaccagcttcatcccgatgaatgggtgaacgacattttttttgtacggtgccatatcaatagtactctgataattattgttgtataaaaattcaatcaaaggaaggtacttgttccaggagcattcaaagtccaacacacacgcccgtaacatatcctcaagtatctgaatagtcctttcagactaaccatcagtttaaggatgaaaggatgtattgaacttttatttggtacccatttctggttgcagactttctcagattttagatgtaaactttggatctcaatctgagacgatcgactttggagcaccatgaagccgaactatttctttgacatatagatcagcgtactgatccattgtatacgtagtctgcactggtaaaaagtgagatgactttgtatatcgatccacaattacccagatagaatcatagaaccctactgttcttggtaatccatccacgaagtccatggtttccacttaggaatcttcagaggttgaagtaatcctgctggtctctaatgttctgccttgacttgctgacaagttaggcattttgatacgtattccacaatatcacctttcacacctggctaccagttcagggctttcacatcttgatacatattagttgttcccagatgtaaggaatatgacgtgttatgagattcgtctaaaatctcctgtctgataccttcatcaactagtacacaaaccctgtctttatatcgtaataacccatctgatgaaactgaaagttctttcctgacccgacttcaagcttttctttgtactcttgtaattttagatcacttggttgggctgtcttgattcttcctaacaaatcagactgtaatgtagtattggctagttttctaactacaaactcaatttttgctctggtcatatcctcaaccaattttggtgagatcttcttcaattcataaactttccctggacccttttgacttagagcatccgctatcacatttgcttttccagagtggtagagaatctcgcagtcatagtccttaaccagttctagccatcgtcgttgcctcatgttcaaatccttctacatgaagaagtatttgaggcttttgagatccatgtagatttcacactttattccatacaggtaatggcgccaaactttcaaagcaaaaactactacggctagttcaaaatcatgggtgggatacatactccttcatttgtctagatgcataggcaataactttcccgaactgcatcataacgcaacctaatccttgtttagaagcgtcacaataaattacaaatttctcatcactgactggtaagttagcactggtgtagtaattaacatttgctttaattcctagaagctactttcgcacttgccagtccaaacaaacttatagttctttcgagttaattcctttaaggatgtagaaatattagcaaacgcttcaacgaaccttctatagtatcctgcgtatcctaataaaattctaacctcgattgtagacttgggtcgaggccaatcccgaaccgcttcaatatttacttgatccatcaaaataccatcttgttcaccgcatgccctaagaagcttacttgaggtagctaaaattcacatttcttgaatttagcatacaacttatagagacgctgcagcaccatccaaagatgtttctcacgtgtcttttctgaatcagagaagattagaatgtcattgataaagacaattacaaaatcgtctaaaaagtctttgaatactcggttcatcaagtccataaatgctactggagcattagttaatctgaaggacatcaccaggaattcatagtgtccataccgggtaggaaaagctgtcttgggaatatcctcctcttgaatccttaattggtgataaccagatcaaagatcaatcttagagaagacgatctttccctataattgatcaaacagatcatctatccttggcaaaggatacttgttctttactgccaatttattcaattcctggtagtgaacacattcttaatgttctgtccttcttctttacaaacaaaactggtgcaccccagggtgaggtactcggtccagtaaatttcaaatcggacattccctggagctgaaccttcaactctttcagct

SEQ ID NO: 196203 - DNA, 1734 bp, Cannabis indica
atatttctcggagcccttccctaagtgtgtacgacagtctattgatcacgacgtcctcaggataaagcaagcatcgtatacgaattgctcttgcaatgaacaatagtgctctattacactctaaaaattgctctcagaaaaatcgtaaggatgaagattttttttttttttttgtgaggatatgttctcatgttgttcttatatgacttatagagaagtcaacaaaaaataaaatggtaagaaaacgtaaatgtgatcgagaaagacgttggttcatggcaaaaaaattgtgaataattgattgatcgcttttatttttttcttaaattaaacctttataaaattaattgaataataaaaaatatttatctcattaaataatttttcgataaaagtaaagtgagaccacaaaaacatgctcgccagcttagcttggccggctggacgatgacgagcttgtgtggtggtttggtgtgtgagtcctcacccatgcatacaaaactcggcatcccttggggccccaactcaagtgccaaaattgcaccttaaaaaaagtttaactcgcacaatgatttcgttggtttggtcgggttaacccgtccaaactgattattattttttatttttattattattattagttttttgtgttcaaataattgatttgaaaaaataaatgcatatatattattttaatttttactcgcatgacgtggcatgtccacgtaggcagaattgatgccatgtgggtacaacatgtcaatagataagcagaatcacagtgcaaaacttatcaataagggaccaaatgctagaacaggacaaagttacaatgaaatggctaaccagagggtctgggaccacccctggtcggccaatggatggcatgtgttggccagccctaagacaaagggtaggcttataacaactgctagaaagaagcctgttcgattggtgtttctgcagctttcaccttggacaaatcacaacttgtttttagctacgaagccacttcatcaacccacgaaaatagggattcaactccaaatatctacctattctttatgagcaattaattagttattttttgtatatttaaatatgtgataaaagataatatcaccccttttggagggatattaacctattttaaatctcaattttttgtaagctctaactatataaagagcatcaagtcagaccaaaaacctaagttctaagctgtaagttctagtgtaaagaccacttaattttaatataataaattagcagataataggacttaattatgaaattagatttctaattacgatttatgaatttatggtgatatgtttgaattctaggtgtgttatttacattatatatgaaatttcatatttttaatattttatgtccgacaacattggaacacgacgtttgaccgatagaatcacattttcttatggtttagtattttagttatatcggggcaatatagttagacattgagaatgtcgagattatttgaggtattagttttgaccaaatacccctaggtgacaagtatgcttttttggtgtatgtgagggcaaaataaaaaagtcttttgcctgttcttttgccctttagtgatttactacagattaatttattctgaattaagttagtacacaggattagataaactctaatattctatttatctaaaaatagaaaatcaaaagaaacgctctctctttcttcaactctctc

SEQ ID NO: 196204 - DNA, 1058 bp, Cannabis indica
aatctctcagttgaaagagacatttgatttaagaaatatttcaccaacaaaattggtcatatatataaattaatcatacttgtcattattttttttatttggggatcttcttcttcttcttcttcagatttcaaaatggacaacactaacacgatttcaaaatggacaacactaacacttcatgggttcgtgagaaccctctgaagaaggattccgtgaatgtcgttctgatcgttttggtggtacttttggtgctactaactctcattctgtgtgtcgtgacaattatttgtcatgcgcccagaactaacccaatggctagcgccagagtaaatggagcacacttccggctgggcctacgataaaatttttaagtggagcctaaaaaaataatttatacaattaattatttatacatatataataggcaaatataaatatttattaaaataaataagaaaaaaaaagtattaaattggattatttttttaagatacatttgatttgggcctaatcgagcctctagggcctaattgggcctctttgggttggggggcctagagcagtggcccttgctgcctcaccctttagtcgacactgtataataaatacatcacacactcaataatatattcaattatatacctcataatttttgagctgggcctttgggcaaatttttgagctcttttctttgttttcctttattttttttttttctttttcaatttactacttttatttcttccatatcttttcttttattccacaacaaaatacactttaattcctacaaataacaataattaaatctaaataaaacattttcaacataaaaatatatctcattaattctataaaaatattaatttaagctcaatttattttaaactttaagataaaaaaaatatgcatttttcacctataatcaattattaaaaaaatatatatttatatatatatatatttatatacaagtatttggtcttctcaagcactttttgggttggtgaatttctcatattttttattgtcctttttattaaataaaataataa

SEQ ID NO: 196205 - DNA, 2304 bp, Cannabis indica
aaggaatcataatgcaagaaaaagatgtagtattatacagaattagacaacaagagaatgatctttataacaagaatgatgatagcataacaagcaatgattctatcgatattaacctctactatatacaattaatatatggtaggagaaagaaaacaaagaggattgaaagaaaatgaagtgttacatacattgataaactattcagctgagtctagagattcattgcagctaggtccatacaaaatcaatttccttaatcacaagaatcttgagttgagctgtttttccacccttcatactatgtagcttccggttacagatcttaaaatttgtcaagatccacaacatttccagataaacattgtaaactaaaactcatgcctctgacttgagactaatcgtttcaactttccattgcttctgaacaggaaatgttggaagcaaacttagacattgacgatacttttcatcctttgatagtacgtctatcacaatggcgaatgtagaagcatctggcggcacatttttctctgccattttatgaagaagttcaaccacttttgaaatctcattgttttttatgaaagcatgcatcagtgtgctatatgtgactaaattcggggcacaaccttttcgttccatttcaagaaacataccatttgctttttcgaaatctccattttcacaaagcgcatgaatcaagattgaatatgtcacaacattaggcaccaggcctctcttgataaatccctgatatagctcccaagcaatctcaaacttttctgatttacacaatccatcgatgagagtattgaaaatttgaacattcagctcaaactcggaacatttaagactatgaaaaacttccaacgcctctgaaacatgcttgttcttgcacagtccactcaaaaacacagcatacgtacttgcatttggtacaagatgatgaacttgcatctcactgaacagtttacgggcatcatcaatgtttccagtatggaagagaccacatattaaagtattgtatgttactacagttggcctaactcccttagcagtcatttccctaaagagactcaaagcttcaccggtcttccatttcttgcaaagtccacgaatcaaaatcgtgtagctaaacaaatcaggttcaaaccctttagctgggaaggaaagaaataacttcttggcttgactaagcctaccaatatgacacaagcgatctaacaaagtgttgtaagtgattacattaggatggtgacctctctcagtcatcatttctagcacatcataagcttctttcatctttcccgccttggaaagcacatcgatccacgcagtaaaagtcactacatcaggctgcacatcttgatctgtcatttcattaaacaaagctttggcctcttcccatttttctgtgtgacacaaaccatgcatcaaagagttataaacaacaacatcaggacaaatcccattagctttcatttccaagaacagttctttcgccttttctatcaacccttccttagaaagcccatcaatgatagccccataccaaactagatccggtgtgcacttaaaaccatctccatgatctttcccactagccatttgttcatgtaactcgagtgcaatagatgtatttccagtcctacacaacccattaatcagagtaccaaaggtgacagcattgggcttacaccccaacttgaaaatcttcttgaataagctaattgcctcaataatcttattctccaaacacaaccctttaactaaagatgtataagtcacaatatttggattataacccctccttatcatgtttcccagtgccacaaaaccatcagaaacacgatttaaattacaaaagcaattaagcaaaacattgatcattctgaaactagggaacaacccatttgagtttatccaattataaagcttgaaaacatcagagtagtgcttattcttagctaaaacaacaatcaaaggatcaaatgaagacactggaggagtggggttcatgcgaatcatctcatcaaagcataaacgcaattcagagagagaaacattacctgagttgcggttgagtaagttttgtagtaaggatcccgaagtgtttatgggatttgaagaagtgggttttgttttgttatttgaggggtttggggtttatttggtgttttccgtggcataaaaagggaggagagtttatggtttgaggagactgataaagataggtcctttgcagcagcaacagcagaggagtaacagggaagagatttgaacaccattggagttggaaaa

SEQ ID NO: 196206 - DNA, 886 bp, Cannabis indica
ttttttgataaaaaatattgtagtaaactttgtaaattttctttgctaagtcagcaatgattgctttttcttttgttgttttgtaaattttccataatgcgtgtcaattattggctattgtgtcaagattgtgacattttggactaatgcaattctgccgtgttacgacatataacaagtattatcttatttattttccttgatttatactctccctttgtaaaatatgctaattctactgaatttatatttatattatacgcaagcattaaagtcaaataaataaatattatcattattgaaaaggtcggtggaatttcaagttgtaaattacaatttctgtggagcaagtttgacaacaagagatattaattaaccaaggtcaggtgctatctccaactgtgtgagtaacttttatttatttatataacaaaaaaaaaaaaatgtctcaacacagctgatattaaaaacagaaatgatcaatatgcatgttccataatttctaacgaatcaaacaatggcgtccattaacaaaagaatagaacctatatacctaagatccaccatgaacgtacgtattaactccaaaaaaacaacaggatatttctccaacctccattcttcttacttttcttttaaaaaataaatgaaaaaaaagtaactacatgtgttcaccttgaaagaattatacaataccaatgttagaacctttcttttttttccctgtctaaacattcaaaatcccctattggagaagactaaaagggaggttaccataaggaacgagacaattcctcaaatagtaacaaaagggcaacaaagccaagatgagatcatccataatattgttcttaaaaaccatccatcatcatcatcatgatcacca

SEQ ID NO: 196207 - DNA, 1010 bp, Cannabis indica
ggttatcacatcagtacacttcactgtttgagtttattattagtaaagaaagtcgtatacgaacgtacgtgtgtctgcctagagaactagcggtcagggaatactgaattttctcgggaaacaaacagaacgacgacagaatcttatcagcagctgtaatagtcagttgcgaatgagtaaggggcttttacgtcattttccctcctaataaaaccaaatacataacctctttcatccttttcacccctatttttagctttcgtaatgacccagataccctcctagtctgccgtgtgacccaagtagtcaagggcatttaggtaaattcaattcgcccacgatttcaacaaaacaagcctcgaagaaagaggagtcgtcatggttcgtttcgtggttttgtcatttccaatggggtagaatcgtcatgtaaatcttttcccgggaaatctgcttgagttgtcttgtaaaaaaacgaattttatttttgttacggtctcccacgcgtgtgagttgggtcccactcccaccgttatatgataaaatcaattaaaatctttttgtttctatgaatattaatattaatattttttttatgttatttattacaggattccatgtagaaaggcaggtggaattaggttcacaattaacggtttccgttacttcaacttggttttggtaaccaacgtcgcgggtgcaggggatatcgtgcaggtgagcattaaagggtctaagagccagtggatgcccatgagccgaaactggggccagaattggcagtccaatgcggtcttagtgggccaggccctttcatttcgggttcgggccagtgataggcggagctccacttcctggaacattgccccacccagctggcaatttggtcaaacatttactggaaagaatttccgtgtgtgataccaaaaataccctttccttttctaattaatacccctcactttttttttccttttcccttctactttgttgttttcaatttaaactttttt

SEQ ID NO: 196208 - DNA, 976 bp, Cannabis indica
gtacttttatctccctctctctctctcttcttttttttttgcatatattgttacaatttgagataaggtaaatggagttctatttcaaaattaatttaagttgaaaagtataagtataactaatgacttttataagaccacagggtcgaacatgacatttgaaagaatctcacaaataacacacattagttcacaaacggttttttggaccggtggcatttgggctcacaacgaatgacaagtgaatctgatacatgttagaatttgggataagttgaatgaagttctatctcaaaaccaattggcaatgaaaggagtatcccattcatcttatatataatatgacaattatcacacataaataatgtgagactaactctaatatatataattttacataatgttaatgtatattcatttttcttttaaaaaaaaattatctcattaatctctttatgatatatctataataggtggtagagaattgtaactttgtcaaaatcaatagattaatcatattttttatttttatcaattatttttaactaagaacaaataaaaggtggtagagaattgtaactttcgtcaaaatcaatagattaatcatatttttttatttttatcaattatatttaactaagaacaaataaaaaatctaattaaattaacagattagatgtaaaaaattaaaattataatcgaagttactaaagatatgtacttaatagcatactcttattgttgcatttcaatatcagtttcacaaattttaatttaataaatgatttagaaaaatgctaaccaattatggggtactagatcagtatggtattgagcacattaaggtgtcacataataataatagtataaaaaattatttactaaaaaaaatagtacaaatatcatttatgaaaattaaaagtaaaaaaaagggacaaagacaaaaaattatcgtaaaaaaataaaattaaaaaaa

SEQ ID NO: 196209 - DNA, 779 bp, Cannabis indica
attttaactacaaaaatcacgtaaaagtaccttttgttttatttatatatagtaattataaatattttaaatttatttataaggttttaatattgttaacaaatttatgagttaacagtaatactttaaattaatcatttcgttaaattaataaaaatattactttattattaatttgagataaaaacttttaataattaaaaaagaataatactatattatttttattagaatcaaagtaatattgtttattaattttattttaaacttttaatagcatgtgataactcaaaattatatatttttacaaattttaataaataaatttttgacgataaatttataaataaatttttcattattcctttcaattatttttaaatctaaaatatatttacaaagtgaaaaactaaaaaaagataaaaatagtcatgtgtgcaaggattatttttcgcactgctattaatcccaaaaatataaaattaactgaattaattatacatcgagtcctctaatataaccaaatattggattagtgacattttttaatttaatctagttgagtcaatcattgagaaatgtaatctaatatcaatgttcaacagacactctagtctattttattagttgtaattttttttatattaataaaatctataattttgtagctcataatatttggttaaataaatttttactcataaccattgcttacttatttcttttattccaaattatattttttttgtaatcgtgaggtttaattttttttttttttt

SEQ ID NO: 196210 - DNA, 1408 bp, Cannabis indica
ctaagtttacttattattagataatagcaggaaaaattaaatgagtttatatttggataggataactgatgactttaccttcaacaagcaaacttataccatgtcgttgtttaaatataattttttaatgattgtttaaatattattgatgaaagtaagaaatataattgtaacttacatatattgacgagtattacatatattgacgagtattacgtgccatttattccctaactagtatacctataaaattgtttttcaatagatatctttctttaatacataaaattgttttattaaatattgttactgtcctgatacatataaaattgttttttttttttaaaaaaaaaattgttttattaattattggtactgatattttcttttagtattataatatttcttcaatacctgtgcactgtaacgttgtttgatataaaccatgaagaaagcaagtcaaggttaattgtcacaacgaccatgcaaaaatgagctcaaagcaaataataaatgaccatacctgcgagttagagtaactcaggtcggtcacataacttgcacaacaaacttagtatacagaaccaatccattcattaaaagcttctgtgcttcaattcaacttcttgtaagttgtaattcatttatgaacaaaaatttatcctttctacttgactgatcttttgtgaaatataattgccatcagcaaggccatgtacaacaagttaacaatagcattcaacaatatatcaatgtgtttaactctacagcctagcctttccttcacctattgaggctcctccatctaccacttcattcaaaatctctacagcctatcctttccttcaccactcttctcatcacattttcgctggtccgcaccaaaagtaacgtctctttgtgaactcgctttcttcgaggctccagacaatgaaaagctaaaccacattccatcgatttgcatcgtgctatcatcacaaagcgcaaataactctttttgtcatcctgaaccagtagaaaaatacaaaaaaaattaggaaaaacatttgcttttgattttcatagctgttcagaacatctccattcatgctctctaaatacaatacttaactaaaataagaggtgagtcttaaaaaaaatgaactccaaccgtaaaaaaggaataaaaaaagaaaatgaataggaagctcaatgtaaggagcactctatatttttgctaatttttttaaatattattttaatagaatcactattaccttttttattatttcaacaaattaatttatatttaataaatttaaattataaattattattaaaataatcaaatgaactaaagtaggaaaccggctggagcaagaataataaaaatgaatctctattctaacttttttttaactattttagc

SEQ ID NO: 196211 - DNA, 626 bp, Cannabis indica
ggaatttaaaacaaaagtcaatcaaatttaatgataattaatatatatatataaagagtaacaaaaataattaaccaaaaccagctcaaaattaactacattaaaacctaagatttagaataccataaaagtataatttatttaagacaaaataaaaggtcacaaaactgccataaaaaatataattaaacctgatttaattaataaattagtagaaaaataaatcattttattattatcattaaatgaaaaattaaaattaattactgcaatgttgcctaacaacaatcccgcgcgtgaaactcggctccgtcaacactcaatgcttcatctttcctcgtcaaattcctctgccggcgttactcaggcgacaccacccatacagccgagaacgaaaacagaataaacaaatatacgaataatcatatgaagtcctagagattctaaaatatcaaaaataaaataatcaacaaaagagcaaacatattctagaagaataagaatacatggattgataactatctattaactcaagaatcacatgatgatttaataatctaaaggaaactacaaaatcaaggaaaaacgagaattgaaaccatctgttaagaaatgaatttaaccat

SEQ ID NO: 196212 - DNA, 786 bp, Cannabis indica
tacttttattttaacagtgaaaatgttgtcgcaaaaacactaattagagatgttctgcatcgatttctaaatcaattgcataatttatattaacttgtgatttgataaatatatttgttgtattctccttttatgagtttttttattataagttaaggtatttgctaaagtaattttagttccctgtattgttgttgattttaatatacattttaatgtaccaacaaccaggttactatttagttttatttttattgttagctttcatatatgtttttaagtgttatgttacttttagtcctctatttttgttgatggtttttaaatggatttaaagtccatgttacttcatgttgttggttttctatggattccaatgtatctgttactttttttgttgttgattttatataaattttaggttaccatgtttcattcttggttaggtatagtttacatcgtaccaagttacttttatacttttagttatatatcattgttggtattgatataatatatacctaattacgttacttttatcttgaaaagtaacttggtactgttatgtaatctaacaaaaaagtaacttagtacttttatattatttaataaaactaattttatactgttatttaaagagagaacctggtacttttaaaaaaaattgacttagactgaagtttacttttattttaaaaagtaacttcacacttttatgttctcgaaccaaagtaacctaatactgatatactatttaacaaaagtaacttaatactgttattaaaa

SEQ ID NO: 196213 - DNA, 1125 bp, Cannabis indica
cttgattacgtgcacttgcgtacgattcataattctcgtaacacatcgatcgaatccataggcaacagaaaaccatgacttgcatggccgcataggagttttttgatggagactggcgtaggccaaagggagtcattaagggttaatcaagaagaaatgactgtggtatggccaaacaaatgtgaattagattcgagagctgaagcaaagatcgattacgatctcagtgttggtctaggaatcatatcaagaaaactcgtgattcattgtgagatacccagataagatctggagtgcactttgatgcaagatgttagggttattacttattcttcttattagttgaaggagcataagttacgttaaccaatttattatctaaaatttgtaatagagattttcttttaggttttgatcaactatctctatggagggaatcgtgaaatattttaataactagagagaaagggatatgagacaaaaataatggttggagttagtcaaagattaagactatgaaattctttattatcctagggaggccaatttaatggaaggaaccttaactaggaaatgtcccaggggtgttttcagtacaactctggttcctcctcagttaatgatagtcatggtcaggttacgtttggagtttgcctgggtaaactcaataagttaacacttcaaccagattaattagataaaaaaaatgcttaatttatggatacaacttagttaaaaaaaactcgaaaataagttttaagctagctagatcagaaaattcttaatgtcagatcacgagatgtttcgttaataaactcgagtttgtgtctcagacagtgtagagctcataagagatactttaagaaaacttacaccactccttaaattgttacaatgttggtactattaggatgtaccaagacttgaaatttctacttactgatgaggtagaatacaaaatgatgtggtagttgatgtatttggaagccttatttgtcagtgaattaggtttaaccatcaaagactagaaaggttattgtgatttattagattttctcaagtgaaacaggaagaggttaccaaaagttatggtaattagagtacttaaaatcgtaagcatatttg

SEQ ID NO: 196214 - DNA, 1563 bp, Cannabis indica
acttggtatcagagccattactgccccacaaatgtcgactgacaaccaatcatctccacaagatccagccgcagatggaggaaacactactacaccagcaaatcctatccctgctgctgccagtacttttactgcagcaagctccagcaatactcagcttcaccaacccatatctcaccatttcagtacactaaatcaacccttctccctcaaactcgacagaaacaactatggtctgtggaaaacaatggtttcaaccattgttagaggccatcggcttgatggattcctaaatggaaccactatctgtcctccagagtttatcactgcagaaaactcatccgaagtcaccagatctacaaacccagattatgaaaactgggtcatcaatgaccagctcctcatggggtggttgtacagctccatgacagaaaccatagccttggaagtcatgggagttgctactgctgccagcttgtggcaagcacttgaacaactttatggtgctcactcaaaatctaagatggatgagaccagaacattgattcaggtcactcaaaaaggaaatactcctatgactgaatatctcagacaaaagaaaaattggtctgaccttctctctcttgcaggagaaccctattccgagtcacaactggttactaatgttctgtctggtttagatttcagttatctctctattgtgctgcagatagaggctagaccaaaaactacatggcaggagctccagaaattgctgctgagttttgacagcaagattgagagactccatgctcgatccaacatcaacaccaaaagtaacagcagcctcacagatccataagctaatctagctcaaacacctcaaactggaggacatgggagaggttccaatcactatccccaacatccaggaggaagaaatcccaacagaggaggaggaaacagagggagtcgtggaagaggcagatttggtggtaggacaactggatctaaaccaacatgtcaggtatgtggcaaatatggccactcagctgccatttgttacaatagatttgatgaaaactacatgggaacagacccgaatggtggtggtggtggcactcagaacaaacacactccatctgcctatgttgctgcaccagaaactttggagagtgatgcttggtttgctgacagtggggccagcaaccatatcacttttgactcctcttcaatgacacaaaagcaagaatatggtggtaaggaaaaggtcacagttggaaatggtaataaattgttaatttctcatcttggaaatggagttttacatactgttactggtcaaaatctggtgctaaaagaaatgttattagtgcctgaaattgccaaaaatttactaagtgtttccaagttgactcatgacaataatgttcttattgaattttattctgattgttgtgttgtgaaggacaaagcaacaaggaaggttcttcttcaagggatgcttaaagatggcctctatcaacttcaagcaccacactccatacccgatcctagaagttccaagaaaatcgagtcaataaa

SEQ ID NO: 196215 - DNA, 1398 bp, Cannabis indica
ccaagatacttgtcaaagtgctccactgccttaaccccaaacacgtcaacacaatccttctttgaggcctcgttaactgtcttcccaaagcacattttttattttccaaaatcgatagtcgcgcctgatgaagcttcgaaactagcaaggatcgttttaatttagttacactcctctcagttttcttccacaaatatcaaattgtcatctgcaaaaaaagatatgagacaacaagatatgtaccctcctgaacttcaagccatgtgtacgaccgttatcctttgcatcaagaattagactagatagagcttcagcacagaacagaaagatgaaggttgacaatgggtcgccttgacgaaggcctcgattgggaataaatttcctcatgggttttccaatcaacagtattgagaaggacactaatgagatacaatggtaaatcttatggacccatttatcagcaaaccccattttaatcataactgccttaacaaaattccactccactctatcgtaagctttcgacatatccagtttaaaggccacttttgacccattacaaaatctattacgcttcatacagtggatgccttcaaaccccaaaatagcattgtcatgtatcatactacctctaacaaaggcgctttggaactccgagatcaccacatgtatactattctttgaccaattcgccaggcatttagagatgatcttgtacaccacattgcacagactaatgggtctgaactcttccatcctcttaggcttatcgaccttagtgattagagtaataaaagtgtcattgaggtgctccatcggggaatcatgattaagtatgtttaggcacactttcaaaacgtcctctttggtggtttcccaatacttttgatagaagagcgctaggagaccatctcttctaggtgccttaaggggttaagggaaaacacaactttaataatttcatcctttgtaaaaggtttaagaagctcatggttggtttcctctgacacagtgtgtttcactttctccaccatatcgttaatggctcattggtcaggtctattagagatgaatattttcttaaaataatcacaagccacctcactaatatcggattgtttcttcttccagactccgtggctgctcaaaatctctgtgatcttgtttttcttcttcctagaggaagccttgtgatgaaaaatgtttgagtttttgtctccactcttcatccacaccgctctactacgttggtgccaatatctctcatgcttccccataattacattaagattcctttcctctaattttaaagctccccaagttttagcattcatgttcttagtaagatcctcgatcttcttttactttctttgaccttactattggaaattattttac

SEQ ID NO: 196216 - DNA, 765 bp, Cannabis indica
gtacaaaactaagattaatccatatgccataagaagaaaataccaataggcaataggtaaggaatcaaataccattcttagtagaaatgacaaatatgcaatatgagggaagaaaaaaataccaataggtataattgctgcatctgagccaccacaaagcatcagatcctgcatcaaagtttaagtaatactattattcacaacaataattacatagtcaaaaccttacaataaattttgcaaataactagcaatagaggccaaacacttacagcttcacctctaatgatgtggttagctgcgtttaagatacaaaagttgcttgtagcacaagcagtagagattgaataatttggacccatccatccctgcaattcaatgtataaagtggttactgcaaaactctagcaatcatcagggtcaggacatgcaatgaaatagcaacaatatcaaattcaagctgaccagatccattgcaagcatggcagaacccatatttgtagtagcaaaagggacacagaaaggattcatcttcctatatgaaatccttaaagcttcaattgcatcgttaaaaacctgttcaaaaacaatattagataataaattagcttgatatttaatcacactctaataagaacagagagagataaagctactttatgttatttcacatgaaagttcaaaagtgaaaccaataacaatttggtgcttattgggaaaagatctcacacattttatgtttactagttcactcagtcctaaatc

SEQ ID NO: 196217 - DNA, 2594 bp, Cannabis indica
ccttgtttttctctatcgtgcgaggcttcatatttggtaattccgtagcttcagttcagctcttacatgagaacaatcacccacgtaaatctttttagctataaacccaatctaacccctagattactacgtttttgtttttgtttctccttaaatttcttaaatttttctttttgttggtttttgatgtaaataaaaggtccatttcttatgctattttctccactctgtcatgctgatttcaagattccataaaagggtatccaaattctcagcaatgatttcccaactcaatctcaatcatttacttcaattctctcctttcgtgtatgaaagagccactattacgcagaacccatcttttatttatctaaagttccaattcttttccagttctagaatatcttacaatggttcattcttcgaatctgcatattcttctggttcttctcccatggcgactattcgggtctcgaggattgtgaaaactgaagcccaggaagcattatttgattaccttcactttaccaggaacatgggcttcacggacgctgagcatatcagtaagaactccccaacattcgttcagagtttgctttccgaaatcgataccgacaaagatgttggccgatcgttaaccaggttttttcgttaccaccccattaatgagtttgaaccatttttagagagcttgggtctgtgcccatcagagctccgtttgcttcttccaaaacacctaatgtatttgagtgatgacccttctatgcttgagaactatcatgtcttatgcgactacggaattcccagaattaagattggaaacatgtataaaaaagcaaaagagatttttggatatgactctggtgtaatgtattcgaaacttaagggttatgagaatctgggtttgaagaggcatactgtaattaagcttgttagctcttgtcctttgcttttgattggtagtgttgactctgattttgtagaagttcttcgaaaattgaagggattagggattgaaaatcattggattggagggtatgtaactagttacaccacttacagttggaagagaatgattgatacaatagaatttctagaaaagttgaagtataatgaggaacagatgtgtagtttgtttaaaacaaatcctcaattgttgcttgaaggttctgggaagagaatctttgcattgtttggcaggttactcaagttgggtctgaagatggacgatgtctgcatcatgtttaagcaaaattcaaaaatcttttcttggaagtgttcgaaaaatattttgcaggcagtggattttttgttggagattggaatgcctataaaagatattgccgaaattgtgactgaacacatggaattcatagggttgtctactttaaaaggacctagaactgtttataaagaattgaaggttggtaggtctggtctttgccaacttatgaaggaagaccctttaagggtgttaagattagcaacgaaattggaattgaagcgcagtgaacatgtaccatgccccaatccaagcagtcatttggaaaaagcatcattcttggtgaatttggggtatgttgaaaactcggacgagatgacaaaagctttgaaaaaattcagaggtagaggggatcaattgcaggagagattcgattgcctggtacaggctggtttggactgcaatgtggtagcagaaatcataaaacgtgctcctatggttctaaaccagagtaaagaccacattgaaaagaagattgataggttacaaaactctataggctatccactggaatctctgattgcttttccaagttatctatgctacaacatggagcgaatcgaccttagattctcaatgtatgtgtggttgagggatagaggtgcagccaagcctatgttgaaattgagcactcttctttcatgctcagattcaagatttgagaaatactttgttgatatccatcctgaaggtccagttgtgtgggaaagtctaaaagccccatcagcttcaacattggaataagtctgtctccagttttcacaatgttgtcttgtacgtaacagttgtttttatcattttcttcatttgttcatttatatttaatgcttatagttattcatcttcatttatttattggattaattgattcttttttcactaatatatatttgtcctttttctttttcttgttggcttagatacaagaagctgctatccacagtggatctcacaaaagatttctgtccacagtgaatgactgtaaagcaggacaatttgggaatgagtacttgcctcgtggaatccgaaataatcttaataatactttatggacaattgccttagtgtatggtttctttaaacaggtatgtgtttaagaaaatttggtaacaggttactctttgtgaaataatctgaatattgattttatttggattgtttgtgtgagaatttcggaatttgaaaatgaactagggaaagctgctgaaatcttatagcttatgccattataagtactggaaaatctgcttttataatatttgaatgcttgctaagaattattgtatagtgaccaatccttaatattcagtat

SEQ ID NO: 196218 - DNA, 3452 bp, Cannabis indica
aaaattaatttcttttaataatactctttaaaagtacacctaatatatataagtatatatttatatttatcttactcgcgcatgcatagtgtagagctgtcattcatacacgtcatcttaacttatacacattaatttatggatactaatcctaggtatcaaattaattaataattttgttttaagtattaatattatgtgtcaggctataatcaattattgagattcttgtgttaagttaagttgcttcttaattaatagaaaaaaaaaaaatagattcttctgtcaaaaactaatgtctcattaaattctaattaaaaagacttgctcactgatagtgaatttgtgattaggcaaaatggcctaattttatattacttcagaaatagattttgtgtttcatatagagctgttaaggaaaagtgaattttatggtttaaaagattcttaaaaaacatgcacaaattattttcattgaaatataagagacacaaatacataaatttatacataagttcaaaagtatttatttataatgtttgagtttagactatctttaatagttatactaatttagtatagaatctacactaatttggcatagaattttttattaattttagtacaacaacgtccaataattcacactaaatatcacacaaaatatcgcactaaataaatatattttacttaaaaaatctcgcattttacattatttacattaataacttaaaataattaattaattatataattatatcaaatttattagtaaaatttaaaatcttaaaataatttagtaaaataaaatatttattaatttaaacattataatttatatatatatagaaaaactcattaaaaattctatagttgctcctaatatacacgactatggtaaaaaataagcaaaccatgattattcattgcacccgagtaccataaaaatgtaccaagatctgaaactctattattggtagtgcaaaatgaagaaagatgtggtagattatgtgtcaaaatgtttaactttttaacagatcaaagcagaacatgaaaaattggcagggttactgcaacctttaacgcttcctgaggggaagtgggagaaaattataatggactttgtggttgatttacctagaaccacgtgaacgtatgattcggtatgagtcatagtggatcatttcacaaagtcactgcacgttttaccggtaaagataacttataatacagtggctagtatgcaaaattgtacgtaaaagagatagttcatcttcatggagctccgaaatccatcattttggacagagatctgaaatttacatcgaaattttggataagtctttagagatctatgggtacaaagctaaaatttagcacaacttttcacccacagatagatgggcagtttgaaaggataattcagatacttgatgagttgttgtgagcctttgttatggaatttgaaggttcttggagtaagtatttgcctctaatagaattttcctacaataacagttatcagagtacaataggaatggctccttatgaaatgttgtatggtaggaaatgtctttctccaattcattgggatgagataagagaaagcaaatgtttaggtcctgagttaatagagaaaatcaatgctcgatgcttgcttttcaaagcaggcaaaaaagttattctgatcctaagcgcatagacatagagttttaggtgggagaacatgttttcctacgagtctcaccaatgaagggtgtaaagtggtttgggaagagatgtaagttaagccctaggttcataggaccattcgagatactcgagaaggtcgagcaggtaggttattccctagccttaccaccagcattatcagctgtgtataatgtagttcatatttctctgttaaggaaatacgtgtcagaaccgacccatgccttgagatacgaagccctagaactacagtataatttttcctatgaggagcaaccagttcaaatcctcgataggaaggaaaatgttctctggaacaagaccatactttggtcaaaatactctggagtaacagtaaggtggaggaagccacctaggaattagagtttggcatgagggctaattatccagagttattcaggttagattttgaggacgaaatctttttaacagggggataattgtaatgaccgtatgattagaatatggtttagtaaggttattagcattaattataaatattttatgactatgcatgattttatttgttgtgggtctcatttttaggaaatgggcactagagttaaaatttctcaattttgaagattttattaatgtaataactaaaatattttgctattgttttctattacattagtctatatatctcaatgtggaaatagtaattatgtagaatttgtcttaattttctaaaaatgttacaagtgatgtaattctttattaaaataaagtgacaagtattttttttattgggccttgtaagttacgttgtgatagtataaagtgattagattaattattaaaattttatgcaagtgtgccattaattagagtaagtacatttgaatgatatatgttgatatatatatataatataaataatatatagtatttataaattatggtttaatcaagtggatgtgtaccctaacagttataagaccaggtggcactttgcatggaaacatgttttgatttaagggttaatcgtataaggcatacatgtggaataatccactaagactcttaagtacatcaagttatcaagtacaaaccttgatcatccatatatacatggcttgttgagatttaaaagaatttgaattttgaatatcttgcacgtgggctactagtgtgggagtcataaattgatgtacttaagagtcgtagtggattaattaaagtaaatataatctgataaggtaattaagattaagaatatattatttgaaatttaaatttaaattctagctatgatttatatgactagcttaagaatcggtaacttccttactttattgaccgagtatgatgaagtagattgaaaattgaacattatctagctttttatttttaaggtggacgtgcggcattccatggatggttatttatttattttttgttttaagggaaggatcaatgatttcatttaacatagtctattacactactcaacgttaagcaaaagcaaatcaatcccgatatgggcgagcaaacggcaacaaggcctaaagactgacctacattcatagtagtcaaagtcattgtaaagtaccataccaccataaatggaagataaggaaaaaaaaaccaaggataccaacctccaaatctctaacaagagaatgtccataactagacccaaaaataaaagcaaaaacccaaaataaaacatcaagattaaaagcagtcaaaaatctaaagaaaataacaacaaaaaa

SEQ ID NO: 196219 - DNA, 740 bp, Cannabis indica
tttgtgtatttatgaaataattttctgtttttgtaagtgttttgcaaccagggcgggttgaccccgacccgtaaagatcaatggactaacgaacgagtcgaatgacttcgtttgccgttgtcttttttcttttatattttttttctgttgtttctgtgacgtttgctcttgtcttaaagatacaaaagaaaaaatcaagttctgactgaccatttggatcatcatcattgtcttcctcctctcatttcaaattttcctcaggtaagtaaaaaccctaaatgttcaacttcaaattcgagattttcctttctaaaaaacttgctttggcttaatcaatgaaactacctaactgaatttatttcgtttcattatttgttctcttttcgttttcttatttgattcttttttggaatttgtggaagtttgagaattatcgggagtaaaatgcataaacgcattaacgctagagaaataacaaagagactctttgataagagttcaaagtaatgaatttttgaaacaagaattagggtactgatcacagtaaattcgtttgagtttgtggggatttttattatggttgtgtagaataaattggggatacataatgtttgtctcttttatttttcttaagtgaatgatattagggttatctcaggacaaagaaacttggtgctttccttgttctgtttgaagctttttcaattgagagcaatataaatctgagaagagagtcctta

SEQ ID NO: 196220 - DNA, 555 bp, Cannabis indica
agtgaattgcatagactaggtgcatctagcctagatgtttgggtaactgattccccatacaggatctaaataacaatatgatgagagttgttttcccttttaagattggagttttcaatgacaagagatttatgtatattttggctgtatgtgcagattgcaagaactactacatggaacaagtcctctcttcccttcagacctttggtgcttagaaggagctgatctttcttattatggccctttttaagagatcttttagtttactagtactagtaaaagtaaataaatagagagaccattttagaataaggtggtgttcgctcaagctgcagttaactcgagccgaattgctgggaaagtacaactttcagatttggtgataatttttaatccagtggagatgatctttgtttttgctactatcgtcctactcttaagattgattttcagttcatgataaattctaatggtcctctttatgctcagagtattgtgaaatataatggattctttgtttgtaaatacaaccttctgtgaatattttgatcatgc

SEQ ID NO: 196221 - DNA, 2454 bp, Cannabis indica
tctcagtgtaactctacgtacatgtcaccaatatcctggtatgcaaatctgatggctactgattttcctaacataaatctgttggcatctcgatgtaactctatgtacacctcactgataccatgatatattattctaatggcaactaacatgcatgctaaatatgtctacatatatacaactattatattaatcttagcttgattctgaatgcaagtatgtcgataactctgagtggagatagttgctcgacgatttaaggccctaagtcacaatttacgtaaaactggtaagtgatccgctaaatcacttttggagacttaaacttgaaattaaaagttactccatcgattattaacgtggtaataccctaaatatcgataaaatatgaaaaattagggttctgaaactgctaaaactggtaaactgaattcccaaaacggtaaatagattcctagggtcctgcttgggaaaatggttaaccagttctttgtggaaaccctaaaagcttcactatatgctcaaaactttcccaaatcgtaccaaactctccagaaacctgattaagttgtaacaaacatatttcaaccaaaaacagtagctataactccctgaatttaattttaccattaaataaccaagtttgagcttaaaaactcaaaccttgttcaattttttatacaaccacccaaaaccagaacaaaacaactgatataacctaaaaacaactcaatagaacaacctctaacaccactaacttccacaacaactaaaatagaaccaaaatccctaactcctccatgaaaccaaatataaaccttaaaatttaaaagagataaaagagggattagcttaccttaaccttctcaacaattaatccgtaaaaaccttagctgaaatctcttaaattggtctgaatccttgtgttttcttgtagccgaaccccaagagagataaagggtgaagggttatgttgatgatgtatttggataattacaacttaactttttttatttagctaataaaataataataaataaaataaattttactagaaaacccacttatttcccattaataaactaaagccaaaagacaattttactttttactttactaagaagtaacctcaccctctaggggtaaaatggtccaaaaactatagccccaattaaatcgtgacattccaaatgtttaaccttcatacctcgctaattctaagataattaatcgtataagtgactctattggccaaaccattgcattctaccgtgatcgggcataaaacataaaaatcataaaatttcatacagagtatatgtaatacatctagaattcgaatatattttcgtaattgtgaaaatatttctctaaggactatttttgacaataagctctaattcctactaagaagcacataattataaattaatatttcaattctaaattatctgctaattcccatgatttaactatacggtcattacacctatgacttcagttattagcaaaataaccaaaaccataggtaattttttatttgttttctattcgatatagaatgattaatatagagagggagagtctaatataaacaaattgcctagaatgggttctttgtcaaaataatttttttattaaaaaaataaaagaaccacctgcaaacaagaaaaaaaatgatgagatcacagaataagagagagagcttcaagggccaacagtggttgaatctttggggttgcagtgtcatcggtgttagggctagcaatggctagactaagagacacagaaaaaaaaagatagagggatagaaagaagaaagaaaaaaaaaagcttctagagagagagagattttaggtaagcggttgagtatatgttagaattatagggtgtctttaggtttttattatgcgttgaagcccatttaggagttcaaaaacccttaggcttctactatttccaataaccgaaacctaaagtgttccataattattttttttctttctgtttagctttggttttctatatatacttgaagctatatgtgagcaactaaataaatgtgacgagagacgctactagaaggttatggcttcacttttttttatgattgaaaaaattcgaagctaaaacctaatatggtaacattggcatattacaactaacaacttgtattgacctataaaaaagcctataatactcacatcaagtcaaagattcaaacttcaaaaataattctccatgtgagctaagatttagatatatatatatatatatatggagagagagataagtataccgagagaaatacaaagaaaggaagataagaaaataagtgagaatctgagaggacaatattaaagaaaattggatagattatcaacaacatttatgatttgaattatgaagaagacgatgtaacattacatgttgatgatactgaaacttgagcat

SEQ ID NO: 196222 - DNA, 870 bp, Cannabis indica
caaaataatgttaaacataataatattttgatgtcttcttggaaagaggtggcaatactccacctgcacccaatccaaccaagcccggcgccaccctcaaccacaggaactttgccggaagtagtcgtcgtcatcctccacacctacctcactcagctacctaatattctacccaattcctcaacatactaacaaattagataaattatttttggaaaattaaacaaattattttgattttttcagctgatcatgatgtgcttgtaatatattttttgtaatatttaaatgataacctttatattgttactttttattatttattttgttacacaatctctttagttttgtcaaattcggaccaaaaatgccatcttaattaatttggacagtttaaggaggacacaatcaattctatcaaatattgtttattgtataaacttttgtaacaacatacaaaaatatatatcaatatcgtacgcgtctaattggtacatcattaaatatagaatattttaattaaaaaaatatataattaaattaaattaataatagaatttgtatattaattggtatagaacactacgtactaactaataatatcgattacctagcaatatactagctcttatacttttagatattttatagcaactacgagatgagcatttgttcatataacatttttagtttttttttttgggggggaaatcaaagagtgcaaaactgcaaactgtaaatacaattgtaaggcagccgtgagattagatgggctttaaaaaaatattaaacctttattcaaaatatatgtggacttttaaaatataaaaaaaataatgtaatatttttcaaaggtaaaaatatttattt

SEQ ID NO: 196223 - DNA, 918 bp, Cannabis indica
ctatggtacaatgctaatcaaataatatgaatttttccgctgcatacctaatttagtaccataaaaactaacaagatctccatcgactcttgtcttcgcctgggctgcaggatctacgtcgtccataggagtatctccatcatggccaccagtttattttaagtgagtaccatggttgtagtatacaacctttgacggtatcattactttcttcagctcttaatgaaagtaccaaaatgtttatcaaaattttcaaaaactaataagctataaacaaaagctaaagacatagataaataacaccagagtttttacgtgattggggcattaatgaaccttaatccacgagtcaatattattatgctaagactggaaaagccttaggatttacacaagtgtttgaaccctaaaatttacctaagcaattgaggaatgagattctaaccctttgcttgtatggttgttcttatatttatattgttagggttctttttcgttcgaatttgcccattggtgggttaaatacaaataatatattaacttttgcacatcaattgaattattatatttgctaatgtttggaaagataaatgcatgtttgacttttgatttaaagtctaaaccactttagaacttgtttgataattatttgaggtgaaattgataaattacatctgattttgagatatgatatatgtattttttttttttggatcgattaagctttttaagtttaccttagttgtgaattctctagttttacccaatttgagcctaaatgttgacatcttattttttctttttaaccctatgcaataacctttgagcctaaaaattaaattcttattcatccttttcacaccgtagtatattaatgttttatatatttgtatatatgtgagagttttgttgatgaga

SEQ ID NO: 196224 - DNA, 640 bp, Cannabis indica
aaattttgataggtttaacatggacaccaacttttaacaaaaaatcttaattcttataagaagagcagacccaaaaattttgttctcctagacaaaacataaaaattaagacaaaataaaaattaatttaaaaaataaaaaaattaaatattaaaattttatgacacccatagtcctttgctacaaaagtcactcatacctttcattctttcaatatacattattatcctatatacatagataagctaaggtggttaaatagaacaaatcaacacaaccaatttttatttattttttcctgaaaatacaaacaaattaatcctagccaaaaatagaacaaaagattcgaaaacattcaaccataaattatcgcacgttatcataatgctatataaaaaattaatggtacatatatatatatatatatatatatatttgttacttgtatgtgtgtgtgggagcacatgttaggtacgtatacatagttgatgataatataattaaagaaaaaaaaagacactatataataaaataggcaggctgtagaagaacacacctaactgttatgataaatatataataatagacataattggtctaacgtctatggacttgccttaaaactcgcctatcattacta

SEQ ID NO: 196225 - DNA, 1361 bp, Cannabis indica
taagttttctctttttgtatagaacgaatattgctaatttatcttttcttagttttttggaattgatattatttttgttagtatttttttgcattttaagttgttcaagtagaatgtttagctttacttgtagcattagattgtgcttttactgtgagactttctttacattttgttggatctgattgtttagcggttgtaattgtattttccaaacgcacttcttttctcaatgaacttggttcctttttagagaatttagctagtttaatgtccaatttcttgaagtatccctaatccatgttcgtcgaacagccaatggggatgcacatggattagctcggtatgcttttcgggtggatagagaactagtatggtttgatgagattccttcttttattggagtttcttaagacttaaagtttgtatgacattataattttttttttttcaatgaagttattcattgctaaaaaaattatgtatgctttatattataataacatgtatttttagagtacatccaatcaaatcttcaaattattgttggcgtggcatatcattttctctttttcacctattcaaattactgttggcgtggcatgatagagttgagtggctaacaagacagtgtcattttgagggttgctttgttatggaatcgcaagggagggacggatagctatgttatggaaggagaatgaggtggctactcatgctggtttctcaaacaaccatattaatgttactgttaaaatggaaaggagtggtgtttggctttttactggtttatatagagaaccaaaccgtaatctaagacataaaacatggtcgttgattcgtgatttggctgcctctgtcaagggcccttggtgtgttatgggcgatgtgaataatgtctgtagggtaaatgataaaaaaggtgggcgtccttatcatgcagctcttattcaagtttctaatgatgctctttataatagaagacaacaggatttatgcctggagggctatccattcacatgggagtgagtaacagggactgacaatttggtggaagtgcgccttgatcgtgcattggtcaaccaagagtggttatcgtgcttctctatggctaaactctataatcttgaggtgagcttttctaatcattgtcccattttcttggttcttaatcctgatgttccttcattttctaagcgcaagtttagatttgaaaatgtttggtttaaggactcaatgtgcctccaaattatccaggattactgggagttttaagggggcctgaatttgaaggaaaaactattattttgtggtgagaagctggcaatttggggttaggatattttgggtaatcttaagaa

SEQ ID NO: 196226 - DNA, 575 bp, Cannabis indica
aagaaaacatgcacatggtttgcaagcaatttgcatcaaaaatcataaatgattggccttttgcacaaagtggggtttcatgtgaagtacatcatgaatacaagggcaagttaccctatgtttctgtttttttattttttggacattgcaggtgttaatgcaaccgacaaaacttaaatgtctaagtaaataaatttcaagaaaattataaaagggggtaaagttttctttgccacctctcaaaacccaaaaacaaggcagagcacttgaatgaattgagtctcgagatgtatgtacagttaactgtagacctccgaagtacaacaaatttctactctataatagtttaaataaaccaacggcttaaatgtgaatccaactgggaccaaaactagtgcaagggtcagggtagggtctacttgattgatctgttcccttttaatacagctaagtatggagcttgaattttctgtacaatatagtagtaatgaaagcttaggtatatgcagctcaattatttgagagagaaagagagagaaaacccacttgtaatgagtaggagaaattgatagaaa

SEQ ID NO: 196227 - DNA, 759 bp, Cannabis indica
atgttatgggtcctatcatccccccccatgaaatccagcaaggtgacccactctcaatatatcttttctattatttgtggtaagggtttatcatcaattatcaagaagttcgaattaaatcaaatcctccaagggtgacatgtggctaatggggctccatcaatattgcatatgttgtgtactgatgatagttacttattttgtcaagcctcttcgggggcagcttcaaatgtacgcaccttgcttcactcttttgaaatggcgtctagccaaaaagtgaatgtcaccatgtcatccatattctttagccccaacactgatctttgctaaagaatgaaatctgttcaacactggggatgcctgaagctgatgagcatagtctttaccttgggcttcctaatatcattggtaggaaaaagacaacaatacttggctttctaaaaaataaagtggtggccggtttctgtctcgtgcaagcaaagaaatttttcttaaaacggttattcaatcgcttcccaattatgatatgagtgtctttcttattcctaaaaaaatctgcactgaaattgagacactaatggctaacttctggtggaagaccacatccaacaaaggtaacgggattatttggatggcttgggatagatggcggttcataaagactctgggggtattggttttcaacgaccacatgattttaaccttgaaattcttgcaagacaaggttggtcgcttgtcatctcaccaaattcgcttgtc

SEQ ID NO: 196228 - DNA, 1334 bp, Cannabis indica
tggcaacgtgattctaaaaattgcttggtcaaacaagtagtaagttttaggtgaaattaaaaacgtttttaaaaatttaagcataatgaaacaagagtttaaagataaagtcaatggaattggaaaggtaatatttcaagtactaaaatgtttagattgtgtaaaaagattacaaggctagcaggttgttaaggatatcaacagaacaggtttggtgatgttccagccatgaataacaaccttcttgaaattgaagaggttgttcataaagatgccatgaatttggaaattggtgtctagaaagattatatgcatgcatgctcatattgcatgagaaaagcatgttcctccactcacaataactcccacactacaccaaacctacgtctcaatggaagaagttgttttcgtaagtatatttagattaatatttagtcgttacattaaaaatataattataattgttatatttttatatgaaatactatacgttattattactaggtaaaaatcctatttttaaacataaaaattattataattaattaatttttaattaaaatattgaataagatattttcacgtttataaatatatttttttattttttatttataaaaaaataataaataaaatcaagaagttagtatcagattataatttattaattatttttgtttaatttttaaattaattacaattatttaacattcatgatctaaaaattaaaataagtgtaaccacaacgattatatatttaatgtaactaatgaaatctccttcataattaattatattatgtgatcagtacatatattataattatagcatgttaattttaaataatttatattattaaaaatagaattcaaacagttaattatttacttatttgtttcaatactcgtgttattcattattttaaattaaattataaattattttaatttttttgaaaattaataaaatactatgcatgcggtagaaaaaaatgacacatctaccgaaaaatctcagtgtatagtaagggttaataatagggacaaaaattaaggtttcttgtttctaagtctatatggctatagaggttgtcttttttctctcgccaggcctgccgtccttccttgggcttaggtgtgacttggccagggttgtattttgctatgcaattcgatttttgctactgcgaatagtcttctctgtgattattttgagtgtttagtcttgtcatagtgacatagttttgagtatttttgtcttgtcttaatttgtgacatgattttgagtaattttcagtcttgtctgtgtagtacaaatttttttttttgtttttt

SEQ ID NO: 196229 - DNA, 727 bp, Cannabis indica
tatatatatatttatataagagccttgagctcctccccacaaataatttgagtctatttaatttataaagaaccatccatttcaactaagtcaaagtggtgtgtagcatgggagttaacactaaaaaaataatgtccctcatggaggtttgagctggtgttgaatatatacatatataatatgtataataggagagtgacctctataggtaggtaatagattgtaattatatatatacatattgttactaattaggcctcattttctaataaatatgagactttatgagtgtttatttatcctttacttttttcaatactaattttagacagtttgtttgaaacaaatgctctgtttcataaattggtaatacgaattgaagacaccatcaatctttttattttattattattacaaataaataaaacttataaagatatggaaatttctaatccgtaccaaataaataaataaatatgagactgagttttgtggcctatggctatggccagttgggagagttggtataataataaggtacatattatataagcatacaataattacttcaatggcccattttaagtcttctcttctactgtttcatcctccaccatagaatattcatctacccttttattctttctttaatattgctaacaatattaatgatgtcaccacacataaatagcgcgaaatgttaaaagacattattagtggtatttaa

SEQ ID NO: 196230 - DNA, 511 bp, Cannabis indica
tgctaaatttcctttttgtagtactgcttaatttaaaattaacttattgttgatctatgatgagtagtttattaatcatgaactcatcagttagttaggctctgttatacttgataaacgtcttatacctactcttttgaataatatcgttaattcagatataattaaagctatatataaagagatatacacatgcatcggatgtatagtttatatagtcctaattatctctcaatatacgaccccctttattattaaccctaatttatattatgaaattaagctgatatatatccaagaaatggctgtatgcttacaaaaaaaaaaaaaagagatggctatatgtatatgtcgtttctatattgattaatttcttggatttttctttttaaaatgtcagagaggaatctttgaaatatataataattaagtgacataaaacccatattacattaatgaatattattgtaccacgaaataaatgaactaacaaatatctattctatataaa

SEQ ID NO: 196231 - DNA, 743 bp, Cannabis indica
ttttttttggctagagagtcccacattggaacctgcacattctaatgtgcacattactctatttacattcttaatgacactctcacattcttatcactttaaaaattatttattttttaaagggtgtaaaacacttggcactatattgtccatactaacataacatgaagaacttgttcactccatacaaacagtacattgaattaaaatttgattcaattttctatttgaaaggaactcataccatattctatctctaatgttcttgtatcagttgtttctcatgcccctatttcatttcctcaacaaaagatattaattgatcactctctcagttttattaaaaaaatgaaaattgtgtaaaagcacataaaggaattgtgaatgaaaaacagagaatagcaaaagttactttctctattagaggttgctttatttaaattgaaaagactacaagaaaaaaaaaacaagaaagctaataaaaagtttgttactgaactaacttcaactttttttaacctaattaactaattgaccaactgatacaaagatctatttaataatgctatcaaattgaactacattagggaataagaggttttatggttagtaaaaagaattttaagagttaagataaaaatagttcgaccaaaatcgagttcaagagtctaaattattattaaaatagagaagcagatcaataacttttgcagtgtttaaaataatacttactaaaataaaaa

SEQ ID NO: 196232 - DNA, 756 bp, Cannabis indica
aaacaaaaaaaaaaacatgaaatgtatagtatagatagttataagaaaatttaatatataattagaacgattaacgaaacctaatatataattaatattaatgtatattagaagatttaaggattgaacataccaatgtggatggctttcttaaatagctcaaagaaattgacacacacttgattgttttgaggataattgacattactatcgttggtcttttcactgggtgctgattcatctgttttatcatcatattcttctatcttccactcatgatcaacatatatgccttcataattaatttgaaaaatgaaaaccaaaacattgaagtagtttaaatatatgtaattatactaattataaataatttgtacgcgtatatatatacacactaaaatattacatttagggctcgtttgccatatataaagattgtgttttatataataataagaaatgctacatttggataaaactttgtattacattaattattactactataaagttcaatacaatataaattgtattattaaattcataataaatgatctgtattactagcttgttttataatatttagaaagggtctagccgagagttggagaccgaccccagacatggaccttggacccagaccccgacttggactcggctccatacctgggtcccgggccaacacacggatcctggaccgggatcctgacctcagacgggacctggacccagacttgaccctaaatcaaacccaga

SEQ ID NO: 196233 - DNA, 537 bp, Cannabis indica
cacacacaacataaaatagagtttatgataatggcactaccccattattttgatcaacaatactaataatatactcaatctcttccgcaacgtgcttcatcgaaggccgattttgtctccgctcatccaaacaagccacagccaaagaccccaaagccttgatagtctccaacaccaacttatcagctccttccttaagctccgaatcaatagcgtccaacaacctctcttccctcaaaagtttcttaacataaaccaccaagttcacgtcctcttcttctctattaaaatcaatggctttcttcgaagtcaaaagctccaacaacaccaccccaaaactataaacatcactcttatccgtcaattgaaaattaatatagtattcagggtctaggtaccctaatgtcccctgtgcacaagtagtgatatgactcgtttcggttaccacaagcctagagagcccaaaatcagccactttcgcatcaaacttttcatttaaaagaatgttgctcgatttcacatcacggtggtagattc

SEQ ID NO: 196234 - DNA, 1204 bp, Cannabis indica
tagttaaaaataattaaaaatgatagtatgggaatgatcaacgaaattttacgaattttaaaaatcttaaaaatatctacaattttaagcatcttcaaaattactacaaaatatctaagcataaatatgttttcaaatgtttaaaatgactaataaagtaaaaaatgaataaaatatactaaaataaatatttctattatcattgttcttaaattataatttaaacaataaaaataatagctaagaatgtcaattttgaatttaaacaattatggttaggatatttggaaaatatctagactaatattgaattttattaaaatttaattagcatataagataattatcatataatattttaactaaaaatatgtcaaaaatgataatatctaatcttataaattaaatgataaataaaattactaaattaatcattattaaattgaaatcataatttaaaaaaatatgaaaaatatcaaaattcaaatttatattttttaatatccaaaatcaataataatctattacaaaattaaatatattaattttaaaatgataattaagttcaaatatgaacaatacaatatttatactgattttcaggatttttagaattttaaataattaaaaatgaattttaaaaaaatccaaagaaaatcgaattttggtgacaaaagtcatcttgtctaaaattttcaatgatactagaggttgcgcgcacgcggatggggtatcagggatgagtgacatgcacagagggggccgatcgagaaactcagtgtgcgtctgagatttgtgcatgtagaccatgctagcatggtccgtgcacgtacggaaggccttctagctctgaaaattgcaggcattccaccatgcatgcatggtgcccgaccatcaatcttcaaaattgaatttcaggtttagttttgacccaaattcaatttcataaaattcatacttgcttaaaattcaaccaactttaattctaaaataattttaatcacaaaatacgtaaaatataattatttttcatagaattacatgtagtttcacataaaattaaaaaaatcacataaactcaacatgaaacatccaaatcaatgcaaaaatagtacatatcgttttaaatccatagtttatgaaagtaaattattaccttagcttcgaggcaagttgttaatcttattttaccaagatcttaatt

SEQ ID NO: 196235 - DNA, 3160 bp, Cannabis indica
ataaatattaattgattaattaattgaataaaatattcctataaaattctaaaaaaaaccaaatatgtttatcaagtctaaaaattaaattttatttttttttttgaaggaaaatcttattaaacaaagaaacaagactacatcaactgaggcaagtcagccttacaaaaattggctaaccaactaggaaaaaaatgagagaaaaattgagaagtttgagttgctaaacatctcttagccaacatattggcacattcattattctctctatgtacatgaacaatgttataatcctaaaagtctttcaatctagtcttgatcttgtgaaggagagtgctaattgcactagaatgagaaacctgttagtgcagatcatccaccactttcttacagtcggtttggatttcgaattggccattaaccgtgactggaatgagcgttatagcttctaggatagcccaagcttcagccatttcagttgagcagctgcaggggagataaaccataccagaaatcatgatttccccttgccaattgcgccaaatgaagccgagaccaacgccatttgattcctggtttagtgcagcatcacagcttacacagtagctggcttgggagggtcttttccacagtttcagcttgggggggatgtcatatcaacctgaattgtagctttcctttgagtagtgtctctcgggtaagcagagaaaacccaatccaaaagctgaacaccattcatatttgggagtttattccatttcctattccgattttcccaaatagcccacataactttgattgcatcttcaaactcggtttgccccaaccgattatgtaagacagtaaggatatcaaacatagatccttcttccactaaatcacacttcgcataccaaggaataagtttccaaaccgctttagtttccgtacacttccacaaagcatgagttaatgtttcagcatcattctcacaagcctcacaattcggatttacctccattcctctatgaagaagatttgtttttgttggcagccagttattgcagactctccagctaaaaaatttcatccgagggggcagcttcatgctccatatcatcttccaccatttgtgaatttcttccatgttagagcacctaggaggatgtaaattcatttccctaccaactctataaccactttttaccatgtattggccatttggagtatagggccaatgcaacgagtcctcaacatacatgttaatcgaaattccttgtatccaaggaacatcattcggatgaaaatgctgagtgacttttgccatgttccactgcccttcggttgtgatgaattggttgatttttgtattaggttcgactccgagattttgagttagcatagtcacatccggtcgtggtagccatttgtcttcccaaactcttatctctcttccatttccaaccttccagcgagccccttccttcaagatcctcctcccccaacaaatacctttccaaatacaagaagaacccgagggacagccagcctccatgaatagcgtagtgggataatagttattctttaatacccgagccaataaagagtaaggattttggataagtctccatccttgtttggccaaaagtgcttgattaaactcagttaggctcctaaagccgagacctccttcttctttaggcttgcaaagtttagccgaagacccccaatgaagtttcttatttttctttgtaaaagttggctgccaaagtttggagattgttgatgagcttcttgggaagacgaaagcaactcattgtgtaactcggaattgcttgcacaatagcttttataagtatttcccggcctgcttgagaaaacatcaaactcttccaccctttaagtttattccaaactttgtccttgatgacatcaaagacctccttcttccttttcccaacaaaactagggagccccaagtacttggcatggttagagacaaggcgcactcccaatctattagcaagctcatgtccctggattggagtgatccttttccccatacatatttcagatttatccagattattgttgccccgaaagtctagagtacctttgcaaaactagcttcatagtatcacattcactttcctttgcattgaggaacgcaaagctgtcatcggcaaagaataagtgagaaactttgactctatcttttccgaattgaaccccattaatctgaccagctctctcggcttcatgtataaggcatgataatccctccgaacaaagtaagaagaggtaaggagataagatcaccttggcgaagaccccgggttggttggaaaaatccaagcttctcaccattgataagaaccgagaacgagacacttgttacacatctcattattttttcaatccatttctcctcatacccgagccccctcatcatagtgattaagaaattccactcaactctatcgtaggctttggacatatccaatttcagagtcattttcttgtcattcccaaacctttttcttcatgcagtgtaggctttcgaacccaattatagcattatcttggataagtctacctcccacaaaagcgctttgctcctccgatattacttgatgaaggctgtttttcattcttccagctagacacttggccactattttgtacacagcattacaaagacttattggtctgaaatctgtcatctttgtggccttaggagttttcggtataaggcaaattaaagtatcattgatttccttcactggcatgtcttcatttagaattcctaaacaaacttttgttatctcgagaccgatagtagaccaatacttcctatagaaaagaccgggcaaaccatcacctggggccttttgggggtgtatatctcgcattgccttgaagatatcctccgttgtgaaaggatctaggagctgttcattggttaatcgtgaaattctgtgggggacaatcctttgaaaatctcttaactctgcctcagtagcaggagtggaggtgaataattttttgaaataatcacaagccaccctgcccatatgccgattccttgtgacccattgcagctgctcattaaccagcccctttattgtttttttttgcctttctattactagctttcagatgaaaaaacttggtgttcttg

SEQ ID NO: 196236 - DNA, 1284 bp, Cannabis indica
tttttttaactttttcttaaattatttccataaaatataaaaagaaaaaaaaaatattttcgcactaataatataaaaatttataaaatttataattttcgggagatgaaatgataaagttaattttaagataatttgttagggaaaaaaattaggttttttattcttaaatctatagctattggagaatgtctttttttttccagccaggcccgccagtcttttttagacttaggtgcggcgtggtcaaaattgtattttgcattcgatttttgctactgcgattagtcttgtttttgtaacatggtgttgagtgtttgtcttgtctctgtgatatggtaataagtgttttagtcttgtctaaatgacataattttgagtgttttagttttgtttgtgtgacatggttttgtttcgttgttagttcttctttgttcttcgatgactcgccatcaaatcgtaattagtagttgggaataataaattctctgagactgaaagaattgttagtattgaagtaacgtatcttatacaatagttgagtgctcaagctacgagattgaatgaacttgctgctataatttttactgtcgtgtcttcttagcggtagatgaaacaaaatataggtgttcttaaagttaattataatgttataatatttttttatatatgatttattttaatcttttgtcaaatgatttagaaattatgtgaattattatttggctcaatttttttatatcttgattgtagactattattgtaactaattgtgtatcttgatttagaaagttctataatttatttaaaaaatgatagttcaaaaaattatgtttaattggtatatatgaatatgagaatgtcttgtataaaaatctcataaagtttacaataataataataataataaaagatagataaatgtgaaacattttatgtaaatgagttttgtttacttaactctataaaattaaagtgtgaaccatgaataaattaagaatacaaacttactatgaaacatgaaataaatttctctttttcactttttaattatggtactaaaaaagagtttaactgttcaaattaaccgtagattcaatagattataaaaaaaaaaaaaaacaaaaaaacaaacaaatttaacaaaataaattaaaatactaatttacaagtacataaagaaaatatgaccactttctattcatcttaattaaaaaaaacgaaaagaaattagaagtagatattgttataatagatagagtcggctcaagaataagacagtaa

SEQ ID NO: 196237 - DNA, 832 bp, Cannabis indica
tttcatttccttcctcttcttcaatcactctcagcctttctctagctttatctctgtaaattgcaagaaaacttcgtctcttttaacccaaaaaaggaaaagaagctttctttcccatctcttacaagcccagtaaagatgccgagcagaaatcccggagtcctaactcaggattgggagccagttgttctccacaagtctaagccgaaggctcaggatctacgagacccgaaggccgtgaaccgtgcactccgatccggcgccgctgttcagacaatcaagaagttcgatgccggagccaacaagaaggccaccaccgcaccagtcgtcaacgtgaggaagctcgaagaagggaccgagcctgcagctctgaatcgggtggcacccgaggtgaggctagcgattcagaaagcgcggatggcgaagaatttgagccagggtgacttggccaagcaaatcaacgagcgtcctcaggtggtacaggaatatgagaatggtaaagctgtgccgaaccaggccgtgttggcgaagatggaaagggttcttggcgtcaagctcaggggaaagattggaaaatgagttacgatcgatcaacgtgatgttaagacaaaattgtgaatttgttgaaattcgaatagcttatgggttttttttttttttttcggagttacatataactatagtttttctttgtaagcattgctaaagatctaagattctgataatggaagtaattagattgtaacgatatggatatagtagaataaatcgtaatcttgccagaatcttaatcgaagatttgtgcgttgatttgatctttgatttggataga

SEQ ID NO: 196238 - DNA, 1050 bp, Cannabis indica
tctttcctgataattcaatcacagaaatctttcatttgttgttgtcccttcatataattaaacataactaagcaagtacatttttttttggaagaatttttttgaaatcgcaataatgcctttgtcattgaatgaattaaaaatttgaagtttacattgtatgaaaaacaaaattctgtatcttttggaaaaagatgacttgatttgtatttatatatttatatttatttttgattgatttagattgatgccccctaattaaaggaaataagtggtgaagtactaaataaatgcatgtaagctaatatatacaaagcttgtatatagaacatacaagtgtatatgtatcttttggagtcttcggtcaaaaggggaaaagaaaaataagaattatttgatggtatcaagattgcattttcttataacttccatatatattttatgatactaagaattaagggaatgggatccgggacctcctactcaagtgtaatgtaattgagttgttgccgttgctgttgttcgttttttttcgtttgtattcgagttgttcactctgttttttagcttgttccgttttctagtctgtttagactcttgggttttttatgccttttaatgaatcggtgtccttggacacccccttcaataaaaaaaaaaaaaaaaaaaacaaaaaaaaaaagtagggtctttattatgaattgagttatattgatggtttagtatgactatttagtattattgcttttaataatggaattatctcggcattggatttaactggtatattataaatgggtaaaacaaatacagaagtttgagagataataaagtcttggtcttgaaatgtggcttagacttaagaatttgagagataatggaattaacggcattgtattaccaatacaatagttgtttttttgttttatctatttataatatacttaagaatatgataatttaatttgtttctctgaatatacttaagaatatctgtgatactcgcaccaggcatgtatgacttcttaaatagtgtattttttttttata

SEQ ID NO: 196239 - DNA, 1199 bp, Cannabis indica
cgaaattgtcaaaagcttttcagctatggccagacctcaagaaaatggaaaagtggaagctattaacaatattttgaagacaaccttgaaaaagaagcttcaagcttgcaaagcacactggctggaagaacttccaagagttctttgggcctacagaacaactaaaagaacttcaaccggccatactccatactctatgacatatggatccaaagcagtaatcctagttgaatccatagtgccttcacataggagagaatcctatgaccctactcgaaaccacgctctacttcaagaatctttagatttgcatcggtcgctcgtcctcaatccaacagacaagtcaaagctatgaataaaactttgaaagacaccctaaaaaggagactcaaagtggcaaaagggaactggcccgaagagctccctcaagtgctttggtcataccacacctcacattggacctcgactaggcacacccttttctcgcttacttttggaagtgaagccatgaatcctgtggagatcaatattgcttctcatcgcacacaatattacgaacaacactataatcatttgttgctagaagagtctcttgacttacttgatgagagaagggaagaatcacaaataaggaacacgacctactaacaaagggtcaaaaaatatttcaatacccaagtacgcagcagagagatcaaaatagtagatatggtacttagaagagtttttttctcgcaacacgtgacccatctgtaggagtacttgaactaaattgggaaggaccttaccaaatatcctccataattcatcgaggggtgtacaagattgccagattaaatagggacttggtgccaagaatatggaacaaacaacatttgaggaaattctatcagtaatgacagttgtcaagttatttagttaaaaaattttatggtttttgagcttcaaaggaacgtcatttaaatttcctttttagacaattggatatttatcttttaatatatttttgcaccttttgcaaaaatatctcttttgtaatgttacgtcctcacccaaatattttacaagtaacccaatacttttacaacttggggggcatgtagggtataggccataagtatactccaatactctacaaaataaatctcaaagtcattaccgacacgtcactttaacacaaggagggctaattactagaa

SEQ ID NO: 196240 - DNA, 713 bp, Cannabis indica
taaaatgaacccattaagtataagatatcttacattgggaacgcagcggatatatgactcctcctagttagtactataaatcccgtatcctttcttcagtagatgactaagcacaatagattgcatcaaaacatacgccatcgtaaaacgtaatattagcagtagccttctcctccagcttagttagttgctctcttagacatttaacttgatcctcaagctgagcaatacctaaagtattctcatcaagtgccagactagaagaatcttcaacctttgaagttttctttcgagcagcagccagattcttctttaagctactccctcgagccttggcattatcaaccccttctcagagactggccatatttttctctagaacatcaatggtttctttcaagtcagccatctgatcttctatagtattggcacgctcctctacgtttgtgtaatgccctaacccttaagggtgccacatgtgtgcttttataatttagttgataatgataaactaacagtttaagaagaaaatataatttaataaaacttttagaaaattaattaaagtataacttaaaatatttttcaaaatattattagattcagggatccccttagttaagagtttttactaaaatccactatactattttgttacaaattattattacatgttcaaaatattatagaagatggatcctgttagcttaaca

SEQ ID NO: 196241 - DNA, 522 bp, Cannabis indica
gatagagttccagcggactgtggaaatggcatacgtaagaagaattaacagcatgtttggtatcaagtaggttagaaagaaacctggatcagggcctttgggagcagtagcgcaaacttcttgatttggacatccttggcaagcatcagattttccagcagagtctgattcagtacctgggcagtctggatatcccacaaatacatcagcagataaaatagaaaacaaaaggcaagagaccctgtaagcttcttatgaacatagaaaagtatgaaagcatacgttcattggcgttttctggaacttgaccgttctccatggcagccaatactgctattctttcttcctgtattcaccaaaaataaacaaataaataaacaacaaaaattgaattccataaccacttttaatctgcactgaagaagctttgtagtttataggacatcttcacagaaaaccttcctgacattaatatttcatttttctcagattttaaagtcattacatagctttgatgcatat

SEQ ID NO: 196242 - DNA, 2925 bp, Cannabis indica
agcgagatggtcatctcgcattcctgctcttcgagctaattcgacttttacaccaagtttgcttattgcaggttagggtatgcgttacttttctccggtgcctcgctatcctcctttagtgatatatgatttctcgttatgcactaagtatcagttcgtacattgattcctcacttaagaccttacagtcagcgggttacaaaatatactctgacacttacgcaattaatgagttattccataaaagatatgacaccgattcacattccctttaccttgacatgtgtcctccagccgaatttcgggtataacaagttacatacgtggaaacactattatgatttttaatgtttcacagtagttgcataaacattttgctaacatttatttcgtctgattgaaaccttcgtctaatgcaaccttcggccaaccacccaggaaccacccaaaagctttcgtctgatgcaaccttcgcccaaccacccaacaaccaccctgcaaccatcgtctgattgaaactttcatctgatgcaaccattgcgcaaccacgtagcaaccaccctgcaaccatcgtctgattgtgtaagtgatagtttaagtggtattttggtaattaaaatcacataaaagatataaatgttgtccttactttatggagatatttttgtaaataaaatgtcaatttatattttctatgtaataattccattattttttgtgtgttgttttcttcctatagtatatatatatatttttaaagagatcctataatattattttattataaaaattatgtgcaatttgcttcattgagaagaaaaataaaaaagaaagcttctaatataatatttaaacttatatactaaacacgttaacataatagtaattaatataatgcttgcgcagtttttatattttaagatttttttgttcaattttttatttttatattttaaaattttttataattagttattaaattgtgttacattataaatttatcttactcacatcttaaaactagataatctctttaatatagcaattttttttataaaagattcagttgattgggactttgtgggagacttactcaggcttctgtgttttccctctcgattcatcagagggattatgacttgtctaaggggtactagctatcatttgcttctcaatggtcgaatccaaggtagtttcaaaggtaaaaaatgccttcgccaaggagatccgatgtcccctttactctttcttctgataatggattaccttactagattgttgagctactactctagtcaaaagggttttggatttcatcctctttgtaagcatctatgcttgaccaacttgtgttttgcggacgatcttgtaatcttttgcaagggtaatgtcaactcggtgaggcttactcatgcagctttcaccaagttttgcaatgacacaggtttgtcagctaatacgtcaaagtcccacatttaccttggaggggtttgtgaagaggtcaaagcaaagatccttaaaattgttcaaattgaagaaggcagtttccctgtgaagtatctggggatcaaccttagaccaaccaaatagaaggctacagattgtggagttatcttggataagctgaacaagaacttgaactgttgggcaagtagaaacctatcttttgcaggtagggcgcagctgattcactcggtgatgcttggtatttggaattattggatgagtatattcatcatcccttctaaggtaacggcagctattaacaaaagttgtcgtgactttctttgggaaacttcagggaacaagagcaagctccatagagcgtcttgggaaaaggtttgcctccccaaaaaccttagagggataggctttcgggaaggaaaaaaatggaacaaagctcttttggcaaatcatctttgggctcttgctaaaaaggaggattgtttatgggccaaatggatcaactcaatttacttgaaagaccaaaatgattgccccaagaaggaagatgtaagttggtatttcaagaaaattctgagcttaagagattccttggatgaaacgaagctaagacaagcaactagaggtaataaaattagtgccaagagatggtataacttgtttgtggaagttaaccaagctatcaatgcaggagctatatgggataaactagttgttcctaaacataggttcatatattggcagatttctaacacccatttgctcacaagggattacttacattagatgatagacatacctagccacctctgccctgtgtgtgaatcggatttggaaactcatgatcatttattttttaaattcacctattctgttcaggtgttcgaagctgtcaacaagtggatggggagcatccagtggcctcggtcgactgctgaaatggagcttggctgctgcaatataaagcaggacatgactaaccgaatagacaatgttgtcttggctgctgttctttattatctttggaagaataggaacaaatgcatatttgatcttagttgtataactcctagaagcttgagcttgaggattaggaaaattgttcagatgaggatagttagcaagggtccttttaaggattgtaaaagaaacaattatttacttaatgtaataagtaattggtaggggttcttgggttgtagttgctggttttctgtaattgctgccactgggtgttcctgtaggcttttagccttgtgcttgtatttggttgttttttgaataaagcattccctttttcagaaaaaaaaaaaaaggatacaaataatctgttcttattttgttcaaaaaaaaaaaaatatatatatatgtatattttatcaaataaaacaaattttacattttatcaaaatatatatatactagatatatgttacgagccaagtcacgtatgttaatttt

SEQ ID NO: 196243 - DNA, 1318 bp, Cannabis indica
attattactattattattagtaaatttttataaattcttaacggtcatttggcttttatgcatgatcaagactcgttggctgtttctcgaccttacaatgtgactctggtcgaatcttgttgattcccacaattctgtcgattttgttcagattgttgctattcatctgcttaagagttctttttttttttcgtcttctttcttatatgactatggggttactcgaggttttggtgctgtctgtgtcgctaacgactatcatgctttttttttgtcagctgctaggggttttggtttggctggctttgatttatgggttttgagattttggtattgtttgagggactcgggattggtgttggatctggggttcgtagttcaattttcacagtggttgtagggataggctggtggggtggttgatgagtcagcatggtggtctttggattaggttttgtggctttagaggtgtgcttcagagatttgagttgctcattgactcagaattcgatattcgttgttgttaatcttagttgttatgtttaattttattttcaataatgatgttatcacactaccttgttactgttatggtaatatggctttacttattcatagtaggagattttagtcttatttttttttattgacatcgaaggaatctcaattgactcaaaaaatatgtttgtgctagtaacatgaatattcttatctatgtgcagatcttgagaattctcaaatttttattagtgttatagtttatggtgtaattatttgttacgattgttattgttataattggtcgtttggtgatattcttttattctagattgaataacagagttgtcatagctcaatctttattggaagatttccaaaaatttgctccgagtttaattattataaaaattaaatatttgtacttactttgtgctgctttaatgcttaaatgctaatgaattattggtattttagttgaatgtggtattataattttcattcttatttttatattctcatttttaagtaatatatcgtctaaatgtattattattattattattattattattatgtggcaattgattatggaaaattgaaatatgtgttatttgcatgtattctcttaacctttgctcattggtcatcacctaaaattaccacttgagaaagatagtatccttttagttagttagacctctattttgataattatttttccaaaaagaaaagagacttctattttgatattaaataaaaattgagatgtgcatgtgacagagtcatattttactaatatttcaagctattgttgatt

SEQ ID NO: 196244 - DNA, 3084 bp, Cannabis indica
tagttcataatactaatagttgtcaagtataatttaatgggtcaatccatagtcattagggtgctaccgtatcttaaatgtcgttaatatatctgatcgtcccattatgggcttaattatataataagcactataccatgcatataaatatacaattatttttatcgactctgtgtgagcaacgcttaattatgtaagtccatataaaatattctaacataaatatgatggaatggaatttataatgcatacaaaagttagagaaatatatgtatatatatatatatatatatatatttcatccattggaatggtgttttattctctttcaaaataaatagtaagccatcccactaaaataatagaagagtcattttattactttaaaatacaaaaaaaaaaaaagaatataaataaatttcttcacattccattttattttattatctctaactaaacacaatttaggtaatatattccaacccttttaaattgtaagttggactaaattgctctttattataattaatgaagctacatttcaaaagagcattgctattagtcaccagtggtgcctaacacattttcgacatgttgcattgtgattgcctagcgatactctgtaaaagttattatattaaattatataagacccgatacttaattagatcaataacaatattgacacgtaggagagtgctaagcactactggtgtcctttagcatttctctttcaaaaatagcaaatgatcaacaaatcaaagtcttacgaattcaaaataatttgcaaggtttagacatgatccatttggcggtttcttctagggcttgcactcttttcttattaatatttttcctttttctttttcatattctttaatttcttttccccaacacctagtaaacctcagcagataacattgtctttatatatgcataaagccaaacatattaaaagtaccaaaaataaacaaataatacattattattaatattaatatatatttatataattaagcaccaactcttattgcgaatgagacatctcacttgttctcttatataccatatacataattaactacatctatattgctggatttttccactatcttgcttgatcgaaaattaaagatagatgtagattaacattagcataacacttttgctttagacaacatgattttaatactgtaatacatattcacgaacctgctaaagctagctgctgtactttatatttaattaataggcatactctatataagtaattgttaaatgataagaattaattaatttatgtaataaaataataattaattaatactgcatgcaaccgtgccaaagctgctataccagcctaccaccaggcacaactttcctcacaacaaggcatcagatcagactgcctgccattatatatatttatgtatattacacctgctaaaaggtataaatgataagaatattttgaatacccaaattttatattaaaattaacaataaataatcatatgtaggggcatctaaccatgcaaacccctcaaactcaaactttcaaattaattagtgtatttcaaaagagtgttgttattttacactttaatgtgtctaatatcatatgtaatactattaaactaaaatatgttgttcgatttcaatcatgtatttaattattagaaaaacaaatttaattatatacattttgtttcacatcactcatgggtgatttatgaaatttattttacactcataaatactaaactttaaccccataataagttaatactatgtgcctaattgaaatcaataaataaaataagatatgctagtctaatatttaattaaatatagataaaattgtgagtcatttttagtattttgctttaattttagttagtagaaaactctctattcattttctattatataagagtaatttttctctataatttgagctttttttttttttaattttactctctattttaactaaagagtgtgtttagagaacaagattggagatgttctaattaaaagaccacataacaactctaattttgtattttaaatttaatttgggtataaatactattatataaaaaaaaataaataaaaaaaccctgctcaaaacctcgagtctattattggttacagactgagtcactagtacataaataattgactgaaacaatacaaaacaggatccattgattgctagataaataggccagcagcagcccgatttcaagaaattaaaatactattacattttcaacccggtaaaaaaaaggttccaaataataactaaatacataaatagtgttttatgaattacttgttcctttaggttgtgtttggttcactgagggcccaatcaagtgtttggtttctttattaaagtttgaaagcccattctaatggaattacaaatcacctaaactaggaatttacttttccattataaaatcactagaaactaattccttaccaacaaaagtctattttgccctattaacaaatttgtgttgataattattagatatttatatgtaattttattattttattttttaataattaaatttaaaaatgtgcatattgtcatcacgtgataaatatatttgtttgctaaaaatattatttattttttcaatttataaaataatggtaatttaataaaacaaatattatttttgaagagtaaagggtaatttggtcaaaataataaatattctattccattccatacaataccaaacataataattcttatttcgttgttgattccatagcctttactaaacaaaagaatagaaattccattccattctattctcattcccatttctattcccattctcattccattttcacttagtaactaaacgccaccttaatgatcatgccaaaaagaggaatgtactgtacataagatacttggttaattccatttcaaaaaaaaaaaaataactttgttaattaattaatataagttgtcatcattcatacaatattacaagttacaactcactttaacgaacatctaagatcccactattgctttttatggtgcttagccat

SEQ ID NO: 196245 - DNA, 560 bp, Cannabis indica
attttaatatttagctagtgatcatttaaccaagtgagataatctcaccttttaattttagaaaaactaatttagcaaaagccaagttaataacgtttgaaaaactaactatagaagcaaatatccatccaaacaagctctataaacactctttgattctcaaccttgtgatggttgatgttgcctagcatttctcaataaacatcctttgattctcaaccttttatttttcttcaataattaaaaatcaccaatcaaatcattaatgccatatttatgttatttacacatgtcatcttcaaaaaattaaaaaaattgagagaaataaatgattaaacattgatatcatatcattacttttcttaaaagtatatattacaaaaagctgtatataagtaaaaaaaaaaattacaaagcctcatcatcctcagattacaaaaatgcccgaaaaaaaaaactctctaagttaaaaaaatgaaaataaaaataaataaataattaaaaaaaatattagggcctttggagagggctagtatgatcatcactatcatcatcatcat

SEQ ID NO: 196246 - DNA, 1250 bp, Cannabis indica
ttcctgagtatgttccacctgaataagttccacctcacatgtgtttggtgcttcagttaggttgtttgttcttgtgcttgagcttaaactcactgtcacacctgcagggttagtgtccaaagagctacatgcacttgagtcattgttagcaatacaaggaaaataatcttctttaaatatgacatctctactattaattgctttaagccttgttttttctttcacccacaacctatacccttttgttccctcaagatagcctagaaaaaacatttgagtgctcttgccttaagcttgccagcactctaatgtgcatatgctacacatccaaacactttcagatttaagagatcagtgggtttccctaaatatttctcttcaagtgtcttgcattcaattgcactagagggacatctattaatgagatatgccacagtaagcacaacctcacccaagaaccccttagataaactagaatgaatcatgagacatctaaccttattcatgatggttctattcattctctcaacaactccattctgtcaaggagtggtcctaacaattttatgtctttgaacacatacatctctgcaataggtattaaattgatcattgcagaattcaagaccagtatcagtcctaagggtttttagcttgtgatttgtgaggttttccatcatggttttccagtgaacaaatttttggaatgtttcattcttatgtttgagaaaataaacccaaacctttctagagtaatcatcaactatagacagaaaataagagcaatcccaatgtgtggtgttctttctagtccccacatattagaatgaacatactctaaaatgttcttggacctatgagtgccaactttgaacttgagtctatgatgcttacctagaatgcaagattcacaataatctacctttgttaccttgtcctttcccaataggttttgttcactcgtgagctgcagtcctttctcactgatgtggcctagcctcttgtgccacaacattgctttgtgatcctttggactttggactatggcattatgacatttaattacaggttccccttgtaggtagtaaatacctcctttcttgtttcctttcatgattgtcattgtacccttgctcaatttttgtcacaatacccacgtcatctagcacgctaattgaaattaaatttcttgttagatttggaacatacctgaccccagttaatgaacacacaatgccatcaaatattat

SEQ ID NO: 196247 - DNA, 921 bp, Cannabis indica
aaaataattatttatgtggatcaataaaagtgtatcatgtgtacactgtgtccacataaacaacacactgtgtacacatagaatgtccaacatggcacttaacacctataaaatagatagaaatgacaaactgctaatagaacacagattttgggagttttgctgctaaaatgggttttgaaagttaattgctagcgaagtgaaagttttaaaaaatttgctccaattaactctctcattaaaatcacccacacaaagtcagggtacccgcacctcttcttttatcttcctcaatagttcccataaaaaattacattacgccatttgtggatggccataaaaacaagtcaaggtccaaagcaaaaactccttcacttctcttgtggccacgatatgccccaaggaactaaaatccaccctcactgtcaattcatatttccataacaataataatttgctactcaaactaatatgatccactatccataaattcctaccgaactaaagctgagaacataattgttcaacttggtacctcgtcagtttactttctgcaagaaatataatacttgggttaaactccaaaagttggaattgtaacgctcttaatgtccaaggatttccaatcccttggacattccaactcaagagttttattgtgctcaacgacctttctccgcaaggctcgtcgtttcactaccaaaaatttgagatgataaatccacacaattagaaataatcacctcttattcacatcatcaattgatcgatctgttgttctctttgtttcattctgcccaaacacaaagttccctattccccttgaatcttagctccaattgttccttcttgtggccccgtagccatcgattttctctaacccattcccacttgtgctcgactagagcctctagctttagg

SEQ ID NO: 196248 - DNA, 1230 bp, Cannabis indica
ctagctcgtgttttaaaagcgctttacttcccaaatgaaagttttctagaagcaaggttgggtcactttgggtcctcggtgtggagaggtatattatggggaagagagctactaaaggaaggctatcgttggtgtgttggagacgggagaactattcgtattaatgaagacccttggcttcctagaagtaggcattctagccttcaaactaaagctcttattccaaaggatgtcactcttaatactatgttgacaacaaatggaaagtggaaaactaatgaaattagttgttggttccacaaggatgacatcccatggattcttggtattcttccaaatacaaatagatcggattggattacatggagtttaaatgcgaatggaaaatactcggtagctagtggttataaacttcgctttcaaaatctggatctagctgaatgttccaataactcaaaaacgaaatcttggtaattttgtttggggatctagacttactcccaaaatgaaaaacttcatttggaaagttttcaataattggcttccttcaaaaatggagttggagaaaaggggtatatccttggatactttttgtgattggtgcaaatttcaaagagaagatacaagccatgctttatggagatgccctcatgttcatcacctttggaagaagttgggatttgataattttcttccctaaaatgtgaaccggcctgctgatgtgttatggtggctatgggatcattttgaaaaggaaaagctcatcagatttatggggtttacttggttgatttggctaagaagaaacaattttatcttcaataaaaagcaccctcctgatcagatctggattgagtgggctgtagagtttattgagcagcaactgggagtgcatcagcagctgaaaactactgctctctctaaaccagatgcttggtttcctcctcccctcgatgtcttcttaatcaatacagatgcaactttaaaaccaggtgagtggggctgtggttcaagtgctgtcattcgaaattatgcaggggaattgatggtggctgaagtagtgtatatacatggttgcttgtcagttcagatggtagaggcagctgctattaatttgggcatccatttggctttgagcaggtccatccaaaaggctcgagttggctcggattgccaatccatcatcaaaactctaaactcaaacttaaatgtgccgactgattggggaca

SEQ ID NO: 196249 - DNA, 1461 bp, Cannabis indica
gaccatgaatcccaggaattttttggagaacacaccaaatacgcacttcagcagattcaacttcattcgatacttgcaaagggtaacaaacatttcgcccagatcgtggattagatccttggccttcttggtctttattaacatgtcgtcgacatatacctccatatattgtggctgattaggttagcaaacatcttatttacaagtcgctagtacgtcgccccagcattcttgagtccgaaaggcatgacccagtaacaatacatgcctcgatctggtaatgaatgagttgtgttcttcatcgacagggttcatagcaattcatgccccaccgtcgcatccactagttggtctgtctgttgtagcgggaagctgtcttttgggcaagccttggtcaaatgggtgaagtcgatacacactctccactttctgttaggtttgggaaccaacacgaggtttgatacccattgggggtaatatgcttctcggatgaattttatcatgtcaatttagtcgacttcaactttcagaatttcgtacttttcagggttcaaggccctccgtttctgccttactggtttcaccttcgaatctatgttgagattgtggtacattaaagttggatctactccttccatatcttcatgcccccatacgaacacgtctagattactctcctgaaactccttcaactccttcttaagggtttcgaggagccttttccaattttaaggaccttaggtaggctttccgagattactgtttcatctaactcctctacaaactccattctcacttcctcacaaattcgagggtctagttttgacaagattttgtacgctttaggcaaggccccccatgggtgaccacaatcgttcgttctggaggcctcgtggcaatccggagcgacatgctatagcattctctagcttcatcctaatcccctttcaatgtgaccgacaccccccaccgggttggaaatttagatagtcaagtggtagattaagatgatcgccttcaaccggaagagcgatggccttcccaacacaacgttgtaagctaacgagcgatccactaccaagaaggtggtcatcgccgtagaatgctgggatctcctaccccaccattagtgctaattctattgttcctcatagttggattggttctttggtaaacctgtatatgggagacgtacaggatttgagatcctcaacgcccaaacccatctcccgcatagtagtctaatataggatatctactgagcttccatcgtcgactaacgtctggtgtactcgggtgttagccatttgcactgtatgcaccagtgggtcattgtgtggaaaatgtactccatttgtgtcctcctttgtaaaggtgattggggtgctctccccctcgaaactctttaggggcctctactccaaatctcaagagtgagattctcgccttgcttcacgggcg

SEQ ID NO: 196250 - DNA, 549 bp, Cannabis indica
gtcgtgtcaacctgtttataaatgagttttgttcaaattttattttatgatccgattattaaatgggtcgtcttcacgttaagaatagacctatgggtctcgacacgacacgaatacgactcgcgaacacgaattgccacccctacccaaacccagacctcgtccccagacccggatcgcggacctggaccctgatccaaacaagacccagacctagaccccggtctagactcaaacctagtaccggacccataccccaaaccccgacccaagacacagaacccagacccgaacccagccccaactcaaaaacggacttcgacccaaacccggacccggacccaaacccagaccctgactcggtctgagacccaaacttggatcccgattccaatcccagacctggacccggtcctgaacccagacccggaccccgacctggactccgacctcagaacccagactgtttgggaccccaatcccgaccccggacccaatcccggaccccgaccccgactcagactccgacctcagaccgcgacttagact

SEQ ID NO: 196251 - DNA, 573 bp, Cannabis indica
gtgcttcatgattatctgatacaagtggaaccgtgcagggcgaaatgttattctttctgagggtgacaagctaaaagtaattaatgatggtgttacaattgtacgatctatagagctgtcagatggaatcgaaaatgcaggggcaatgctaattcaagaggttatccatggttgctacatgatactctccctgaatttgttttgattcattttgaggtttataatcagagatatcacatttaagcgtttcgcttgtaggttgcaagtaaaatgaatgatttggctggtgacggtaccaccactgcgattataatgacccgggaaatgatcaaatgtgggttgttggctgttgcttttggcgctaatccaatttctttgaaaaagggaatggaaaagactgtaagggaattggtcaaagtcttgaaggatagaagtttccctgtgaaaggaaggagtgatgttaaaggtcatgacttctacttgctcatattatattatagcttataacttaattagtgttatgtattaaaagtggctttgttctgcagccgtggcctcaatctctgctggaaa

SEQ ID NO: 196252 - DNA, 890 bp, Cannabis indica
gtagctccactgtcgatataccaggtattttcattgtgagcatcgacaatagtaaggtaagcttgctggtcattggttggttgattggtgttggtattttgggtgttttgagattggttggaacttggtgcttggaaggagatgtcgaacctatggtagcatttggaggctatgtggcttggtttgttgcaaagctgacagatgagtctgttattattggtgcgtcctctgccccgaccacggccacgaggattgaaggaacgactgctggagggttggtttgggttatgtgtatggttgtcgaaattcaaagatctgcgcatttgagtggtgagatgggcaacagtcatagatgagtcgtttgaggcagagttgagttgttccaaacggatttcttgactttgcagcatatattgcacttcttgaagtgtaacttgatcatgcctagatgttaagttgaccaccactgcctcatattcatggccgagtccaccaagtatgtaaagaattaaatcatcatcagatagaagctgacctgcagcagacaaaccatcagcaatatttttcatttttaggatataatcatgtataaagagactccctttcttgagagactgcagctgaaatcgaagttgcagagttctagcttttgaactggtagtatataggttttccagcgtgatccagaggtcatgagaagataaacagttgaccacatgtccaaacatggactcggaaatggaattaagaagccagctgagaaccgattgatccgtgcgcctccacatagcaaacccgagatttagttgtctcagttcatctggtataggtcctccgattgtgttatcaacaaactaaggggacagggttttgttcctagaacatagccc

SEQ ID NO: 196253 - DNA, 710 bp, Cannabis indica
cagcctattttactaacacagatatgtgggaagaagctcattcctccgttcttaagcccccatcgtgcaatacaagcataactgctgtcgatgggcgatgacaattcacacaacagatcggtggaatttcccacatgaatattgagaatttacaccatgacaatttcattttgtttggtttaaaattgcattgatgattttataattattaatatacatgtcagaaatttataattattagtatacatgttggaaatttataattattagtatacagtaagagttggaatccagaatatggtggctctttttcttgtaagtccgctttcctttgcttcacttcaaataatagctcaaggaacccagagtgggctaaaaccccgtggaaatgttgcataccagcaaaatttgaagtttttggatggttagtattcttgcaaaaaagaagaccatatatggcaatctttctgggctggtgtgtttgttgcaagtctagttatgaatagattgagcatttattcctagaatgcatatatatgcgaaaaatatggtcgttattgttcaaagaattttgcttggattgggtcttacctagcttggtttctgctgtcctaataagcaaactgatgggaaacaaaaggaaagttaaattgtggaggactactattatggcactattatgggcgatgtggacagagagaaatagcaga

SEQ ID NO: 196254 - DNA, 1022 bp, Cannabis indica
attaaagacatcaagttaaaagatgtatgtagtacaatttcctcaaaaaaaaaaaaattagtagtttatccatggaatggggcagtgtggcactagaaatcgagataagtttaagaatacttcttttttaaatctattaatcaaaaatatccttatattaaatttcattaaaatgcacctactttcatgaattggttatctcatatagtctcaccctcgacttaaagttaacacataatttacatcaatttaaggtatatattaaaaacatcatctataaaaatagataaatcttaaaaaatataaaaattaaaataaaaattaaagcaattaaagtaaaatgagtatagaatataatttgctcttgaaaatctcttattacaatctcatattagatcaatggatcaaatttgaattttaaaaaataaatccaacctacatttagtaattatgtttcatttgtggcaatatacatactattaaaaaaaaaacatattttcttgcaatactcaggttaaatcatttgagcacattagaattagaattagaaactgcttcccatttctccaatgcaattagaagattcatatcgtttcgtgtttgacaattatcgctaaccataacttgattattttttatggtttttttttttggagagagattattttgatgttaaaccagtgtcgagtcacaactcacaagtaacaacattattccactagagtatgtattatcaaaaaagaaagacgaataaatgtggggaagataactttgccaaaaaaaaatgtggggaagataatgccgagcaaatttgtttatgaaattaaaaactctaaaaatgaaccacctttatgcaaccaaagtccaattattatgacatgaatcataattcctcaaaaagatactactcagactactgcaggttctttaagttttgctacaagattctgggctactgcatcgataaattcttcagtgttcaagtaaaactccctggttactctgcatacacacacatataa

SEQ ID NO: 196255 - DNA, 776 bp, Cannabis indica
ttgagaaaaatatgggcaacaataatatatagcatagcatgaatacaatttatataggggaatttttatttatatacgcaaatattgtaataatttcaagaatgacgatgctcaaattaatttttatataccaaaacttttatatttattcagcaaattcattatatcaaaaaaaaaaaaaatgtctttatatacataaactcggtatctctatctctctcgcaaatgcattatcactttttttaatgtctcaaagatcatgtgtcatatttctttctctttttttcccaaaagaaattatacataatctctcgctattttgttttttttaaaaaaaaaaaaaaaaactacagacatactattaattaatttagctcttattattataacataccttttaaaataatcattttgacaaagtatatgtttttttaatctgcaaacaccaatttttagacttaaaagtatcattttataagtttctttagtatatttatgttaactaaaacgctttcaaaaaaaaaaaaaaaaaaaaaacctgaagattaactaaattgtaaacgtacactcacaaagaaaattataaacttaaacaaaatttactatagcaaccaatttcataaactattataaaatattttgttattttataataaaaaattattcaataagtatattataaaacaacttcgtaagttactaacaaaaatacttataaaaaaaaactaaatgacatcttaagtcataagtataggctagtactttcacacatctct

SEQ ID NO: 196256 - DNA, 1012 bp, Cannabis indica
acaaagatgatcataggatggagatttattgtgcaaaagcttgtaagaggttttgtctttaagcaagatagaatgtgttctatttaaaagataaatcaaagttctcaccatctaactccaatatataaggggaatgttggattggaaggccaatgcccaagccacattgagaatatgttgggattttctttcaacaatagcattttgttgtggcctgttcacacaagaattataatgaaaattatctttgttagcaaaaaaaaacttgttaaagtaagctcctttgcattgtctgtttgtacagacttaatgtttaatttataatggacatcgacaaaagtaaaaaaaaattgaatgatgagagaagcttctaatttttttttttaacatatagatccaagtgtatcgcgaatgatcatctacaatagttatgaaatacttataaccttcaatggactctaaatggtaaggaccccaaatgtccatatgtaacaggtcaaaaatatgaggggcaaagctggtgtgggaattaaatagcattttttttttttgttttggaaaatgacatgtttcacaattaaaagaatgagtaagattagtgccaaaatgaaactttttattgattttgtttgtaactagtacatatgggtgaccaaggcgagtatagtattcgtgtctgtctatattaacagtacaagtaagagaatgagatgcaggcttagacgagacttcttgttgaatgtaatatagattgcctagccgattatctatcccaatcctcaatgtttgagaaaatttgtggatagaataagaattagtagtgaataacatgttgtgactgttgttgtcgaataaagaactcacagatagtaaattgaaatgaaattgagggacaaacaagacatttgtaaggataagtgtagaattgatgataatagttccaattctttcaatattgacagggtaccattaagtaatgtcatagatttagaatgtttctttgcaacaaaaa

SEQ ID NO: 196257 - DNA, 513 bp, Cannabis indica
gttgaaatttttagtggaagtatttacataatatattaagaacggggaaattaattttgcacaaggtagtgggttgggatatggagacattgttgtgataatgtattatctgtattttgaaacttcatttgagcagaaaaaactttgattgctatttgaatcaagttttaaattccagggaggattctccagcgagcaccttccgtccgcgggctagacaattattccaatatcgtcactacaggtaacaagctgggctcccttcgattatgatcctaacatatttttttttagtaagaaacagccaaacaccttcttgacacttttagcaattctatttcttcattttaactttttaattaattgtctgaaaaaaactcaatcaggatacagattattattctttaattctagactcatagttagtgcgtgagtattccattttaaaagtaaaaatagtggaactgtaactcactccaattcaaagttccaatgtcagtgaaccacatttaa

SEQ ID NO: 196258 - DNA, 791 bp, Cannabis indica
atttatataaataataatgataatttaagactagtgatgggttgaatcatatatttaataaccatttccaaaaacaaaaatttctgatttttttttttgttttaatttgggagaaaattcaacatcataataattttaatttataggaccatccatcacttattctgaacacgcgtgctacaaaagccgaaaacaccaaatagtaaaagattgagagttgagacacagaacagaagtttcacttttttcttttgttcttcttgttgagatattagttgaaaagttggttcaattcttacatggtagcatttgtaattatgaacaagacaaaaccaacaacaaaaaaaaaagtattttgaagccaaaattggattttggaattttctttcaaacatgggaataaaagtctgtagtggaaggaatgaaaatcctgtagtaataaactgatatatatatatatatatatatttgcataaagaattatttattttttttatttaaagcctctatatacatttatagttacacaaattgggataccccaaaccaaaccctcccaacatgagttagcacatgagctagcttcaagtaattgtacttaaagaactattaagtaactatgtatacagggccggcgtctgaaaatttatgggcccaagacgaattaaattttggggccctcaaaaatatatcaaaaaaagagtgtcatgggatttgaacccatgacttggacattaagtcttccacctcaaccaactaagctataaatatttgttgtttatattacactt

SEQ ID NO: 196259 - DNA, 1038 bp, Cannabis indica
ctgacgtgggagaacaatcagcacatgctgacttggacactgacatagcatttggctgggctgagtaggatcatttctttacacgtttgtcatcgaaagatgcactataccacttgcaagttcccgtaatggaatagatttaaagataagattttctatcattagccacataaaaaaaaaattaaaattattgtttttcttgaatacaattgaaaaagaaaatgtaagaaacgtaaacaaattaccttacagttaaaaggggtaatatatacgggtagtataagttggtataaacaaaaataagatcaagcaacaaatgaaagaatgaacaagcttttcctgtcaatctgccgtataagcactaataagtacactggaaaaacaaacaatttcagagatagggaggaaaaaattgtgttaaaactcctataaaacatgatattcttggaatttgaaccgaacgtgaaaggatttttacagaaaataattactctgttaaagaggcattccgctaaaaccttgaccatttctcttcatctttcccatctccatttctcgagtagtttgggcttcaccgctcgaaccagatgggtagagaccatattcgctggtcggagcactgtactcactgctggcaccatattcttggcttcctagcgccatcttcctaaactttttcatgtcctcattgtactgactagtatcataatcggagcttccatgagaactgtaaatgttgctttgaccaggcctgattccttcgttgaggtcagctagagacacgtctccctccaaagcacgcacaatctgtttaaatcgtgtaatatagcagagtaagtttgttggcttcccaatagtaacaatgcataattgaagcacaaaattctaagtatatagtcttaatgctttatttaaacccaaagtatccaatcctaacttatctctctttgcagaaaacatcatcaagcaacaagaaattgactatctaggaacttagcctagtgcaacaatgaacggaaattttatcagaatttgatt

SEQ ID NO: 196260 - DNA, 612 bp, Cannabis indica
taagaaaacaaagttcattgcatatcaagcttactaaacatctactcaacacaactctgctgaaacgagaacaagaactgaagcttcaacttactaagctttctttatttattttaagggatccttaggaaattgttaaatactgaaaccaacataattgtagggaaaatgcaggatcagaatcttatcgaccttaaaaatttaggagtcaacttttcatgtagccaatacctcatatatgaatgaagatatgatcttgattcttgatcatcactctcaggctcaactgtgccaaaaaaacagcatctctgtttctttgaaataaggcaagcaaggaaggcaagtgttgacttaagaattgagatgatcaaccacaatcaacttctactgaaaaaacaaaaacatgtactaaatcttgtctcaccctatttatctcatcactttcactcaagccaccctctactttatagcctactttttgcctcatctttcctcaacatgattagtggtagcaagaaaagaatgggtcattcatgcacttgagagaaggtggtttttttctattttttaattataactaatttttgttcttgtttttatttatttattttt

SEQ ID NO: 196261 - DNA, 660 bp, Cannabis indica
attgttggttctttagttaccacggctatcttaagtgttctaaatgaaggagctgattctgcatgtttaaacaagacactcattacactgattcccaagattaaaaaaatctcaacggctacaagagtttcgccccatcagcctatgcaatgttatctccaagcttatcaccaaggtgcttgtgaatcgcttcaaacatgtccttccttatgttatttctgatacacaaagtgcctttttgccaaatcgcttaattactgataatattcttgtggcttttgagttggtacatgctatcaagaataaaactttaggccggaaaggtattgcatctttgaaattggatatgagtaaagcttttgaccgtgttgaatggagattcattgaggaactcatgaacaagatgggttttgctagtgaatggatcacccttattatgaactgcctacgcactaatagcttttccttcttttgaatggtgaggtcacgggttcacttattccatcaagaggtctacgacaaggttgcccgctctcgccatatttgttctgagggtcttatgaagactactccaacatgaagaacaagtggtcaatctaaatgggttcaaattgacacgccatgctccctccatttctcactgtttttgtcaatgcagct

SEQ ID NO: 196262 - DNA, 717 bp, Cannabis indica
gcactccataagctagtggaatcatttataatcttccacccccatttcaaaatgaaagcactgttgatatcactaattttcctgaacccaaggcctcctagaaacttagatttgcacaaagagctccacgatagcgtatggatcggttttctatcatccgcaccattccaccaaaaattcctgaggctcttgtcgatggtagatgcaattccacaaggaatgacatcggcagcagccgcataaattggcattgatcctcccacagattgaattaaacaagttcttcccgccttagatagaagcctcgacttccacccttcaactctgttaaggacttttctcaccaggtaattcttcttgtgggaatccttctctgttcgaaacaaaggaagacctaagtacgtggcatctggcttcattttacacattcccaatatgtttgcaattttgtctgcccgtttctttggtactccttttgagaagaataccgttgatttctggaagttcactgcttgtccggaccattcacaatacatttgtaaacagccaagaaaagcttcagcttccttctccgaagcatggccaaacaacattacgtcatccgcgaacataagatgggtgatcggctgggcctccctagtgactttaaaccctcttatttttcctttcacgtttgcatcggagattaagcgagataaaaggtccgcagccaaaatg

SEQ ID NO: 196263 - DNA, 633 bp, Cannabis indica
ttccctattaaataccataaaaatatctgaaacagaaaaatatcatataaattggtcaaacttaaaagtgtcataaacaactcttaaaatcccattgtgagtataatttcttcttttgttatatgatagtgtatattattattattggaatattatatcaacttttgaaaatttgtaaataatttatagtatcacataatggattgctcttattaaaatattaagaaattttttaaaatacccataaaaatagaatcagcccaccatgcattatagatgtctttgataaatcatatttattttattttttttcttaaagaaaaaattagctgtagaatagtaacctagtatttggtgtacaatttatttgtctaattcttattggtgtatttggcttctccatgccatgagtttaaaagaaagggttttataattggtgtatttggcttccccatgccatgagtttaaaagaaagggtcttattggtgtatttggcttccccatgccatgagtttaaaagaaagtggcgtacactagatttctcctaaatataggacatgtttatggtaattactttatttttgttcttatggtagacatatttttaaagtcatagatatttaatctaaggat

SEQ ID NO: 196264 - DNA, 805 bp, Cannabis indica
atatatatacatgacaatttttaaaaaagatatttcattatagaaaatatgaattacaatataaaattttgatttgacaacttttctttttctttttcaaatcttctctcaagtctagatccacaaaaaaaaaaatgtttctcctattatatttatagcatttatataattacttaactgtcttttaagtaggaaaaataacttctaaatatgatactaatttaggcgcaaaaataaaaaaacatctaaaaatgttttggtgcaatttgatacttatcatctatttccactatttccatttgcaacatgtatatgaaagtaccggattaacaaaaaaaaatgcagtgaaagtatccaaattctaagcaaactacatcaaaacatagatttaaagtcctttagatacgtgcatgctggactggccggttcatatttttggtattttttaaaatatgagtcgtggtatattgtgttaatatttttgactgatggacttggtattttcgtatcattcttgaatttatgtcgtgctttaatggagctagttcgtttttcttaaacaagtgagcacatttttttatacaagttaaaattcgtgttacttttccagaattttttttaaataattaatgagttaattaccagatgtattttttttatagcttcaattatatttgtataattttttaaaaatattttattgacaatgatataaaagaaaaaaaatcattagaattattaatttaaatatttactaataaatagttaaatttgtaaatcacactcaacaaataaattaatatat

SEQ ID NO: 196265 - DNA, 2121 bp, Cannabis indica
ggtaaaactaaagtatccacaatccattggcatatatatgagcaatctaccttttcatcataatataaatcttggctgatatgatctagatcactgctaatagcttttctattttattatataattaaaatgtataccaatttttaaatgcactattattctagttaggtcttgtttgtaagaaatactatataatatccgatatgcaaaggccaaatgtttgatcatctttccctaaagaaaaaggcaaaacataattaatttgaattcaatacatctattcgaaattaatttagtgaagactggattaaaaaaaagctaatgcatggaagctcattatttggctaattctttaaaaatttgaaacatattgcctttaaaaccgtttagcaagatttttgaaacccaatataaaatttgaaacaagtgtttgtccactatttatgaactttatttcttgccttagcttgtaagaaatgaattctaaattttttgcatgaaggattattattatatatatataggcttaaggtttctctatggcccactaatagaataaatacaaataatataatgacatctgggttgatttgatgaggcctagcccatgaggcttacgtggaatcttcttgacgacaggtagaaaacgtgtcattttcgcatgtaataatttaatgactcttgacaatcaccatatttctttatacagaatgcttgatttttggaattaactttaaaaacaaagtgattcaatattaaataagcaatgaatcaatatagaggctgatttatcatctttctggaagtattgctggtaggtatccagatgctctcttcattggactcttcttgtcgtctggatgagatatcactccaaaaattggatggcccgacttaacgaatttggtccattatcctaattaagcatataaactgggcatttggtaattgaatttagatctcagaagtacacatgtctctcttctaaaaacacaggtaatatttaccatccaagcttttggaacttaagagttgtggaagcttacagtcttccttccagatggtatgaggatatgtggatgcttcaaaaaggtatggactttttgaaattccaagccaatatatagtggatgacaacttcgcgctttctgaatatcacttacacgtggcaatgttctcttggctcatgaagattattcgtcttgagaaaatgtgtgaagcctaaacttgcaaaataacagcatataatgtcaacgggtgtacgaaggcaaatatcatcattcaaattacctcgattttgtaatagtcatttaatgctaatccttctttgctctaaattgtcagatgcaatttgagttttcttgaatgtaatctgagtcatcgatttaggggcacgtggatcacaatttttattctataaatatagtgaaaattatctctttacaactttttcctattttagtactttccaagcttgatttttttgagagagaaaaggcaaaaattatttttggtgaatgtccaattatttcgatgactgcctacatcttcttcatcgaatttgttcaaggttaaaactaggagcaccacccccagttctcacaattgattccttaaattcgtcagaaccactaaatattcaagccaagattgaagtacttataaatcaaactcgtgctctttgatctagggttatgcgtcttgataacctcctaccacgtgactttttctacggccaacgcacgacgtccgaattccttccctaagacttttgccttcaacacgtaagtaacatatgtacttctataattctaaaatgtgtttagattatggacaggatgaacaactttgcataataacatatctggtcgattatgaatttcccctttaatgcttgcatatctgccataagaagtagaggaataggatttaggcgtttggagcagctctgtatatttttcaaaacaatgtcgttgatttatttttatactgcttgtaatcaataatacgttctttgaaacttcagtaaatttctaatgtcttctttaataaatttcttgttgggtagccaaacattagggaaatgcattcaagtatggatgaatttatttcttctttctg

SEQ ID NO: 196266 - DNA, 1513 bp, Cannabis indica
tgcttttcgaaaatttattgttctgaatttgaattatatgtgcatacttaagatgtgtcctgaaagtagctcttttttattttttaaattcatgtgatcattattctgcttgcaggctcaaccagcagaagaacgtccacagtacatacacattcaacaaaatgattttttacatcgaaagtaaggcttttttgtctctcttttattctttctttctaaaatgttggcttgggtacataaaacattctaacatatgttctcctcaccaagtaaaatgcttatcatacttacatccatcaatttttagtatagaccaattgttcaagtgcttttagttggaaccttagacttgtattaatgagaaagaaaatacaagaaaaaagtgagtaggattacccacttaaaaacaggagctaaaaaatcccaaaaacaagaaaaaaaaaataatattacaaataaatgataaaagttatgaacaccccctttttcttattgccatttttccttctacatttttttcagacataggaagcaaaaggaggaggatattgctatatgtgaatgcaagtatgatggagatgatcctgagagtgcttgtggggagagttgcttgaatgtacataccagcacagaatgcactcctgacttttgcccttgtggtgactattgtatgaatcaggtagatatctctctcagacatgttttcatgtggtgtacacatgctcatactcttttccttcctgtgtgcatgtggatgcatctattatgtttattttatttttcttcgtgtttgtaaacaattttgtggcacgatagcaaaaaacatattttctttgctacaacaaatcatcacaagtttcatcggaaatgtttagtacttacactactttctcaaccttttatgcgaaatgtttgcctaatctatgttcttattctgataggtgttaacgttcctgttttaaaaaatataaacaaataaagtcactgtttatttttgcaggggctttattgctatcaaaataaataagataccaggcctattttttatttcattttttattgttatcagaattctctgttttctttaagttgttacctattatcgaagaacaatgtcgaaaatccctacttggtttcaaagaataattttatgttttcaaacacataaattaatttttaagggtctatgccaaagaagcccttataaccactgtatggattgaagagtttgaacccttagttctccatttatgttgtggaactgataccttatctcttttgttcttctatattggatgtctcttcattgaactgtgagcagaaatttcaaaaatgtgaatatgctaagacaaagttgttcaaaacagaaaatcgtggctggggccttctagcagatgaagatataaaggtaaagttttacaatttacttttttttaaaaaattagtaaattttttccttcaatatttttaaatgaaataaggagcaataacgaaaactcctctctctctctct

SEQ ID NO: 196267 - DNA, 1020 bp, Cannabis indica
catcaatgttaaacattacagctttagccgaccagtcccctcactggactgctatgaccggccaaacccctatataattgtccaaggctggccagccatatgcaagcagcttaatggtcgaccatcttatacagtgccaacaagatgaacaaagctgaaagcattaccccagcagagaaagatcctaaagtccagcagagtatagcctgtgaggcacactatcacccaactccttcaaagcctcatccaagaaaggaacaaccctatctatacaccgagtggctaactcagtagctctctggccggtaggccaaatcataggctgtctcactagtgcagctcctagtggaggaggaggaagtgatggtccactagcatctgcaccatgagaggtcctggccaccttagccctcacccgtccagtaggctcatctgaaggcccacctgcaagacctctcaacttggaagacatgtctgcaaaaagaaagtagcaaagtcagaaagcattcataaatattcaatacaagaacaaaagcatgttgttacaaactatcaaataccatcatcatcagaagaggagctatcagaatccacaactacagccttgcccttgcctctagctgtaggcacggggcgtgtaggtttatcagaaactaggcctctaggctcgatatgaagggaggcatcacctactggacccccacgggccaggcgcctacggagagctctctctcttctctccagattctgtgcaatgcaagacaaaggtacttcatcatcatcaaggtcaaggccttgcccgtctccacggcatgcctcatttttagctggcatccttgcagctccacgagcaggaggatacaagccatacatttggaagttgtcaacactggtcaattgaataatgttcctctatttagctgacaaagaaaggatgtgattcactctatcccttatttataatgtgggaatggaacacttgaaaaatggtactctttggaaccgtcgatggcgaatccc

SEQ ID NO: 196268 - DNA, 1200 bp, Cannabis indica
gagtgaagataccgacttttgataggtaagaactccgaattagggaaaggtttcttcaaataaaatatgtattattgaattatctttctaacggtacaaaaatcgctggaaagaatagatatcgtacttttactgaggcaatattggaaagaaatttgaaaaactgtaattcaacagccagcatgaaaacataaatttttcgacatctaaataatcagaatcagtaaagagtttcttcataaaaaatatagattattaaattatcttttaaacggtacctagatcactgaaaacggacctataggaagagagatatggtatttctttgaaagcctatctttattaaaaatatattgacccatcaaaatttattcataaaataattttaaatatagtttaatcattttatatctatataattatataaagcaaatcataaatgagttgatgctaagaaagttttattttattttttataatttttagttgattaaaccctttaataagttatctttttgtaaaagaaatttacattgtcttaaaataattatgtgtgtcataatgtaaaatgatattttctttattttgggtcattccaaaattaatattctttcttctatgagttaaagacataattttggtcaagttttatctcacacaaatttttaatttagtttaagtcttttatcactagagtggtgtgtctctatatatgcagaataaatattatttttttcttctaattattctcattaatagacatatgaaaatttaaatgttataaactctttattaaagttttttgtgggtgcgttcttaaaaaagaatgaaaataacatagtattgtactattgttatttgagtacttattccgttcatagtgcactttacactttttattagttaattaatttattatattaataataatactattagtcatagtttacaatactaatttatacgatttgtaaatattttaagattatatttatctatattaatattttagccaatacaaaaagaaaattaaagtttaaaaaaaatatattagataacacagcataaagcgcaacttaattcactagttttaaaaaaaaatgtattctctagataaataattaaacctaagaataaatattattcaaccttcattactttttgaatataacggtaatacattactttttaaaaaaaaaa

SEQ ID NO: 196269 - DNA, 1064 bp, Cannabis indica
attataaattatcattaattcttgcgttgtcactaaaagatctgtggctaaagtattagttacaaaaatcataatttgttgtgactaaatgtgtttttaatcacaatacttgttgtgattaaaacaaaattagtaacaatttgtatctaaataatatgttttagatacaagtaattttttgttgtgattaaaaatcatatttaatcataaaaattttatgttgtgattgaaaatagtttttttttgtgttagttaatagccgacaagccattgggaggggatgcatgatcatgaaagtaactacacaaaggttttagattggttcagtttagttttaaatttaaaaattcttaaatactaatttaaatcagaaaaaaaaaataaaaaattgggatgaaatcatgaacattcttagggccattattattaatttgtatattttaacttcgttttttctcaccccaataatttaccacatggaatattggactggtatccttacgtacatggttgtctgttgttgaaaagaatatgttttcacgtgattcattttatgaaactccttacgtcatcatatacgtaatctaaaaactccttagtgatcacctgagtgacataagatacattcattaattactacatcataattaacctatatacataattaatccattcctattactattaaccacctatatatatatattgcaagcaatattgatcttttgattgtgaaaagattggacaatgtagaaggattatgatgcttttttgaagttaatttacatctatacattgcttttcaaagtaagtttctcaattaattgttagatttttaggattgaaattctagtttaaataatggattgaagttttataggcggcaacatcagtttggttatttgaaggcttgaagaatttagtttgagggaaatttgttatgctatttttaacctatattttggatcactttttataattatttttcatcttattatattttggaatagaattatgcttatttttttagttttcaagtttctacacttgaaatgtataaatta

SEQ ID NO: 196270 - DNA, 1154 bp, Cannabis indica
aggctgaaagtggggactggacatagtattatatgtggtgttgactcatggattcctggtcatgacaatttcaagcctttttgctattctagttctccctcaaaccatgttgcagattatatcacagcagaaagagagtggaatgttgagcttttgaaagctgacttttcaccactagatgtcaatcacattcttgcaattcctttatctttcattgctgcaaatgatagatggatttggcattatgatgtttcgggtgactactcagtaagtacagggtatcattttgcaaactcattggaagaaagtgaactttcttcttgctctaattcacaggacacatggtggaagactttttggagctttaatttgcctgctaaggttaaaattggctggaaagtaattcaatcttccattcctgtcgctaaatcactatttcataagaaaattattacttctgcaacctgctctttatgccaatcggcatgggaaacaataggacatgctatgttctcctgctgtcatgccaaggaggtatggaaaatctcaagtttttctttcaatcttacaagtgcatatcgaatgcaggatggtgattacttgatgtacttatcttcaaggtacactaagtctgagatggaaagaatcctgtacattatgtggtttatatggtctgatcgcaataacttcatccatgggaaaaagactaaagaacctataatgctgctgtcgcaagctgatgcttatttgcagcaataccagaaacttaatactgctgcactaccgaatactggttctcaaaccagttcagcagctggtgcaacaaagtggcatgctcctccagtgaacaaaatcaaaatgaatgtggatgcggcaattgattcttcgaggagtaaaattggtattggtgttattttaagaaattcttgtggacaggttcttgctgctatatctaaaccagcaataggaaatttcaagtcacaaaaaatggaagctaaagcgatgtttttagggctttcttgggcgaaacaattgaatcttcctattgattatgtggaaacggattgtttgatgcttgtgaatgcattgaatgggcgtacatctccaaattcgagtttccatgatctagtttcttgatgtttcttcttcattta

SEQ ID NO: 196271 - DNA, 788 bp, Cannabis indica
attttgtgttatttatttttatgtattaattttgatatttaatatcttatttaatttgttattatttataagtgttaacccaagaaattggcatatgtacttttctgaggttaggtgagaaaggccttgagaatgacaaaatcattcggccatgagagtgaaaaagtcacatgatcctgggagtgacaaagtcacttggccatggagtgacaatggcactcggccaggcctcttgagaagtcactcggccaagccccgtgagaagttactcggccaagcctcgtgagaagtcactcggccaagcctcttgagaagtcactcggtcaagcctcgagagaagtcacttggccaatcctcgtgagaagtcacttggccaagccttaaagtcactcagccaagcctcgtgaaaagtcactcagccaatactcgtgagaagtcactcggccaagcctcgtgagaaatcactcggccaagtctcatgaaaattcactctgccaagcctcgagaaaagtcactcggccaagtctcgtaaaaagccacttgcctagcctcgtggaaagccgctcaaccaagcctcatgaagagttacttggcctcaaagagtgacaatgtcaccaaaaaaattggtgaaataaaataaatataaacaaacgcaaatgaatgacttaaaggggagtcaaacctgggacgtctcggaaaaggggctagcaaatttacaccaggccaaagatgaagtaatgaagtgaaggtgaataaagagaagcctcccatgtatctagtaggttatg

SEQ ID NO: 196272 - DNA, 588 bp, Cannabis indica
aatgagctaatatgttgtagtgtccagacatgttgcttggcacaaaattcaaatttaaaccttaattttaaaatgtcatatttttttatcttttcaatttataaataaaactatatattttgacttctagacgactagagagagacagatgtaagttttagatcaaaaaatattttgaagagcaagagaaaaagattccaagcaatcatcatcaatcattgttgcctatttttatagtctacgtaagtgtacgcaatctattacagttaaatactcacacatgtgaagtcgatccacaggatattgatattgagtactacttaattggatttgtatttctatttggttgaatcgaaaacaaggttgaacaattaattaatagaaaattaaaagaaaataaaagaaacaataatgaatatagttgactatggatgaatgattaggaatatgaatcctattattttagttacccaattgttaatgtaaaatattagctttctctctttaagtgatgacagattattagggactactgttcagagttagttaaaaaccgttagtggttgttacagggttgttggaaggttg

SEQ ID NO: 196273 - DNA, 1703 bp, Cannabis indica
ttaaccaatatttttcaaaatatgatattttcgaaagtcacaaattaatatggtattaattaaattattttcaagtctatgttatagtaatttaattaatgtattacaacttggttaaagattaaaattaatttttcaaaagagattttaataaagacaaatacattttaaaatagtgagtgtgagagggttgtcatttgttatgaaacccacgatcttcattattagtccaacaccaagtgtatgggggagggtaccttctgacgattttattttcgtccccctaaggaaggtgttgtgccatacattgtcaaggtttgcttcctttatggatggggaaaagtgatgtattttagtgccatacagacccttaaggtggcgctactaaattaagtcatggaacccaaaataatggattatacttacaaagtcatgtttctgcctttgacactaggggacataacatgaccaaataaacactactttattttgtaaggaaattaagagttattttagttacaattaataaagacaagaataagttttgtagattattcgatattaatttatccgatcctaaggcagaattgtgaaatttctgaaattgttttatgtatttttctaagtgtgctcatgcatcatatttagattctaaacttgatatttatttttcattgatggtgcttatattgtattaatatcaagatctggcaggccataccctgggaaagggtatgctcaacgtcggcgagtcccagacttagcatctggctttggtcggctagccctgggcaaggcaactggccattgccggcttgccctaccctggatagttgctcatcaccggctagctctatgttgggcaatgtctggtcgcccattctctcttgattggttggtgcagcctttgtgttgacagggcgtaggtcacaccaattgctggagtttggtggatctaactacctgaagtgattgtattcacttatcgagttattgttttcttgggtgtttccacttgtgcctgggcctagttgcttaaagattggcatttggatgacttgcccccgaatgtttcggggagaaagttcaccctgttggccgactagaggtgcaccactaaagggttggccggccaaagtttggccaagtgggggtgttgttgagctagagatccctagtcagccccccaagccactggtttacacgccactagatctgtgtggcaagacttgtccaccttcaggtagggggatgtccatcatggttcctacaaaacctagttggactgtttgtcactagaccttgcccgatttatgaactagtctctcttagagaggatctctaatcagatcatgacctctctcgacagttctatcattgaactgccttatcaggtcactgtcttctctgttgttgcaatctaactttgcctgatgagatcagaggatgtactcgtggtcatccatccatcttaaaaattagcatctttaatgtgcaaatgcatcgcaaccaacagcgcatagttctttagtttggccaacatggtagacagcctctttaattctagccaaaccaaaattttctcctaaatctacgtgaggcttgccaattcctggccccatttccccaacataatatcataaaccagagtcagttgaggtgccagggggttgctccacattggccaaaccctcagtacaagg

SEQ ID NO: 196274 - DNA, 3084 bp, Cannabis indica
cacatgaaattttttacaaaaatgctaatcttttataaaacaacggtaaaacaacaaactagaatgaattaaaacaataagtggaaataactaaaaaaaataactagtgaaaattgaaaacttaacacaatacatagtatttttgaaagaaaaaattaacagtttttttttaaaaaaaagatttaccgcccacagtaaaaaaagttagaaaatttcagtatgagatataaaaattcaatttttttcgtaagttaagaatttattgcaaactaccaactttttacaaagaaaaactaaacataactaatgtgttgtacttaaactttcaaacctctcaatatcctctatagcattctcttttctgaattgagaaaacctaaaacaaatactctcttttaattctatttacaagaaaattatagtagtataaattttagcattccatagagtattatttcttgcatcccaaatattataaaccaaggcatttatcaatgcaatacacacctctcttcttactaacttggaccacctcttaatccatttcagactatagatcaactcaattttctgaagctttataccaacccaatcacacagctcataaaagatcatttaactataaacacaatcactacaaaaaatcttacttttagtcacaatcaaatttgtgactaaaagtgaaaaaattgtgactaattataaattattatttctatgttgtaactaaaaggtccgtgggtaaaagtattattagtcacaaaaattacaatttgttgtcactaaatatatttttaatcacgatacttgttgcgactaaaactaaattaattagtgacaacttgtatctaaagactatgttttagtcacaagtaacattttgttgtgactaaaagtcacatttagtcacaaaaaattatgttgcagctaaaaagttgtcactaaaagtaacaattttttatagtgaattgaagaagaggtgttgatgagtttctatatcccatcacaaaaaagacaactatccgagtcaatgacacccaaacttacaaagctggtgtctagtttggagtcttccccaacaaccacccaaataatgtgtctatgctttggaatactttgcctattccaaatgatattaacccacttcatttcaaaattctctttcggcaagattttggaggaaatgttgggaatattgaaggtcatattcttgaactctatagtcctcatattacttttggtaatctccttaatcataactattttcctactgtaccaattggaactttacagagcattataaccccacgaacttgctctttgatagactgaatgaacccaacgaacccaaatattatcatttccgatggaaatattccacacatacttgctaatagctcccatattccaaacatcaatatttctaaggccaagaccccctttattttttgattgacaaacattatgccaagcaacttgccccggacaagaggagtatgaaacacccttccctaagaagctcctacaaatattattaatttttccaagaatgtactttggtaaaatcataagttgatcagcccaataggatgagtgtatggataacgtgtctcattagcatcaatcaacgtgtctcaccaaaatgtctcattagcatcagtcaacgtgtctcaccaaaatagttgacccatacaaaaaataagcagagattttgtgcttcacaggataactgaagctaaaaaagtaccaattagcgttagctgttcaaacctcacacacataaaaatacaatttttatatttagttaggtccaatatgtgaatgtccaacccaaagcccactaattatttgtgttattgaaacttaattttttttatatatttattatggtatttttgacaagtgttgctcaagctttgttgtatttgtaatagtttaattattggtgatagtccgaaccgcaaaagtcgcaccgcaccgtaccattttttacggtgcggttttcacgattttttagttttgcggtgtgggtgcggtttaagaaattggaaaaaccacatgtgcgggttggtttgaaaaaatagtcaaaaaccgaaccacctgcaccaggaacacccctagttttgaatctttaacatcagctactcgaaatatagcaaaataacttttgtgtgttgtttgattgacctttaagctggttttgttgctctttttctcttttcagaatgtctagactctcctgtgtctggccctctccagttaagtttcacggagaaggttagtggtaatactatgttttaatgatacgaatgaatgtgtgtggtgcttgcttttaatacgagtaaggctgatagtttgataaattattttactagttgatgtctggtgatttgtttctaacttggtttggtttgttgcaattagttaagggatccggttgtcttcctaaattttttccaaataattaagttgaattaagaaagataataatctaagtatctggcttatttgattttttctgtatgtattttggatggagagtccagttttcctgattacacatgaaaagtcgtttcaggatatttttccacacatgaatgtacttagatttatattcttggaagcattatgaattgactcaaagagatattttagtatttcgtaatgtttgttcattacatgtcaaatatcatttggtaattgcattgtcttattttggtctagacactctagatagcgaacctgaaacctcttgatatattttaaaactgtaacaccctatatatgtagggccaatccaaaccagagagtttgtgaacgggaaaatgttatttccctcaaaaagcatcaggcagattctttcgtgcactaaagcaactcaattaacttctcgcactctttgttgccattctatttctaatcgcttttacccaactagacgcaatcacttctattcacagaaccagatcatatttgtcccagttgtttgcttttggtccgcacctctctttgttgttgcaagcagattcgttggtagtaaatccttcaaaatatacaactaatttttctcttgatttgttgact

SEQ ID NO: 196275 - DNA, 853 bp, Cannabis indica
tttaataaaatagagagtttaatcagtaattttataaaacaaaataatatttatataagataaatttttgaaaaaaaaaaagagaaagaaagaaattcgtcaagatataattttgaaataaatcgaaatgacatcatttatggttcttgaaaaataatgtgggacttttaaatttgatgatgtatacagaaaagttgatgtaaataattttgtatatgtaattattattattattaaaagaaaaattatttttcttttacaaaatatgaaaattccacttaatttgaaaaataaaatgaaaaaaaaatctacaatatcacctacatttttttgtgcttttagataggctaggttaatgttctgtgcaatgtacgtataattagttttttttaattaagtttaactaagtaatattaagtgcaatacatgtatgtttaattttttttaattatgtaatatatttttattttttaattattaaaataagatttgagaatttaatcttttagaattaattttttttagtctattacggttacattagtgtgctctttacatatgattatatatatgagtgcactcttaatgggtattacccatgaatgggtaaaattagaaaattttgagtttttatatatacttaatttttctatctaattaaaaaaatctctcacttttatatcatatgggctgagattgttccatcggtaaaaaaaattataaaaaaaagttttttaagcaagaaaaataagaaaagaaaaagttgagtttgagttaaatatttttgtatgaacatatttttgatatagtataaaaagagatattttttgattatatttttttaattaagtag

SEQ ID NO: 196276 - DNA, 3264 bp, Cannabis indica
tatttacaaaaaaaaattacagttgtacggaatttgaaattaatttacagttttaaagattttatttacataaagtctagttttttgatgtattttaatgctatactattgttattttgttgttgatttttggttatttatatattatttttaatgttgtttcgatgttgtttggatattattttcctattattttcatgtgtgtgtttttttattatttttataaacaccgtataaatgttaaaaaaatttgttttcttttagaaaagatttgttatataaatcaaagagagtcgtttacaacaatagaaagaatagcctagggtaattcctcaagccaaatacaatcattatcctgcactaaagcatgtttcgctaaaccatgagcagcatgattagcatctcgtctaacatgacgaacataagctaaaggaaaattagataaatgataattaacattcacaaccaaatcatgaaaataagacttaatgggtcttggattgttaattgcatcagtaagaagcagagaatctgtttcaatgaaatccaattgtaggtttaaactcccagcaaaaagtagaccatgaaacatggcctgagcttccatttcttgaggcctatagcaaccccgaactaactttgactttgcagccttgacacacccagaagaatctggaataattatgcctaaaccaaatcttttttgggatgaatcaaaagctacatcaatgttcattttgaggcaatgcacaggaggagattgccacttaattggggttgcaacaccatctgaatgagaagcttccacaccagtagaggaacggtgtgcaccagtagcagtttgtatgtctactacaccagctgaagtagaaatatctgctacaccaacagaaagagatggtacactagcagcactattacttgcatcagcagcttgataactagcagctgagttgattgtagcagcagcagtttggaagttgtgaagataagctaatgccttagaatggatttcaattgatgtttgaggtgatttaccatgaagaatattgtttcgatcataccaaataaaccacataatgcaaaaaatcatttccaacacagatttggtatgaagttgtgagaggttaaacaaaaactcctttggttgcaaaccagtagtagatcgcagttaaaaaaaaccagaatgaagccaaaccgatcttgcatgtttgcagctaaacattgcatgccccactgattcccaagcattttggcataaacaacacacaacagaggtaagaaatttctttttaaacattgaagcagcaatagggaggcaattttgaatggccctccaaccaaagattttcactttagaaggaagatttagaccacaataagatttccaccattgttcttgtgtttgtgaagatgaagattttgaaacttcaacacttaaacaggccagatggtaagctgattttactatgaattctgctacactgtagtgccaaaaccattcatctttacatgaatgaaaaggagagggattaagagaatattatccacatcaggaggagagaaatcattcggcagtttagataaatcccattctatatctagtgtgatataatctgaaaccatatttgctgaattccttgagtagtataaaggcacaaatactgattgacctggcacccactgatctgaattacatcttatagtagagccatcaccaaccttcaaccttcaacctttctttaaaagctgtttaccccaacatataccctgccaagtaagggaagacatcccccctttaagagcaaaaaccggtaataagaaaataacgacccttcaagatggggctaaggagagaatgaggattttagaaaataaggcaatcttgtttcgctaaaagtgcttggaaaaaaaaaaaaaaccccaaaacccaaaaccccttctagtttggacttgcaaaggtatatctatttcttccaatgaattttctttttatcagttgttgttccccaccagaaattggccatcattgtctcaatttccttacaaaacttggatggtaacttgaaacagctcatagcataaaagggtattgattgaacgctttcaacaatacttccttaccaccaatggagaaaatcttttcagtccatgaatgaaaaagcttctagattcgatccttaatgttgttgaataaatgtttcttatctcgttcagaataagcagggagacccaaatactttttatggcattcacaaatgggtatacctaagattcattgaaaggattgttttgctgcttctgtggtattcggggagaaggacataacaaattatctgtattgagttgttgtcctgaagccttatgatatatatccaaagtatgctttaaggcaccacatgaccgatcatccgcttgataaaataaaagactatcatccgcgaagaataagtgaatgacaactagggcgtgacaagatactgataatcctttaagtcggccaatggattcttcaaacctcaataattgagataaaccttctggacagataaggaacaaatatggggataatggatcaccttgacgtagaccacgttgaggagtgactaaacttgacacaaccctatttatgagaaaagaaaactgggttgtgtgttggcaagtcattataagagagatccaccgaacattaaaccccattttccccatgactgccgcaatgaaagaccattcaatcctatcaaatactttactcatatccagtttaagtgcagcatatcctttccgacctcgtttatgcttcaaagagtagataagctcaaaccccacaagaacattatccgtgataaaccggtttggtaagaaagcactttgagtttcggaaatgacaggtggtagaataaccttgaatcgaagtaccaacatcttaacaatgatcttgtaaatgacattacacaaatttattggccaaaaatccttcaatgtcttgggcttcttcatttttggaatcaaagttatcaagatttttttaaatgcagttggatttctccatcatttaacacatgaagcacaaccttagttactagagaacccacaatatcccagttttgttgatataacatagcggacattctatcgggtccaggacttctatcacctcccatactctttaaagcttcaagaacgtcgactgaagaaaattccttgagtaaaaaggagttatgttcagcagtaatggtggtaggtatggttgataaaacatgg

SEQ ID NO: 196277 - DNA, 1183 bp, Cannabis indica
gttttaaagtttttcttatactcgcatgaaattaatggtttcgagatttatattcatataaattatttaaaaaaaattcacaaaactataataaattttttaaataattatattattcaacaatatataaaataataaattggaatataataatttttctatctgctaaaaatatactagtggggcaaaagaaatcacaattttcctatacactatagtatgatactatattatagtgcccatttccaaaagtgaacatgattttttatgagcaaaaacgaaaaggaaaaacaaccacaacaatataatgattaaaactttaaaatttaaagccaattgaaagtagaatttattaaagttgtttttctttttttttttaattaaaaaaaagtagtatttattaattaattgtggatttcctttttcttctttaggaattaatgatccatatacttgaagtaattattttactttaatacttcaaaatgagtatccagaagcttcatttcattatgatcaccaccatgcaattatagccattattattattcaccccttttgtctttcactacttaattttttaaaaactaattaatcaattaagcttaattaatgtgatgtcatgttataaacacactttaattaatccaagaaagactttatttaccttttttggaggtaaatgagaacatttttattaattccaccaagaatacactcaaatagcacctttaaaacaaatatcaaaggaatttaagaagacaccccaattcacctatataccttataactataatgaatcaacccaattcctattcaactgactgatacatttcgactaacaataaataatcctatttttgacccttttttttacttcttgcaagcttttgaacccgaaaaatttcatttcgagagtgccaaagttgatacacaagagctatcatagtagccgagtacaccaactttttaaacttgctgatattctctgaaacccttgattaagaggttacagtcaagttccatcctaattagaatttaatactctgaagacaggacctactgatatagaactcgaaaaagagatgttccatagttttatctaccaaattacacatcaaacaagtaggatcgacagagatatgatacctgaatagcctgtctttagtcttaagtttaacca

SEQ ID NO: 196278 - DNA, 1932 bp, Cannabis indica
aaccctgcgaaactacagtactcattcaattaacctgtttcaaatgaaagttgggcagttcgaagctttggagaaaccaaagtgccaaacacagacaatgatttcgatcgctccttctgaatctaaggaacaataggaaaacaaccattgcagcatcagtgcacagtatgacattgacacccgtatatgtagcctaattcaaatactataaagtattaccatagtctaagcaaatatatgctctatataaggacagcatgattcatactaaagtaaaagactgtattacttacttgatcatcaactataagtggagctccattttgtggtgaggctttctctgttgattcttcactcaaaacaaaacataaacaaaacaacaaaaaattagaggacacaaggtactatgggttctggcactctatgtatgagccacatatgaaatttggagttcacccatttttcacaatgaaaatgggaaatgatcaatagggagaatttacagtaattttagcaaattccttctcaggatcaatataactttatactgatataatgtgaaagtgatattgtgatttttcccttttcatttgaatgatgaaatgcacaaaaatgagtagaggaaaaagacaattataccagaaaaaggagaagagctccgatgtcgtagctgcaagctgtcatccccaagttttgcctctccaaatccttgttttacattatcagaggaaccccatttgcacaatgcaaaccgagctttccgaacacccgaatcaactgtaaaatatattattagacaactctatacatcaaagatgcagatagataaagatataagagagctgtaacacaagttttaccatcttctgaaacttgcactgaagtagcagcagaatgagaatttaagtccaacattgcgctgctcacacgcgatgcacccatggaatatcgtgcactggctagttcaaaccatccctgtcataaatactgtcatcttcatattcttgaaagtgaattcaatcttaccacaaaaaaacaaaaaatgaacaatcaattagctcagagtatcaagttagggaataatcacctggcgtagcatcatagacaatgaatccatttgggttaaatagtcgtcagttgaatctagaaactgtaacagatgttggtctgtaattctatttgattccaaagtttgggtgttttcttctccaatatctgacctctgtatctgattctgactgtttccttcttccatttctaacttcacaaatatcaaaaccaaaccagtcaagattcttattcttcttcatttttcctttttttggaacatagtcttcttttgaatgtactacataacatcatatccccaaattgaaattacgtttctaacaactgaaacaattgaatcacacaaaattcatccagattcaagtttaagaacactaaattcacaacatgaacttcatacaaaatctaattacacaaaatattttaaattactatatttaatatcactcctattgttaaactcgtaatcaacttaggataggaaacaattactaattgaattcactcgatccaaagctaagccaaaagggaattcaaaccaaaaaaatatgaacatttagcaaacaatatttctacaatatacgattagatacgagcaccataagaactgaaaacaaaattgtacacagatataagaacaaataataccatgtctgctacaaaatgtcgccgccgtctccgccgtatccgagttgagatgtgctcaccgagatttcgctgagctcggcttcttcttcaattttatagtttttgggctttagatgggggctgttattgggctacattggaaagcttatgggcttaatgataaagcccatatagggtttttgatatgtaccatattttttgatataggaataatta

SEQ ID NO: 196279 - DNA, 877 bp, Cannabis indica
atttctacctacatggcattcaagagatctcaggcttcaaactgtttccaatccgaaagattttgtatggaaagttcttgagagcctatttgggttataaagtcattagatgggaagaggaaatccctaaaaagttagacacaaagattgctacactgaaagccgaattagaaagatgtgagaagatgcgagaagaactcccatcaatcttgtctgataagtcatcctttaaattagaatgcttaagggaaactgctacatggaagaacaagactccagtggatgccatgttttaataatattattccatcttacaataatagtttttattttatttgtgtttatgtgtgtactctttaatatgaaattatgacatgctataataattaataaagatcgtgtgctgttacactattactattcttttctataattatatttacataattttcaaccgatttttagaggtactgaatttgtaatattctactagattaaacatgttattgtaattttaaataaggatttttacaccacaaacaaaaattttgtaatattaaatcttcagttctattctgtatacgttgtcatgagtactatatatatagagagtcttcaacaataaatatatatacatgcacatatatagccagcttatttgaaatttagaataaatatatataataacaatgaatccagacggatatcatttcagtcatccacatcatagattttatctatataattggtcatatacatattattggcgttgttgcttgtacaatcaattaatcacatcgggagagaggagtattacaaatgcgaggggtattgcttcaatgttgtgcataaaaaatgtggtgagttgccagagcaa

SEQ ID NO: 196280 - DNA, 1363 bp, Cannabis indica
gttgccataaactggctgaggcagttcacggcaaaggtgatatctggtcttgagagagtgagatagagcagcttgccaattaattggcgataggaggacgggttgtcaagtggttcaccaagttcgttatcaagtttgagctttgggtccatgggggccttagtaggcttgctgcttgcatatccgatatcatccaaaagttgaagagtgtattttctctgagagatgaataagccttgtttggcacgggcaatctcgaagccgagaaaatatttgaggttgccaagcgttttaagcttgaatttcttgtgcagagagtcttgtagttggtgaagcaatgagagattgggccccgtaatgacgatatcatcgacataaacaaggagggcaatgaagctttctttggtgccttttgtgaataatgtgtagtctgcctgtgattgctgaaatccttcatctaggagtgcatcagagagctttttgtaccactgtcgagaggactgtttgaggccgtaaattgatttgtgtagtttgcacacgaggttggtttctgcattgaaagaagaaggcagtgtgagtcctttaggaagagtcatataaacctcttcattgaggtcaccgtttaaaaaagcattgtcaacatctagttgaaggatgggccattgtttgatggtggcaatggcaagtagaagtttgagtgtaaccatcttggctacaggagagaaagtgtcaaaaaaatcaagtccttcttgttgcgtgtatcattgcgcaacaagtctcgctttgagcctttccacgcttccatcactattaaatttgattttgtatacccatctacatccaaatggcacgtttgtttggtggtaaaggcacaacactccatgttttgttcccaatgagcgcttttagttcattgttcatagcatggacccattgttcaaattgaatggcttcttgatatgtttgaggttccctcatcgtggctattgcaaaaataaaagctttgtaaggatcagatatattggaatatgaaataaaattagaaagattagtggtgttgaagatttatttcgaattgtggagtaacactcaaaatctctgagataagagggaggtttagtgacacgagtagacctcaaactggttgtattgtcagctgtgttgtctgtgatatgtgattcagtatgtgtggtggagtcattggtttctgtctctgtatgttcctatggcagatcagtagcattggtttattctgaaggataatcacagattggggtgttgtgtataacagcaccgggaagaataatgttagaaaaaggatctatgtctgagttgtccatattaagtttatgaaaaggaaaaa

SEQ ID NO: 196281 - DNA, 720 bp, Cannabis indica
gccggccatcttataatacaaataatttttaatcccagattattttgtttagttgggagatgcatctcgtatacatttacaattgtcataattattaaaattatttaatatttttaatttgtatgaagaatttcgagtacatgaaattaagttttgttgtgttcaaaaaaaaaaaagaaattaagttttgttttctttaaaaaaaggacgaaattcataaatgaatgtatagtagtacctttggctaaattttttacccaaacactgaatacacttcctcccttccgtcatttctcccatgcctaactttacgcattgcctgcaatagactcttccacaaacctaaaacaacaaattaaatgatctcttaattagctaaaactaaagaattttgtcaaaattaaatcataccccatgttggataacaaatgatgactcaaaaacattgcactattgttataaacaaattaactaatatgttagtaaaaacgtactaggcaacgatggcgaaaaatgtagatataagtagaacaaacggcacaaattttagagtgaggaatcccaggtcttcgtctcccagtagcacctggtctatcttgatatgtagaagccatgctcacatcataatcacgagccatgctactcatctccaccgcttgcctgaatcccgactcagcaataaacgacgagttttggccacgacgatgatcaccaccacca

SEQ ID NO: 196282 - DNA, 1866 bp, Cannabis indica
ctcgattcttcttcttcttcctccttcacatactgtttttattttgttacctactaaagaaggagagagttagcttttatttgggtaatgttatagatttgggaaaaaaaaaaagaaaaaaaaaatgaagaaggtgaatagtagagagagagctcaaatacaatgaaaaataaataataaaagctattacaccttaaaagaaaaaagataacgtgtagaaaccagaaagatgtatattaagctcttcatgattagttttttttttaaaaaaaaaaaattcaacaaaatgacaacaccatcacatcaaaacttttttactattaaatacaataaaaacttttataattagttttttttaaaaaaaacatatcttgaagtgacaaaaagcataaaagagaaaaaactttatactaattcagtataatatgtagattataccgtaaaaaagaaaatatatgcgtataacaataaaaaaaaaattataaaaaatagtaccctgtgtaaatatcccgatttagatatataaaaaaaatatttataaatattaattactaaaaaagtctattaaatatattaattaattaattatacttgttttaattttataaaaagtaacatttacctattaataatttattattattggtaaaagaaatataatcatttaatagtgatacatatatatatgactaatacaagagttctatatatttaccttggcctttctgtccatcaaatcttattattatttatttatatttttataacgtaaattataaatataggtaactatttcattcctgaaaattttgctccccataaattgttgagatatcatcaagtctcaatagtgctaaaatgcttctctgagaatttggagagtggaaaaattaaaagtgacgagttatcaactggaggaattaaattattgatatgattttactagagcaaaataaaacagtaatttcgtttgctagtgtaatttcaatggataattgaaggtaataaaacaatttcatcatggattgataaattatttatggttataaaacaaatactcggtaatttattaaacacgaattcatgctctgctggttaaagctggaaaagggaaaaaatagtgaagctggtttccttataaattgattggaaaatgaggagcatgtttccaaaagccaaaacacgtttggttgaggtgactgattgtgaatatgtttggcgttatttcaaactccgcagttagttccgttgaatcagaaaatataattatcgttcagacaacattgaatcttcaacatctattaaaaaggtaatgatacactaccaagtgatcgtctttcaccgaataaataatatcatgtattatttaatgcatgagatgtgggggtctcatagttgagacatgaagttgtgttttcaatcgatagagagaagacaaaaaaaaatgtagacactagatagagactagagccaaaacaggacaaatattatattgccatgacaggtctcaactcaaagccacacggcaatcgaaagatccgagaagggccatgttcatcgaagtctaacaacaaagctttttatggaataataataataatagtaatttaaaaaaatcatggtaaacgaaaaacaaaaaattaaagtcacgattgacttggcaatctgatatactaaataactgttacaacttacaacagctgaaaagggataagatgtaaacaagcagtcaataaatttataaaatctaatgataagtttttactcagtaaaaacatgacaccctctaaaaccacttccggcgcctaattgttgcaatggtctctacccaaagtgtgacatatttgtacagttaaacctaagttt

SEQ ID NO: 196283 - DNA, 778 bp, Cannabis indica
gtggcgaaatgaacatgaaaatagttatggagctattgaatattgaaatgaaagagatgagatggcaacaacatatgtcttggctacaaggaaattttcaagcgatgactttagtgtttaagaaaagataagtgtaaatacaagagaaggtgatggaagataagagtatatggaagcttcaggtaatttttagtctagtgatgaaaagtgtttcgagaatgattcttaagagttttggcttattggtgtgagtgatgaaaataaaaagagatatactctatttataggcttttactaaccctaaatctacccatgccaaattgttctcaactaaccgtagttaacactaagaatattcaaatattcaactaaagtcagtaacttcctctatttactagttcaaactgaactccacttctaatgctagccgaaccataaatgcttgaaaatttattatagtacttttagtcattatccttgcttataagataaaacaaagacctttttattctaaccacatcatcaaccaagaccctcctagcaacacacgtccacaataaattcaaatttcaaagttgaattgtctccttaattcatgcacttatatgacttaggtaagtcaaccttgctccacgtatagctcaattcctaagcaccctcctaaattatttcttgtaaccaaattttgtttcttgtaccactatataatatatcatgttaactatgagacaagacatccacatgccactataaaaccatgtaactattactgtagcta

SEQ ID NO: 196284 - DNA, 1921 bp, Cannabis indica
gctttcgtacaagtaccaaacagcttcatgtaatttaacatgtatacatatacatatatatctgggttattttattatttatgttattattactatttactattattacattaatatttatgacagtcatatatttatattaaaataaatatgaatttttgttttcgttgtaaaaattctttccaactatacaaatatttatagagaaatccccactagtcattttactcattttttaaaattttacgtgtgagcatgagctaaacgtataaatacaatacaattgtatacataaatattaactatataaatatttataggtaatgctgtaatatttaaaaattattttcttaaattacatcagattcgataattaattacaccaatattagtatgacagttaaaatagcgtattttaataattctctaatattaatattaattatgtgacagtcagtagtcctgtgatccacaagaggaaatatcgggtaagctgtgcaatctcataccgcctgaggaaagtcaagtgtgatgattctgagactgtgtatgtatggtactgcacagttcaagaaagcttaaatgcgttgattgacactatctatatcaacaaggtggatcttgttttttagtagcccattataaaagaacttcacaattaagcgtgcttgatttggagtaatttcaagatgggtgacttggtctgtagggtcagtcgtaagtccatgaagcagccaaagtgatatactcgtgtataagagccacaatttcatgagtgtaaagacccaatacaagcttgaagtagtgacgtacaaattaatattattattattatgggaaatgacaggtgttgaaacatgatgagctgttagtagtaaagattgatgagagtgacagtttgaatttttgctggttagagcaacagtatcagtactattcagtactctagattttcatttctcttttaaccatattagggttttgcaatcctctctattctaaaatatctatctatcaatactattctgcttttggtaataattaactttggttttgatttttaaaaatatactaaaaattaatctttaatctttctattaaaagaaaataaatactttatttatgtagtacagtctatttttttaagatatattccatcagtctaaaaattaccccaaaaattaatatatattttttatctatttacaaaaaaaaaaattaatgtatatactgtagttattttttatctctaacaagacacatactcacttttccttgcccagtttaaatttttggtaataattaagttttgttattattcttttatttttgacattatatggtaattttcttaataactatcacaattaaattagaaatgacaaaaaatagataagacaaataaatttaataaaggtaataaaagagcataagagaaagctttgtcaataatgtcagtgaaattttttaagttctatacttctatatgcttcacaaagagggcattccagctttaaaagctattaaaggaagctaaataaaaataaaaaataaattaaagtttctatatatataccctactttcctagttgctatttatatatatatgacactctgctctgcattttgtcgtttatatacaaaagggattattatttggttgaataaagaaatttattaaagaaaaaagagaaataaattagtgaagaagagaaagattccattattagataaaagatgtaaatgttaatgtgtcttctttttatcaggtggttttttctttcctcttttgtgtaattatgagtttgtacctttaatagtactttttgaaaacaagtttattttttttttcttagctccaatatatctagataaaattataatagattttacttacttattgttcaccttcttaaatttt

SEQ ID NO: 196285 - DNA, 909 bp, Cannabis indica
tctttattgattgagatgcataatcctaagcttctgaaaaatggtagaattgagagaagaatttctttcctattactaactagtatctaattataactagttactatttatataatttgtaactaactagtaattaatattataaattagtaactagtaactaattttagtatactactcgattaccaggtgcagcagtcgatgaggtgtctctctcaccaactcgaaaaaacctctttaggaagtagtttcgtgattagagcgataaacttctctaatccgctgagacatgttatctctgatgttgctgctcaacgcagttgctttgaatgttcttccagttttccatgaactagtgttgaaaccgttcatgttgcttatcgagagagtctcacatctgttgttgcaagtcagccatagtttggctgagctgagcgacctatggatcaatttccttatggtcctctatctcaacgtgtggctctccaagtgggatctagtcgctggtgccagtcccgaaagcagttggtggtggccttgaggacgagttgaggaaccagttccaatgcctaaccctagtgcctagggcgcagcagtagtcctggttctaactctgtcaactactgtgcccccagtcgcttggctagttgctagagcttgtctgtcaacacttgtagaaagtgttacaaccatcttgattagtaactttcttaagttgtggctcacaatgaaagcaccaaaatattgactcagaaatctagactggaattctaagccacatccgctcgctagattggcaagaatgaataagtagttaagtatttataagagagactcaataaatttatagtagttcacttcaccgcctatatcgttatagtaatgaggctacatctacttcgagttttt

SEQ ID NO: 196286 - DNA, 1223 bp, Cannabis indica
tcccgaaacgcgtccgctgatcagaccctcgttttcttgataattagaacgactgcgaagaatacccgaatactccaataaggcggagagcggtgcctggattatgtttgaagcggataacaagccgaatcttctagaactgccactagaagaagaagacgaagaagaagaagggctgcggtacacgtcggaattgctcccaggcgcttccatttgtcggagtgccctaaccctaaaaaccatagcgatgaccgtattgaaaaaagccaagaacaaaatacatttacacacacgcatataaagaatgaaattgaagaaaaggcagatgaaggaatcaagtaaaagaaccttcgaaagcgaagctccgtttgtagaaagtcaaaatcaagaaggatgttacgtcgcaaaccctaacccaaataaagagaaagcaaaacaagaagaaatcgcatggtagttcgagcgatgaccaatcaggccacgggcgaaatcgatcgaagagaaagtttcaatcaaaatcaacgtggagagataagagagagaaggttgaaaggtgggtctggtctggtctgcactgctctctgctcctctcttctcagtctgagcacctatcaattatttgtttagagggtttggtggtgtcttgttgttattttaatattttaacaaattccttcctctattttctcgctcaatttaataacagcgcgagacgagaagagaaagagaagagatgcagcagatcgataaagactatgacgagaaaattagagaatttgggtctaaacaggacaaacctatccaaaccctttatggcctttatttattgtcgttatctcttttgaaatgattatagttgccatcctttttacacacatattacaagtcaaatatatgtaatttagtaacgccgaagaaaaatttgttcacctaaaataggataatgccgtaattcttttttgagaaatttgattaattatgtatgtattgagacaaaattgttttcctaaacttaacgtatctaatatttgtattttttttttttttatgaaaagtgttcttggattaataaaaacattagacttcatgttcattacaaaataggtctgtaagaattgtttaaatctctgatgggcaaaagtccacatagtgggcatcaaaattacaagttttactaatgttaatttttcctaaaactctattctactcctctctctctctct

SEQ ID NO: 196287 - DNA, 724 bp, Cannabis indica
atacaaatgataagatataaaatcagtaattgaaaggaaagtcgatgtatgtgagacacactttctttaaaacaaatttgccccctttacttgagcggtgctagaggatcagcgagcaacaacattccaagatacaacggctaacgagtagatgaatacaccactttcactactccagcaaactcgaattaatgtcttctctttatcactttaagacttacggaaaagacaaagaaaaagaagacacaagagagctttttagtgagtgattctttttgttggtgtgattagaatgaaatgtgaagcctttatttataggcttcgtgcggggcggaatacctaattgtgaacataagagaattaatgccaaaaatcttacaaaattagccatattgatcaatcaaaatcttcatcatatataatttctaatatcaatcagaatattcactattattacggtgattacatccttgatcaaatctgcatttattagcggctatttaggatgtttgcccccaaactatgatctatatattattgtgcccctaaactttttagcccgttaaaaataatggtccatgaactattcagtgttgtacattggtccttctgtcaagttttgtcacatgtggcaaataaaatgatggcatggctccttagtcaattgccacgtcagtgtcatatcaacaccacacgtgtaactaatttgaaaacaaataataat

SEQ ID NO: 196288 - DNA, 4410 bp, Cannabis indica
aagaattgcaactaaactatcctaaaaaatatatttgggaaaactttcactatcaccactctagttataatcttactagagtaattatgtaataattaaggatttaaatagaaatcgataaatgtgtaatttattaatgacaaaatttttattgaaatatgttggtattatgaatgctatatatgaaataaaatatttttacgttcgacaaccgtgaaaacctgattagttgactagaaatgtcaagacggtaatagttttgaatcttgttatgacgagaagttttaagttggtattgtttattgtcatggtgtctcgggataattgattaagaccaatttatccctagctttaaagattacttaggagttaagttagtgggcattttggtcattttatcatttaagttaaatctttagaagtattgtcttacgtgtaatttccatagatttaagtagtgtttggataagacaattagaagtttcagttattttatttaatttagattgtatgctcaggttgttgagttggcccttactactgaaggggctaaggaccatattcagaagaacagtaacattagaagagattcatggaagttgtcttccaattttggttcgggtagagtttttgaccctaatgatctggaaaagagaccaaatggcactctagctacgagtcctaacaagaagttccaaggtaactaaggtttttgctgaggcgggaatgacaattggcaaacttatcctgaatgtctaagatgtaaaagaggccatcaaggcaaatctcaagctcgatcctacttctagtgtggggtggtaggccacctaaaaagaaaattttttgccgttaaaaaaaccgaagaaagaagatgctctggttcctgcctgagtgttttctttgacacaagcatagatcgatactggaccttccacagtgacaagtcagatttctatttatggcactatgtttactattatgattaatattggtgctacacattcatatgtgtcaagtagagtgatagatgcactaggtaaaccatatgatatattatcaagtgggttttatactttgttacctactggagaattggtattattctaaaaatagagaatacaacgttaagagtgggtacaagactgttgtgatttgacaaatggggctaaagctttgcactgtaagaacacaaaccagaatgaaaatagagcaagaaaaatagagtaaaagaaaatggtactaatcgggattagcacagcgaaagctaatcaaggattagaccccgcctttatttataccgagagtttgttacacacagtaagtaaaacagaaagaaacaactaactaccttttaactaacaactaacaaacaaaaaaataacagaataaaattagttgttaacatccccccgcaaactaaacttggagacaaccatgtttagtttggacttatggtagtgaaatttcttagtagatagggacttggtgagaatgtcggcaacttgatcaactgaaagaacaaatcgaacaacaagtttctaagcaatgatttgatactgaataaaatgtaagtcaatctcaatatgctttgatctggcatgaaatactggattggcagcaagtgcagtagcactttgattgtcaacccagatcacaggacaatggttgagatgaatttgtagctcagacagcaaagattgtatccatttgagttcagcagcagtattggcaagtgctcaaaactcgcattcagtgctagaatgatcaataacttgttgcttttttgttgaccgtgagattagatttccaccaaagaaaataacatatccccttgttgatccactatcatcgaaacaactagcccaatctatatctgagtagctatgaagagccatttcaattgttggtctaagagctaatccgtctgagattgtacctttgaggtacctgagcagttttttacaagcttcccaatgacaggaagtgggggccttaatgaattgactgagtttgtttattatatactccacattggatctggttaaggacagatagtgtagagctcaaattgtacttttgtacagtgtgacatcgacaaatggctcaccttcaattaatgacaattttgtggcgacacttgatggattaggggaacttttggcaccttccatattaagcttcttaagtagatcaggaatatattttgattgagaaaggtacattatagatgagtctataaatttctaccctcaagaagtagtgaactttgccaagatcttttagtaagaacttgttgaggtcgtgtgtaagcttgtggatgagtgacacactaggtccagtaactaatatgtcattaacatatacaagtagaatgataagagaggtacctgagctataaacaaatagtgagttgttagctttagatggtgtgaatccccactgaatgagacactctttgagcttagtgttccatgctcttggtgcctgtttaaggccataaatggctttacgtaatagacacacatgatttggtttctgagggtcaataaagcctagtggttagcacatgtagactttttcagttagagtgtcattgagaaactcattgctaacatcgagttgctggacagaccatttgttagatacaacaagtgatagaacagttctcacagtgacaggtttgacaataggagaaaatgtttcagcatagtctattcctggtatttgaaggaatcccttagccactaatcttgacttgtatcgatctaatgagccattagcatttagtttaattctatggatccatttattgtcaataacatgcatacccagttcatagggaatgagtgtctaagtaccagcagattgaagagccccaatttcagagttcatagaagcaagccaattgggattatgaagagcttcttttgagtttcttggttccaatggtatctgggactgtgaaagtggatgtgtagtagccagataagactttggtttgactattccactttataatttggctgtcattttgtgtgtttgacttggagaagcctcaactgaacaatctgtaagagactgtgtatcaacctgttggatggtacctgagacaagggagttggtaggtatagatttgtcatttgtagctgtggtttgagttggtatgaaagtgggagatgtgtttggttagtcatgaatatttgggacatctattataggagctgtagtagtggttactagtggcggagtgatggcagatgggtgagttatgataggtatagtattgggagctaaaatatggggtgtatgtgatgatagtggcatgggaaaggggccaatttgggttgtggtaggtaaatgtgttgtctcaggaccaggagtggacacaccagtagtgcaggcatcattactttgtggtaacacagatgaagtactaaaagtagtagtgggaacattaatgggtgtagaatgtacctattgtgaattggtggaaggtaaagcccctggatagtgatcttcattaaagacaacattccttgcaatgtatatccttccttgagcattttcacataggtaacccttgtgataaaaggaatagccaagaaacaagcactgttcagacttgaagttcattttgtgagagtgatagggtttgagatgtgggaagcaagcacacccaaagggtttcatgatggtataatcaggtggggatgcaaagaagcactcaaagggactgatattgttgagaacagtagtaggcagcctgttgatagtgaatgatgcatactgaaaggcatgccaccagtaggaaaaatctaggttgcttttggcaagaagtgtaagtccagtctccacaatgtgtctgtgtttcctctcaaccctaccattttcctcatgtgtgtgtggacaaggatgagagaaaagaatgccttgatcatttaggaacctcttaaatggtttgtattcaccaccaccatctgctcgaacagctttttattaggcaaaccaaattgtttctcagtcatacttttgaattggagaaacatctcaagagcttgagatttcaatgacgatgggtaaatccaagtgaacctactgtaatcgtcaatacaacagatgtagtacttgaatccatctttggattgtatgtgagaaggtccccacaagtcagtatggacaagttcaagaggttggttggcatgacttgaagaaatgggagcttgtgatttttgccttgctgacaggcagtacaaaactgtaatgtttcaattgagccactatgaggtaattgaggcagaattttgcttaatgtagctaaagaagggtggccaagtttgcagtgccatatattgatatcattaaatggagaagcataaagtgcaacatacttagaaaattgacaatagtctt

SEQ ID NO: 196289 - DNA, 1327 bp, Cannabis indica
tagcaaatggggagtctcaaacttccttttggcttaggctcctctaccttcacctgaggagtagcttcctacaatatagttaaatattatttaatattagaattattttacaaataccaaaaaataaaaatagataaaaaaatttatatctaataatattagccttacgatattgcaaacaagctaacagagttttttttaacaaattcaagttggtacgtacaccatgaaaaacaacaaagatataagtcatattttttcagcaaagatatatgtccaatttatataacacagcagaaaaagaaaactaactaaattaaattttaaaccaattttatccatctacatatatacctgaaaaattcggattgaccgtttgaggatgaatctaacggtagtgtagagagactctacatcaaatgaatcattagaaatattcttaggaacctttatttgctcctcgattttctcgtcggacttgaaattatatttctgagattgttcatcaggaattaattcacaataattttattcagtatagttgaaaaatgaaaatcaaagaaaaagcagaggacaaaaatgaaagaagaagaagaaaaattcaagagttgaatgtgttatacaattttatgcattcggaacatgattgggtgaatgttagagagcagatgaccgagggtgcctgtatattaatattatgatttatgagtatgaaatagtgtgtcaattactttaatcagcatatatatatatgtgtgtgtgatggaactatgtatcatgtgtatatatcattatatatgtggtatataacatgatgatcatacataaatatataggttgattatagtattttaagagtgggatccatcgtttctgcaaacttgacatagaaaaaaggttgttctccacttcctcttttatttttggtttaaagtttaaaaaatgattatgatgttctctatgttcacttttccgattgagtcgtttgattcacaacaaattgtagctttattggagaaatgacgtattttttaaccaagtatgtgacgtttgacgttctcagcgagaatcaggtggtaaaagaaaattatattaaccaaaaactgattaaatattatggataatcatagtaaaactccttgtagttttattagttgcaatcaactatttaattaagcgtgattataaacataatttagtaattttatacttcttctcgtaaagaagaggtttcaagttctaaaattcctcgttattagactagagaaaagaaaattgtctttatttatgtattgaaactgaattgaatgaatacaagagaatgaag

SEQ ID NO: 196290 - DNA, 2039 bp, Cannabis indica
atgattttatgtaaaaggcttgtggtcttgttaaagaatatatgatttttcatgatgttaagtacttttgaaaatgactggcattatcaagctatcccattaactacagttgtcatgtaatttgtaaacgtgatttttgtaagaatagttctattaaatatttcatttactaagttgacttaataactttgtcacttaacacccatttagtaattacattgccaggtttttctttaatcatcctttgtttaatatgctaaaaaaaacatattactttctcaatgaggcatatgccaaatcatccatgccaatttttgagattgcttgaaataaccattctctagtgggtggatactattttaaatcctgtattttataaaaaattactaattagactttcaatttttattaaatgataaaataaactatttattttcaaaatagtaaaaataagactagaactcaatttttcaataatttttattttaatataaccaacttgaaaataattcttaacatattgaaatacaaacaatgtaactaattttattataatacctctaaatcaagttattattaaattttattttgataaaaaaaattaattcaaaattttatttgtaccattttgaaaaatacaagatatattttatcatttgacaaaatagaaaaatcggtaacttttacaaaacataaagtgccaaataatatttacttaatatgtgagaagcagtttacacctttcataaaaacagaaaagaaaataataaaaccaaagaaatgggtaaattttaaaagtaaagaaaaggagtaatgtaaagtgggaagcattaaatggtttggggtggtttgtggagcttttggtgagccaagactttgactaagtagagtgagtcatggatagaaagaagtgaaagctttcaatgagacattgcttcaattcaagtctcccttggattctgtaagagaagttgcatataatatatgcccacaatagccacctcaaaattttccattttcacgagtactatttcacatgttttcttggcaatcacagcttgattcccgagactccctcccatcacctttatcccatgtgtgtgtatttcagtatacagaggattttggacaaaatactaaaactgagatctaagtttttaatgctgctactactgcaactatatcagtgatagtaacagtaacactattctagagaagaaatatatttagagaggaatatacaacagttgacaatagaaaacaccccacattagtaaaccagctaaagattttcccaactatgcttttctaatatttacaaactcatattatataaatatacatatatttatataaatattgtcgctgctatattttttttggtaatttacctcagactactgatgctaaatttttcccaaaaaccaagtaaggaacctgcctctccagatcccatccaataaggttgataaaaaaacactcctttttaagaggatcttatcttttgaacctggagaaacttgagtccttggggtctttaagcctttcatcgtttaaatagaagaatcctgaggatttagcaatgaatataagttagcaatattatagcaatgtctatttatttgtaatggcagtaaatatcatatcatataatcttcaatacaaaattcttagaaatggaaccaataaactttttgtctaatgtttcataacctgaaaaggtgattctttgttctaaagtttaaattccaaaatggctctaagacaaggggcctaaaaattgattcagcatttagaagtttcaagaaaactgcaagaagttgcttcaaatgctcataaagtatgtatatatagatatgataagccccctctacacttcaccaattgtgggcacaagaaaggttatcacgtgtctatttgaagcttgtatcaaggtgattagagaatagagagccggcaccattctattacgaggatctatgtagtgtagctagttatgcctagagaggtgcgagtgaggtgtgtgcttcgcctattta

SEQ ID NO: 196291 - DNA, 2023 bp, Cannabis indica
tttctgtatatcattaagcagaatgagctaaagagtatcaatatacaaaatacagaatagagataatcaaaaaaatgacaacctgactaactactttaacagagaataagtaagtgaatagcaagcctaatgactaattatgccagctgaactggttctttatctttaacaaagccccctcaaacttagtgtggttaaacaaactacaccaagtttgtctctcacaaaggagaacttggaattagagataggcttagtgagggaatcaacttagttgatgatttggcaggaacatgttgtataaattttcctttgaatcactttttgtctcgaacaaaatagagataaatttttatgtggtttgtgcgagcatgaagcacaagattagcaacaagcattatagtattgagattgtcacaccatatgagaggaggagaggcaagaggcagatggaactcagtaaataaagacttgatccaacatgcttcagataccacagaaaggcttcaaaattttacttctgttgatgaacgagatatggtattttgcttcttggattgccaaccaataagattttcactccagaaaatgcaatagccaattgttgaccgtctgtcatcagggtcaatagctagcccaatccgcatcacaatatgcttatagattcatgtgtggagccttctttatatggagaccatagtcaagagttcgagctagataccttagtatacttttgacagccaccaatatagattgtagacgatactgcatgaattagcagaccttatttacattgaaagctatgtctggtctagttattgtagcatattgaaaagccccaacaaaagatttgtaggcagaaggatcttcaataggatcactctcataatgtgacaattgaagaccactattcattggagtgctttgtggctttgcaccttctaactcagctttgtactagaggtcttggagaatttttgttgagataacataaaaccttctgtagtatgaagaacctgaatacccaagaaaaaggataagatgccaagatctttgagtgcaaattcggagctaagagctgcaacgagaatgacacttgatcactgttggaactagtgattaagatacaacataaacctagatgtacaagcagcttgtggaggtgatttgaatgaactatgaatgatctgacttggctgattgaaaccccaaaatgattagagcagaggagagtttttcaaaccaagccctagatgcttacttcagtacattcaaggctttattgagtttacaaaccttgtttggatgttgaggatcaataaaagttaggtgtaactatataaatttcctcatgtaaatatccatttaagaatatattattaacatctaattgtcttactagctaaccttttgtcattgctaaagttagcataatcctaatggtaataagcttaacagctggattgaatgtctcattgaaatcaaagttaggttgttgatgaaattatttggcaactaatatggctttgtactggctaacactaccatttgggttctctttgatcttgtaaacttatttgtaccctattggaactctgttgttaggtaaatccactaaaatccaagtgttgttttttttcaaagctgtgaattcataatccatggaatagaaccatttttgatcttttaatgcaacaataatagactttggagtgagtgaggccatcaggattttagatttttgaatacctgacttagctcttgtattcatagggtgagtgttgagttgtgattcagttggtggggtaggtatctgtgcagcagagacatggtctggtgcagtagtagtcatggcagtttggtctgtgtttgcaacaggaatagttgcagaaagatgcatgttattagttgtacactttgcactaggattataagactaaaagtagagacctttatctataggagaggaatacagagagattatagagtatttagttagcttaaaccataaaagtgaaaacta

SEQ ID NO: 196292 - DNA, 1200 bp, Cannabis indica
atgaaacacaattgtcaacaatgaccaatataagcgcaactctatcatggtaggttttttatatgttattgttggtttagttgacattgattactgtgtctttacatttgaatctttagataaaataatttgaaagttaaaactagtgttgaccagattaataatatttgattgtacaatttattaacaatatataattacatgcttcataggtgacaattttttattttccaattatttagtcgtttccttatgattttattaccaaaatttatgctaaactacattaacaaagtctaagttattttgtcattgtctaatagttatcttactaaatatgcattatcaaattttatgaaattgaaatatatataatattattaacaaaatgaagaatcactattattaaattgatcaacaacaatgtttagttttaagttaattatgtaaatattcaactgtaaaaatacggtaaaccattgtcaactcaacaaataaaaatggtaaacgaatttaccatgatagagttgaatttatatgagctctttgttggatgttctatatgaaatacctatcaataataccaaaaatagtgcaaccaaatcagtgtatgagtattgctacaacagctttgcaatcatccataaaataaaaaaaaagtaaacggtacgacgactatatgtcaacagtaatatctaaatacatagcagaatcaaggattagatataaataggttgccaatttattattgctatattagcaattcaaattgaataattccaacatataattttttttaaaaaaaataataacattaatacaacaatagaaattgagagattgtagtgacaagtatttttgatgatacatgatttggattgatcgagaaactcaagatcaaacctcttgtagatctacatttcgacaatctaaaaaattataatgtgattattaattttttagattttgcattagcataattttatctttgagtttcatgtttgaaactagttgtgcttttagaattcttgattgagcaattgcgattgttttttcgttttgtgatttgctttttcgaaattaatggtagatttgttgtcgaagagttttgttgttggtaccctgcgttttccgtgagcaaagcttgaagaaatcttttgcaacattggtctcccttaataaagggacaagttgaaaaat

SEQ ID NO: 196293 - DNA, 1942 bp, Cannabis indica
aaaatcaatgcaataattaagtcaagaacaaaagataatatatttaacttgtctatattaagatatatattagtaaattattttttttacatttatggaaagaaacatataactacctacaaagttaatcaaatgactttgcagaataattttgtcttgcttcaataaattttatatattatattttttttaagtattactaggaggcaacaaagtatctaatataaatgattattaagtttttataatattaatctaagtaaaataaataaattgtgatattaaattatactactaataatatattttttagtaaataaaaaaattatatattgcttaaaaatcaatttcaattaatgttaaaagacatgagcgacacccactacaaaatattttacttttagtcacaacaaaacttgtgactaaaagtgaaaaaattgtgactaattataaatcatgatttctatgttatgactaaaaggtccgtagataaaagtattagtcgcaaaagttacaatttgttgtgactaaatgtattttgttgtgactaaaactaaattagtgacaacttgtaactaaatactatatttagtcacaagtacattttgttctgactaaaagtcgcatttagtacacaaaaaaaaatgttgtgactaaaaagttgtcactaaaagtaacagttttttgtagtgacctattaccatcttaaatattatattactaataataaatatcaaaatttatataaatatatagaactatacaccatatttaataacaatcctcttaattaatatacaattagatgaagtaataacaaatgagaaattctaaaaggcactagtagtgcttagcactttcctatatatcaatattgctattagttcaattaaatatcgcatagtctcatataatttaatacaataatttttaagaaaaatcgctaaccaatcacaatacaacatgttgaaaaaatgctaaaaccactgatatctaaaagcaataccggtaacaaatggtgttcattcaataaaaaaaataataaatgttgtcgtaattggttcttggatcttgaaccacgtgattcacttaatcttatattttatattagatctagaaagtacatactcatttataatcaactatttttaggaaatgtttgatatttaagatatttaattttttttaaatattaataataattaataataaaagttaataaatatatgtttgtatcttgctataaaacaattaacaccaaataatttcaaatcttgtaaattacctataattaggttattgttagggaaacttacaaaaatactaaaatttaaattaacttttacaaaattaatgtcatatgaattttttttcaaaaatactgtatttttataaagcaccattaaaacacaaagtaaaatcactcaaaacaacagtagatcaccagtaaaacaccattagataaggatacaactttaatcaatgataaaataagtgatatccatatttacaagtattattattaggcatctcaaggtttccagcactattgtaagaaactgtttctatctcacaaagcaagagatttcaaaagaacacacaaaaatattccacagaaccaaaggtatacaactacacatacaatattatcgaaattcctttgttttattaattgtgtaatactttaaaatctaagtatgtcactctgttagctaactaaaattaaagtactaactgtcttaactgtcgaaaaagcaatttaaatcagttgtacgtacttacaacttaataactagtagtacacttaaatggacatgtacatatttcaagacacacacattctaacaactatattgatgtgacacgttgtaagtggttaggcaaccctccaaaccccaacttgctctatctctctatgtcttctctctctcgacctctcttt

SEQ ID NO: 196294 - DNA, 1301 bp, Cannabis indica
gggtcatagctctgtgatccaaaggatcttagttcatagtcttgttaggagctgttgtttcttatcaagttgtgtgcttcaattgaaagattgttacttattttaaaaaatttacttgttaatgagaaggtaccactctaattaaaaaaaaaaaagacagtgaaagagacaagcttacaaaaatacatacattaaataataaaaaccatgtacgtcaaaaaaaaataaaaataaaaattcctgaaaactaaaacttaacaacaatgtcaacaagatgggatcattttaaaaaaaaaaaaaccttaaagaaccagagagatcactaaggtcaaccaacacaaatcctaaaactcaaagtctcaaagtctcagcttcatcgttcgtcgtcgacccgagcctaagctcaaaccaccagagtacaccgagctaggcaggtgagacttttttttatatataattggtgtagatcgatcgagttggatgtgaatatgaattatgagatccaacaggttgttgatgatgattatgaagaaagctcaagtgatgatggagttggagtactctatccttctgaatctaatattatatggttgagaaatcttattagccaaaacaatggcactaacccatcacaagtaggtcattacttttataggtgtcgcttggaaattgaaggtcatcctgacctgccagaaaaaatgactgcatggttcataaaagacttgagcacggacgagacagggaagagtttattgggagtcttaactagcacaagcaatcacctactaaacttaagatatctcgaggataggcacaatcaatatggggaccaagatgtgatcaagtatctttttttgagtgggtgcactattttaatgttcataagatgctatgctggtaattcattagaagtattatttggaattagtcatggtgaagcaagaaagatccaagaatatttgtttaattttgagaaccaaattccttttacagtggttaagttgttggtggacatgaccaaggacccagatcaactaaagaaagatattgtcaaattcattcacatcaataatatcacaaaggatttgccaattccaagctccaacaaaagcctcctaaaacagtgggatgccattattgaaggtaccaaatgtcataaacatgttcacctacttcaccttctctacttgtgtatcacatctactgatgccaatattgtctctaccaacaacaacaaaagaaatgaagacagtactcttgggtgtaatactatgctctgctcttgttttcccaggcaaaga

SEQ ID NO: 196295 - DNA, 1975 bp, Cannabis indica
gtaaaaatataatataacccgactaaaccgactgacgtacactcttagcaccaactagtgatattatatatttcttcaaaagaaaaaaaactagtgatattgtaagagatccctttttattatattttttaaaggccataaatatttcgaatcattcaaatttaaagatataatattttatttgatatcttttctatattatttttagcactcttacttttaataatatatcatctaaaaatactcacacattattatatatatataaatcttaatctttattaaactattatatacattgcacatttaattttttattatttaaaaaaacatagcattaatattattgtgtgactttaatacaaatttcaagaataatatttttttttatctctaatggtataacatctttatattttgttacctaagcttttcacatcattaagcattctctaaaatactaccactggagatgctctaaggtaacactttacaaagggctagcgatattttatgataattattaaatatacgaacccgatatttaattcaactaatagcaatacgatattttgaagagaaatactaaagggcactcatggtgcctaacacccttgtgatgtgtaatatcgctattggtgcaattgaatatcccacttattttattttaataaaaattatagagaaatacaaaccaattataggacgccacctcatagtggtgttaagcatcccatagcaatgctctattttgaagagtgctaggtaccattggtgctctttagtatttttcaaattttaattagttgatttttttaaaacaacaattagttgaatttttttgacaatataatttacgtgtgcatgtatcattatgctaaaaaagagaaaatttaaacttgggttttcttttgaaaagaacctttttgttgcacaacaatgtgatgtaagagtcaactttttctctccttcttgatctagggattctttctctctgttggggtgtcgctggctatgccattcatctatatatctcgttccctatctgagatgatagttttggatccctattgttttgtgggtctcaatggtcgatgattccaacactcatttgggttgtgggttctggcatttagaggttctactctcttcgtctggtctgagttcagctatggtgcaggcgcccaccaattcgctctatggatgtggtactcgggtctttaagaggtgagttctaggattattgttatcttgtgttggttgggggggttttgctagtgggcatagtctttggggtctgggggttgtggtccttctacagcagttaccgacaacaatgttgtggtagttgtgtgttcccgtcatctttactcctcaatgctggtggtggtggcggctactgttagataacgattgggtggtcttgggtgcttgatgtaggtggttatggctttacattttggggatttctaccattcttagttataggtagtggtatgctagaggctttcatattggcatttctaatcttgggcacttcggggagattacaatcgaaaagggggggatgcacgtttatccctgagggcagtgaaccctcgtgtttgatttgtctcctatacgaggtggttctcgcttgatggtgtgctttgtctagatatttgtggggttttccatgtgtagatcaggttttatttttaagtttttcatttttgttgtaataacagtgtttatcaccttgtcttttgtgacgatggctttgtgccattcttgttagggtttcctctttgtgttggtgtgagtgtcgttgtttagtcctctccttattaaatttgtgcatctttatttctgtctaacctgagggtttgttcattttccctgttaaaaaaaagacagagaatttttacgcatcacattcatactttcatatggattaaatttaaaatgaaataaaaatcatagattatgtcttaaa

SEQ ID NO: 196296 - DNA, 3239 bp, Cannabis indica
gatcggctacttctttcgtttagtgctgtaaaactaacagatcgattctttagcccgatttccatgagttctataacatctgaggttgattttactgggtgcatactagcatctggaacagctaatccattgggttgataatgagtcacaatcccaagtgtgtgcaaattaagggaaacaaatgttatgttatacttaagataacactaaggtcaaaacttgtaagagtaagaaaaaggatatttcttttgagaattgtcatttgatagcaaatccttcacttgttcattgtaaatttcaatcatttgaacaccgatttcatatgaaattgagctttttcttgtctgagatatgctgaaaagatcgcttaaagctcgatagttcacaccccaattctcttttgatgatgcattgggaccagtctaagaagcaaaaaaaaaaaagaacttagaagaaaaatgtatgtttttttaagtatgatatcttgaaaaataagagcaataccatagtgtatgtcttccccgaaccggtttgaccataggcgaatatgcatacattataaccgtctaaaactgatcgaatcaatggttgcgtgtcagaaaatacatcctctgccaaaaaaaagaatgaattagagatgttaagctttttcaaacgaaaacattctattttaaaacgaaaggaaagagtttagacgaaaaaccttgagttgaggcttgcccgaaaaccttgttaaacttgaacaatctatggccatctttgcccggtttagatggatttgcaactattaattccccattttcatcgatatgttctataatcgtctttcgctccttttgtcccggtagaaatggccttattcgacaataaaccctaatgtttcctgcaaaaaaaggagaaagaataagaaatttcaaatacaaaattacaacaaactaaagataattaagtgacataaaatcatgtaccctttaattcttgaagttcattgaatatttttcggttttcagcaagaactgagtgataattttgagctgcattagctaatgttttaagcttaaaacctgaacaagaaagttttcaaaatcattagaacaaaagtactcaaatgtatgaaaaataatgtaattaacaaaagaagtttcttaagttaaaataaaccaaccaaagttattaatttcctctgtatagttttcttttgcttttataatttcttgcttaatggaatttgaagacaatctcaagtcctgaaaattcacataatgacataattaatttataatgttaattagcaaggcttattaaaatgtaaaaaacataacacaattaatacctgaaatgcaccaaactgaatttccataaatctttggtaaatgagttctttcttattccaactctggcttttagtttccgaaaatgactctaattcgatcactttgttcttcgaatcttcatagagtttctcaagtgtttttagcttttcttcaagctcaaatgaacaattcttagcttctttttccaaatccaaacaatggtttttggtcatttctagttcttgctttaatgctaaaatttcaacattgctttgatccttttcttttgtcaaccgaattaggctctcgtcttcttctttcttcttctcttcgcgattattcttctcattctgtcataaggagaagttttaaatcgaaaaaaatagtatgaaacatatcatatcataattatatcataatcatatcatatcatacctcggtttcttcattagtaccaattgcaagagcttcaagaactctaattcgagattggtacttctcttcgcgagccttaaaaagattgttttgctgcaaacaacaaaacccttatgaaattaatacaaaacattctaaaagaaatcatcttttcattagaaaaaaaacttaactgtatgccttaaacattatatattacagttctcaaatgttctgcttgagttgatattcgcctttcgatttcttgcacaacctttctcaacaaacacgccacacgctgcaacaaatttggtaaaatccgtctcaaagatcacaacaaacaaggcatagaaatttatcttggttcagagacaagttcagtgtgtaaatttctcctaatctagccaagcaatcaatctcggtattcttttaggctaaggcaggctagacttgagtccagagtccaaaaaaagtattttttttagtagtttttgaaaatattatatatttttaaggctcactcaatctcaaggtcggcctgtctcccatctgagacaagcttaagaaattaacttaactaatgtgacagttaagttagttatatcttgaattttgtagtattcttacatggggtatttcgctattgtttcgctctacactttcatccaaaatactattgacaacgcttaagagcgattgagttggagcattctgcaacaaaagatactgaaaatgcattaaagatgaatcaaagaagagttgatgaaaaagacaatgatagtttagaacatcacaaatgagtaaaccaacatctaagctattagatttcatcatctccgagattttcgaaggaggtagatccatgtatcgcccttgtttaagttgaaacacctcatgaaacttgtaattaccaacgtgtgttaaagttgttgaagggtctacaaattgtcaaatattctcacatcaatatttttttttaaaaaaaatgtcgtcaaaaagagttagagagagcttggaagatcgaatacttacctgataaaataggactttttagtgatcgttgaaatttcgattcagacaatattttcctcttctcttctccagataacggagaagaaaaaccgcccttagggctttcggacttaggagttgaactacctaataataagctatcttcaatgaatcgcgctttaaatgtcacattatgtaacaaaatatgaaaaattatgagtctttaccttctaattcaccattacttgttagaacttgtgcagaaaaatctccatttgcagctacattcgagtttctaccgtgttcttttgctcgattttcggtcatggagttcatcatctcaataaaaaacctgtaaaaataaaaataaaataaaaaaacacacttttttgttacatttttatgtttggttaccatgaacaaaattaaaagcaaagtaattaaattggccaagtaattaaaaaaacatgctaagaatttcaaacacaaaaactaatgcaa

SEQ ID NO: 196297 - DNA, 505 bp, Cannabis indica
caactaattaactagtagatttcagtaataaaatctaatctgcatattataacatccaaaatcagtgccaaaagcaaatatcctcaaaagaattccaataagaagtttgaatattcaatctagagagttttcattcatctacaaatttgttcacgacacagtattagtatactatacatggatagaccatgatcaatcctactatataaattgtttcaacaacaacctcaactagcatgaaacacagaagccaaaccagaaatcaacaaaattaaatgcaagaatgtaaacgacagaatttaatgaacacacagattttagaaaggttcgaatgagtcttgaactagaggcacatgtcggttagcatttactactgaaatagtaaacaaactgttttaactaactctgtccaagtctttgatgatgtgtctgattcccattggtttctattttttcatgtcattattaatgaattggttttaatttctacacattatcaatgtag

SEQ ID NO: 196298 - DNA, 759 bp, Cannabis indica
agctattagaaaacatctaatggggtgctctaagatggataaattatgggatgtgatcattttattgttgttggtaaaaaggaacacgaacaaataaaaatgaaagaaattactatattcattaccaaattttttgaccccatcaaaaataattcctctatatatgggaatatttttttaaataattaaaatttaattcttttaatatatattgttatttatttcaaacaataaaaaatgctatatttttttttgtttcaatcttattatacaaagacaaagaaaatcttcaattaatctgtataggaaatttgtggtatgaatactatatgcttttaattttatacacttaaatactatattaattaaatacttaaccttttacgctatttttttttttgagaaaaagactattatattaattcaaaagaattacataagagtcattagtggagatggaatagtctccaaccaagtacaatcagtatccaccgtaagagcaaacttagccaaagtatgggcataagtgttagcagatcgtgaaacatgatcgatttgtgctcgtgggaaaaaggatacaagatagttaatattatttagaagagcatgaaaagcagaaaaaaaagagtgagatgactttaatccttaaacaactaggagtgaatcagtttctatgaaatctactgacagattgtttgagagtaaccaattcaagcttaaagcaagtccaagagcctccatttcctctgctttgaaatt

SEQ ID NO: 196299 - DNA, 2991 bp, Cannabis indica
caccagttctgttttgtgttctagcaaagttggtcagcagttctcagagacttgaagctctctatttcttagtgtttcttcccatgttggatatgagaaatgtcaagttgtgaatttttaattctttgaattcatggatcttagttattgtgaaaaaactagatgaatggttgaaataaaaatcataatcgaataaagcaaaacttagtgcaccaagccatttgtcaacctgtcgcccttggtacttcataactgggctcttgagttatcttttggtgcttccaaggttcttgaacttgagtacgagtactccaactccatttttgaccattctttagtgaatggttgaatcatatttggcatttaaaatgataacaaacaatgcaccaggtcagcctaggtgctaggctttgctttcagggcctcaggtttgtggttttatccccgagtttgcttaaatcttcattatttctgatgacagaaaaaatgtctggaacacttctttgagaacttgaatggaaacggcccaagttgacaatatgtcaacatgggcactgggtcccctttatggcccttcagaagttatgtttggttctcaaaaatagtttaatcttaaactattttgaaaacgtagaacatgctcagaagatttctcaaataacatcatttgaattggcccaggttgacacagtgtcatcctaggcgctaggccttactttaggcacctaggaagtgctatttcttccccaaaagtacatattcccctatttttgatgaagacaaagatgatacaaaagttagatcattgatctgatacttggaagtcgcccagcttcacaaattgtcaactcgggcaccgggtgctcaaaaatgaactttctccaaatctaattctgatgcctcaaatatgtttgtggtatgtatagttcatgtttctatgtaaattttgacacatctaattaagagtgtcttggaaactaaaatcctagttgatgatgtcaacctgggcgctgggtgcaatgctaggtgtccaagttgactttcaggggtgtaggttcatgtaattttagctcatggggagtatatttggttgctacatgtcctcatgttatagaatactaaaagatagtgagttggaaatgagttattgaagtccaaacttccatcctggagttgccaaagccaacttgggtgcagggctagggacccctcctaggccgacttgctatgactcaggactactcaactttgagatgtcatctttctttccacatgtgaaacattgatgctgatgtcattaaggatacttttggtgtaaatattttcccctaagtcaaatttacacttgtgtgaggctgacttaatgatgtgaactgagcctatttctctagaaactactaggtgggcattaattttgacaatcctagacaactatttatgttcttgaagaactcccaattaaattaggattgtgaattctcattccctattgaatagttgaatttgaaatttaagtataaatggagaataggaaagatgatcgtcttttcttatcacttagcttttttttttcaagttgaaatttagataagtccttgagtgatttcttttgatttgagatatcgtgaaatcatgccacattagaatataaatatttactttgatctttggttgttgtgttagcattgactctcttgtaacattttgtgtttatgtgaatatagatgtagtctttatcttctcttaggttgtagccttgaagttatttagcattccctcggttgtgtttcagcaatggtagtcttgttcatctcctagatttgataacagaggaggccttaatcaaccccatatctttacaatgtagaaggccttcaacatcccctcagctttgcagtggaggagacctttaacatcccctcagctttgtagcggaggaggccttcaacatcccctcagctttgcagcggaggaggcattcataatctcctcagctctatagtggagaagactttcaacatcctctcggctttgtaatggaggaggcctttatcatctcctcagctctacaaaggaataggtcttcatcatctcctcagctttacagcagaggaggtcttcaccatctgctcgactttacagcggaggaggtcttcttcatgacattcaatgatgtgttgtagcagtcactagttgttctttggtaaattgaggatgtgagcaagtcccaaattaatatatccaagatagggagtgatgtctttctcattttgggtgcaccatatagtgattgtaggtgcagtctccattttatccatggtcttaaccataaaggtctttgtcgtcccttatgttgtattcacaatggaagaggccttcttcgcccccttagctatctaaacagcaaaggaggtcttctacttcccctcagctgctagaatagtagaggaggtcttcctcttctgctcggttgtcatcacaacaaaggaggtcatcttagcgaatgtcaacgatgtgttgtaacattcacatggtactttttagttttcaaggagatagttaataccagctattcttaagaacttgacaaatatatggtagataggtgagacggctcggaggtttttgggtgttgaccttccaaggagacttggtgtcgatgactatgaaggtagttgttgaccaccaattttgacaactgacaacgaaatcaaatttaatattgatgcttgccacatgttacataattagaacagaaaagtaaatagacaaaataatttatagaggtttgacccccttagttagcgggtaatgacctactcccattttagttgtattaatactagagataaaattacttagatcattatagtgatgggatctaaagtggctctcttaagattactatatgagaaccagagttggcgaatctcaagtgaaagtaaggagtgagagagagagagatataagatgagttatcagacttagagc

SEQ ID NO: 196300 - DNA, 679 bp, Cannabis indica
aattaaacacattctagaaccaaactactcactcgcagtcacagtccttagtacggcaaaaccctaaacctttgcaataaatatacacaaaatggcataacccgaagactccttcatcgcctcccttcacaaacttggaacacgttcaaaaatggctgccaaaatggtgttgaaggacgcgaaatcctctcttttattgtttcggagctcaatattagccgccgcccggccccggtccacgtccccaactgttcccccaaacggcgacctaatccagtctctgcttattacgaaggctcagaaaccgctccccgagtcttgtttcgttccctctagctatctctacaactttggttctcttaaagtccagggctgcgatcttcattctgcttttgatttgcaagctgtgggaccaaagaacgtagttgatcgtgatgaagacgaggacgatgatcccgacgatgctgatttcgatattgatgatggagactttgactcagatgacgatgacgatgatgattctgatgattttgatgaagtagtagtgaaacagagaaggtgaaagctggttgtggtgtggtcatcatgatcattcattgggtctgggctgatacaaagtgtagtgtgtgttttagtgctcgaaaatggacctattatattcgatttttttttttttttt

SEQ ID NO: 196301 - DNA, 1005 bp, Cannabis indica
atttattctcaaaccatcagttatacattggacaacatatatatttaccaattttatttggaaaaattattttttcttttaaacaatatctgaatttcctaatcgcgataaggaaggttcctttgccgttacggatgttaacggcgctgttatgtttaaggtcaaaggctctgttttcagtttccacgaccagcgtttgctctttgacgcctccggtaactccgtcatctccctccgccaatagtcaaattttacctaataatctatatatatctgttatctttttaagttcttataaaattcaaagtttatgggcctcctcttgcggagtatcgccgatgtatcggaaaagacgagtgagttattctccggccaaaactcggtggcgtctccttggaataatagaaagttgtcgtggcagagaacatcttttaattttcaaccagagagaaaaattggatgaaccgtacttttcatatttttcaattttccagttttaattttctgattattaatatatattagacatgttaaaaacatgtctcttaaaaaaaataagacacggtgaacaaggccttattttatggctgtagtagtgtttcatctttttggtaaatctgaaatcaaattcaacacttaatatattttaattctgattattaatcgttacaattttgactcttattttttgagactcctactttttgggtaataattcaaaatgaatagtaacatttacaaattgctttggtgactgaggtttcaaagccttcggtttacgaggggctcttttgttccgttgacgagggtggtgacgatttacaggaagctttttagcaattttttggtaattttttatgtacctttattattagaattttcttcattttgttatctttattatattaattaataatttattacatatatatatattaatttattacctttggtagcgaaatatactgtaatgtttttagtattttttggtaattttttaattac

SEQ ID NO: 196302 - DNA, 763 bp, Cannabis indica
atgtttatgctgatttatctggagcttttggaggaaacagtgctagattagcagttgtttgtggttaagttcctaagacaacagtgaacaatacaccacttggaattaagttgagaagatgcataatagaggagctaccagatgatgcaaatgtcactgttgatgctcaggtaagtgccagaccagaagactatgttatgagcaaagcagtaatgagggaggttgaggtggaattagcagataaattagaggattggagtggtgattttgatgatgggtatgatgagtttgttatgttcatgccagaatttgacatggaagatgttgatggaggaagtgatcatgatagtgattctagtgtccaaattattgggacactggatgaaattggagaaatttatggaggtgaaactgtcgaggaaggcccagcagatgaggtccataccaatttaagtgaggcccatttacaccccaacgtgcccatacaacccatgccacttcaaacaaggccaatattagagcacaatacccaaacaaatgccaaaacagctttcaaacaccatccaaaccaaagaaaacccaaaataacaaaacattagcacaaaccagatcccacacacaaggcaaaactggccaattaaatctctacccatcacccaaaaccatgtgtcaaacaacatccaaaaaaccaagaaaaaaataggccaattaaatccttgcccatcacccaaaacgagttgtcaaacaacatccaaaacaccac

SEQ ID NO: 196303 - DNA, 701 bp, Cannabis indica
attttgactataaacaaaaacaggatgagtctgttcaaaaatagaagtgtacacttgcaataaattggcaataagattttaaaataggaaaaatgttgtataatgtttataattacacaattaattttttttttttcaattgttgtgaactttattttcatttagggcttttataagtataattataacacttatttgataactatattaatagtataacttaatattctttttggatgtaataatatgattgtatgacacataagaaaatgttactaataagatctaaaggtatattgtgttggtacacccatattacaattaattagattggatcggattgagttacgaagtaagttactttctttaaaacttttgcggtactactcaaaaatatgcaagcagtcgaaaaatacatgtcgtccccaaagtaaaactacctatttgaaatacaattgtatcaaagctctactgcacaataaaaaattgtcgaaacaccacacaaaaactactactcgaactacttatataatacaattgtaaatataaattctaaataatgcgttatacaagaaataacagaagatagtaaaaaaaaaaagatgttaatcatgggaatgttaagtgaatcgtgagaacgatatggaaaataagaatgagaacacgtcttcctttaaaaattaattaaatacgtttaaaaa

SEQ ID NO: 196304 - DNA, 1348 bp, Cannabis indica
attgcgaattatttaaagccaatactattaataaataaataagttgatctcataatcgtggataagaactaatgaattgaacataggagatatttgcatgtgggatgggttatagttagagagatttggttaataatgttaccaaacactaaagatattctctttcccaaaattgaaccaacaatcaaaacagagggagcttcagtttcagacacacacatatttttatatataaaatttcgtctggaaaaaaaattattaagcatataccttagtcaaactacctaattagctgaaaaagtttcatagcctacttagttgtagtttcattttcaaaaagcaaaagtattaacatgtatgtatacatacatatatatttctatttgtattagttcacataaatgtcttgtaaaaagcagactggccctaaaattcaataggcaatagaaaaaaaaaaattattttttagctcttatttagaaaattatggtatttttcaaaattataaaaaaattatgtaattttaaagaaattaaatttccgtaagtccaagctaagcttagcccgtctatgcctaagttcgagcttgataaaaagtgtgatatatagtggaaactagaaaaggtgtccatatatgagtcgtttagaaaccatatgctaatgctgggcaggttacttcatccctcatctattcttttgtttattttggcaataaaagattatagatctggttacaaaagtcgtcaaagtgtggggaaaaagaaatataaggctttactatacacacctaattccacgtaatgatgaataattctaattgtacatgacttgatgaattctatatgaagcaacaaattttggttgggtcaactttgttttatatgacacgaataagacagtttgggaggattcattcatttcaacttcacatcattttatatatattttttgtgtaagatatataatttgtgaaagacataatttaattatatatagtatatacactgaaaataacggagcttttctaataaccacaaaatttttcaaagagatgtgataaccaaattctattttacactttttgtgcactcttctctttcaaacatataagttttttttctaaaaaagaataaaataaagcatttctcattgtccataataggattatgtaataagttcgtttatttatttattttctgagattggagtggagaattcaaatttagaagctttattctttctgaaaaaatgtgtgaaactaatgcattatatttgtgataataactgtccgcaaatattaatacttcattttgtatatttgtatctcaagagtattttatatatcagc

SEQ ID NO: 196305 - DNA, 4826 bp, Cannabis indica
tccccttgtctaataccacgagttggaagaactttaccttgaatggagccattaatgagaaacgaaaaggagacacttgagatacagcggagaataaggttgacaactgaaggatcaaaacccaactttaacatcatatgttgaatgaaatgccattctaccctatcgaatgccttgctcatgtccaattttatagcagcataaccttccttgcccctctttaaatgtttaagcgaatgtaagagttcaaaagcgatgaggatgttatccgtgattaatcttgatttgaggaatgcactttgagactcagaaataacatcaccaaggatcggttgtaatcgaagaacaattgctttggagaccaacttataaagcacattacacaaacttatgggacgaagctgagtgatagtggttggccgtttcacctttgggatcaaagtgatgactgtttgattaaagcttgaagggtcccccccatcattgagtatgttgaggacagtttttgtgacaagatcaccaacaatatcccaataatttgtgtaaaacatgatcgacattccgtcaattccagggctgccatcagattgcattgatttaagagcctcatacacttcagaatctgtgtaagggcgagttaaaattcgattaatgtctgctgtgatgagacttggaactgtggaagaaatctgatgtagagcagcagtatcaataccttcagagctgaatagagattggaaataagactgaacaacatgagcaattccatcaactgaagtatgttcaacgccttggtcatccgtgagcatacggatagtattgttagttctgcgagtcgatgctttttgatgaaaaaatctggtgttagagtcacctgattgtaaccatgaaattcgagatcgctgcttccagtactcttcttcttgagttaataattcatcaagaatggactcacttaatttaatctcttcaaaatggctgatacttgtatcgtgtttgttgttgagagcttcaatcttttgttgtgaaattttatttttttggtaagtctccaaacttagatcgatgccattgctgaagctgtgaagcacaatttgacaggttattaagaaggttgctggtgggattagtctcggtattcttccaactgttggtgatgatgtcaaggcattgctcatctttaagccatattttttcaaatcgaaaccgagatttaaatcttggtactgatgttgcagaaggcacggatacatgtactcgaagggctcgatgatcggagccaaagaaatccaagtgctcaagtgtgggaatgacaaaaacatcagcccagtattgatttaaaaagccataatcaagcctttctttgacatttgtgagttgagtatgcttgttatgccatgtaaatctgtcaccagagaaatcaatttcttgtaaactacaattatcaatggcagatctgaaggcatcaatttggtgctcatcacgcagaggaccaccaagtttatcttggttagataaaacttcattaaaatctccaatggctaaccaaggaaagagaggtgctgtatcttttagtttgtttagcagttcccaagtgaagtgcctttgagaagaacatggagcaccataaaaaccagaaaaatgaaaagatggaccatcaacaaagccaatataacagtcaacaaagtttttaccatagttaagaatagatacatttacattggacttccacataaataaaataccaccacttagacctactctaggaacttcaataccattaggaaatcttaaagcatttctaaacttagtaatagatcctaactttaatttagactccataataaaaataacatcgggattacactgagaggtgagtaaacgtaattgacggaatgctctcgggttactcaagccccgagcattccatgagatgacattcatggtgattggcgaggctgtgtagcagccttcgccaagtaagcgtcacaatcctcatcgatccgtgaattatctggaaattcagaagaagaatccgattgttgaagcgggttggtgttagtagtatcagctagtggagaacctcttgtgcgacatcttttcagcacattacggacattcccgccggaggttgagagttgtcgtttggtgaaaagagaggacatacggttctcagtgacaggtggtgaagttgcagcagtagacgctgagataacagtggaagaagacattgtggaacttgtattgaattccgtggacatgtggatataggctggagggatttgcatagaaagagatattggttttttgaagtgtgtagatgtaaggggaggatatgtggccactggtggagaaggtagtgatgaattaatattaggtgttatatgtggtaccgtggggcatattgttgtacttcgagaggtatattcagtagtagaagcaggagtagaaaatccaccgtgagttgaaggagataacttatcaattggaatttctttagaacatgatgaagaagcatggtccttaatagagagccttttgggagattgagaagagacaccagtaagttgcaaagagtgcaaattcatgttattggattctatgatgtttgtggcatctaatacttgtttgcctttctcagaagaagtaacattggcaggggcagcaggaagatgtcgcgggtgctcaagaatcggattgattgtattacgagccaggcgagtgagaaaaggccaaggaccctccttagaaaagtcttgtctgtagcgatcgtaactagatcttggaagggaagatccttccatccatggaccatatggcagatttggttcaacaccttcatccaaattttctaaaaacagagaacatttgtcaaaaacatgaccaatgattccgcactcgtagcaaaagtcaggaagtctttcataacggtaatcgatccatagttcatcattcatccaaggaaaggtaaccaattgaccacgtaaaagaggttttgagacatcaatttcaacacgcattcgaagaaaaggcccccacccttcatttagagaatcttcaaatacttcaaggaacttcccgatcatattgccaaggatttttgctagtgcttcagttttactaagaaaaggcagtcggaacacttgaatccaaaaaggagtaagagtgtaactttccaaagtagcattttgcagaacacttggtggacataggatcatatgcaggttgtggaaattccatggttctttagccaacactctcttaagatctccttcacaaccaaaagaaactgtatatgaatccgtagaggcatcataatctgaaatggcaacagcaaaacgaccaacccattgtttggtaatgaagttcttaagagtttttgggttgtatccttttttagaaaatatcctacagatcagtcgattattgacaggtctaggaggagggatgtttaagttggacaagttaatgacctctctttctcgaattgacaatgcatcagacatggttgggatgaaattctccattagatgaacccagaaatgaagaaaaaatggcaagaggaagcaggcgggaacagttatattcgaataaagaggaaagaaatgcaaaccaagacagttaaaatgcaataaaagacagttaaaaagaaataaggaactaactgccacagagcaattaaagggcagacaaggctcgagagaaaagtgtcaattcgatttttctaaaagatctacattatctaaaatttttaagagaatttcagagacaaattttcaacaactaccgcctgtattattatattattctagtcccttttattgaaatgcctctggaaaagtcttattcttgtaattacaaagaaaaatttaaacatccgcataattattaatatttataaaaaatttatctctatttgatttttctttaaatgaatgttgtcctataggaatttttgtttaagaaaaaaaataataataacatatacttcataactttttggttgaaatatatcttcataattatttgcagttttcagttactttctatttattcgtatttaagatacattatttctattttaaattcataaaccaatgaaaagtaaaatgaattaaaatgaatatattaaataaaaataaatgatgtgttaaatttttatcggatggacatggtttgggataccattatttgactgaagatgttcattgcccctgtaaatgggacgagtattctaaatatagaggaaaaaaaaagaagaacaaatatatggttgtaacaaagcaacaaactcacttattattataacttattattgaagtacgtactatatatgataagctgtatataggcaagctaacatacagtacgtacatatcatacatgattgtacatatatgactagtactcaaataatgtctattcatcagcagacattttgaggacgccataattgaaaggactttgattgtaacagtccaaattgtccccagtgcttactcctagtataaggcagtacctttcatagaagccaatcctatctatgacccggtcatcaacaccgtggccgcactccacacctccgttgattatgttagtgatcacaccatagccgggaagtcgattagcagccacatcaatcgctgttggtttccactcgcccacaattacggcatgggaggatggtttgttgtactgtggagtcatccaaaaccatatagctgtctcgaatgaaacaactgtgtcattttcaactagctttgggtatcttaataggtccaatccgagtgctttaccagctggtccgtaattgtagttgctgattt

SEQ ID NO: 196306 - DNA, 732 bp, Cannabis indica
ggtatgttatcttgaccttttgagttgtagcttgcttttactggggaaaaagtggtcttcatatgctttttgttctgtagtagctttcattcaaagtattctgaaagtgttctgaagtgtcttatgtgtacatgagaaaatctgtaaaaccaagagttccttatcagctttctaattattgtgcaactgaatcacagcagatgataactgacaataataatcttatgtatttgtagctaggggttaaaatggcatagtaaaacctacataatttataaaatacattagagagtctatttgagtgagtgaaatttcagagagaatcgtgtaaggttgacaggcaagaggattaatattttcttgcagctattgaggatgaatggctatcaattttgctttgtttcatggttactgcactcttagtagtgattatatggcagttagaactgtaaatatgttcatcttggtctcaaatgttgctattttgatgttatattataatataggagttgaggatttgatgtatttataattagagtctgatgatatggaactaataactcagggctaaaagaagttcaggtagggatgttattctttggtagctgtttatgtaaagtagcaaggttgccatacatagcattttctcttgtagaaaggcatggttgaagatttgcattactgaccaggggaagaacatttggttattttggatttgtatattagttaatg

SEQ ID NO: 196307 - DNA, 663 bp, Cannabis indica
tcatgttcaattggtgtctaagcatgtgtagttacctgttttgtgttcaatgtgtcaacatgagaatgaaatggttatgcatatgttggtttcttgtttgttcgctcgtgcatgttggatgtggtctgctgttagcatcggcggaatggttgggactaattttttggactagtttggtcgagttactcagtagcaagttgttggtatgggtgaagaacttgatatggtcgtgtgggcaatttgaaaagctcgtaatgatatggtgtggcaggataagatgactacgacaacaaaagttgttctcttagcaagagtggcccttaattaatggcaacatgcttaatcaaaaagaatgggctcattgtctcacgtgatgaagtgggataatagacttgagtattggactaaaccgaatgtgaataagattaagattaatgttgtcagagcacttttcaagtcagaagggaagtttggtgtgggagcaataactcgtgatagttctggcactcttttggaagacttttcaatgagttttaattggtgggttgaggcttcttttgtggaagttgttggaatcaaagaggtcttaggttggatcaaaaagaaaaggtggcttgatgttcagcttgagatagattgcttagtggttgttcaagccttata

SEQ ID NO: 196308 - DNA, 770 bp, Cannabis indica
attaagcagaaaaatggtgttttacggggaaaggttcctcctttttcattttaattatatttagaagtacaatgatcgctaatagcctagtatagggttaatttgtacaacacttcatcaatttctaatcttatttagggctaattaggattttacattttaatgtgtacatatatttgtacatttaaatttaaagtagaataattccttaaaaatattgagaaattcattccattaaaacacattctatatattatattcaatcaaacatatctaatgtcatgttcaaaaaaaaaaaaaacatatctaatgtcataacatgaagtagaaaaatgatggtataggtgtaatactactatactatcccataatgttataaatgacaagagagaaatatataaataatgttattaagaatggacaattttcacatattgacatattagtctaatacttaatatcattaatttttatatattaacacataaaatttgttacactatatgaaaatagtgtaaggcctattagcaatttattaataattgtaggtggtaaaattaaaaatctagaaatatgtaattctcaaatcattaataaatataaaatgaaaaaatacaactttagttcaataaggagattaacactctctcacacaatgcatttggaaatttcctctattatcatcaaatataaaaatattgagccatatataataatataggctactctactcatcgtcaattattttcaccaattgattttgagataga

SEQ ID NO: 196309 - DNA, 1389 bp, Cannabis indica
ttctagacttctcaaggccaaatcttttaaacataatgatttcctttcggctactaagggtcattctccttcctactcttggagtagtattttatggggtcgggacttactttctcaggggctcatttggaaaattggtaatggtaaatcggtttaaaccctccatcattattgggtaccaaggttcaaaataattaattttaaaaccaatattccacctcctgataccactgtgtctgttttcataaatgagactggatgttgcgatcttcacaaacttcatagctacttctctgatgatattgtaaatgacattctcactatccctattgacccatctcaagaagactctcttatctggagtagtcatccctcgggaaatttaatagtcaacactgcctatcacctagcctcttctcgtgcttcctttactgcttctgcgccttcatcttcaaatctggaattttttacaaagtgggggaaaacactgtggaatctccatgttcctcccaaaataaagcatttcatatggcgtgcttatcatcatgtcactcatgctctcctagggtgttctagagcaagcaaagtttggaggaaaaccagtctatcacatttctataacactaataaatttcaggatattaaagactttcttcttgctggttttgaatgcttgacaaagaaccaaatatgtttatgtttcactattttatgggatatttggaataggcgcaatctttcattgtttaaatctaaggactttcctgcagaagaagtagaaaattatgtgcttggttttttacacgaatattcaaaatgtcaagatctttctaccatttcaggacatgtatctccttcaacagctctgcagactcattcaccaccatttggaagatacacccttcatactgatgcaaccctctctaagttggactccaagatgggatttagggttgttgttcaagattggacgggtcagactatagttggtttatcttcatctaaaacaggtgcactttttccacttctggctgaggctcatgctctactgcaagctcttcaatggtgtgatgctgttaaaattcccttgcattccattcactcagattgtttggctttagtaaactaaattaacagcaattggaaggatacatctccattatcaggtttggttggaaaaattttggaatctttatcttcttttcctactgctaagatttgttacattccaagagaaaataatgtaattgcacacacccttgctaaaaaggctctaggaacggatagagatttagtttggaattgtactagttccaatcctgtttcatctgattttgtaaccgaactttccttttcaatgttacaaatcagtttgttcaaaaaaaaaaa

SEQ ID NO: 196310 - DNA, 1477 bp, Cannabis indica
tcttcactcttgtagacatacaatgtatatctacattaggaaaggttgattttttccacggttttgttcctctcatacctaaaattttctctataactttacatcaacaattttcaacttttttcatgtaaatatctatgttatcatgattatcatgaaggctttatttggagctcttctgatcatataccttcccaacttggatccttatcctggttataatgtaattcaaaccgagtctcttgacaacgatgaatacgaaaaactagctgatggaagagaacaagtttggccagaaaggcatgctaatgtactctctagtaagtagtttgtttaagcttggccttattggaacaagtggtttcagtgtcttaacaaatttttattagttaaaagagattatctattcactacaaaattttcatgatcgaattcgaattgtgttcagttcttcttcttgttctttttttttcgtactgacatcatgaaacactttcagtcatctattttggatggttgaatccactcatgaagaaaggctacaaaaaacccctcactgaaaaggatgtttggcacttagatacatgggatcaaactgagactctaattaacaagttggcttcatttatctctttatctcttatgcttttattatgtgaaatttgtcaaactaactatttgaaatattaaaatttacaaaataaccacacttaatttactttatgcgactatgatacttgcacagtgtaaatctatgattattttgcaattataatagtcgtttatggttgcacagtgtaatttataatcatttctgtgaccataaaaaattattttggataatattttttgtaaagttattttactaataaattttttcataatggcatcaagatactcctttattatattaaaaattacatattttatgggtttttatactattttgcaaatataatagtttttttttcttcaaaaaagttattttatgaaaaaaagttaagatgtattggaaaatagtataaggtaattgattagttcaaggaggtaactagttactcctatggactctaagagtaaccttaactgttttatttccatatttctttaattattatattttttttttgaattttttccccacaataatttccctttgctgctatatgcattatggttgctgtggctttttcaggttccaaaaatgttgggctgaagaatctcagagatccaatccatggcttttaagagctcttaataatagcattggagcaaggtattgacttttaattttcataatataatgccttttgattagtttgttagtaaaagataatttaattttcataaatggttgtatgcatgcaggttttggtttgcaggtgttttcagggtaataagcttattccttggattttattatgattattttaagatttataaatgggaaatcgaaatacaaatttaaaaattataa

SEQ ID NO: 196311 - DNA, 648 bp, Cannabis indica
acaattgcattttaatagagtggtcttgagttcaaacttcccaatcaaaggtggaatttattgtgtgatacatattttcgctttggcaagagaatgctagggccaaggcaggagcttgtttgttgtatattatgtttgtaaattctttaattttgctaatttgttgtatattatgctgtatattatgtttgtgaattctttaatgttgctggtaaattatttgcactatgtttatttttgtaattttaaatagtgtaatttggatttgtgtaagtttggaatttgtctttgatttaagtttttaatttgttttatttactgtactttgattttctaatatttatcgattgtgttgtacattaaattaatatttaataattaaattaaaaaataaaataaattttaagaaattcaaaaaaaaagaagtttatttttattaaaaaataaaattaaaaaataaaaatagaatattcctttaaattttaattatttttaaaaaaaaaaattacatgatatagtgacactctttatgggttgctattatttttagagtttaacatttaataactctaaaaggctatagtgacgcgaatgaagagattttaaaatgatttactgactctactgaagtgtcactatatactactt

SEQ ID NO: 196312 - DNA, 1489 bp, Cannabis indica
gtgttggttcttattattttgtatcgtataattatttttaagatattttattatttattttttttcgtaaatttttgacattttatatttaaagatttttttatttttttatttttttattttttttttttttgtttttacattattctataaaaataatacgaaaataacaagaaattatataaaaataactagaaaataacatccaaacaacatcaaactaataataaaaaataacatacacgtaacaaaaaataacaataaattaataaaaatacaacataaaatacattaaaagatcgtattttttataagtaaaatcataaaaatcattaaatgtttaaaattccgtaccatatttttgttactactttgttaattttatgtatttgtgtatttatttttttttggttattttataatgtaatttacacttgtattaatgatgatgaggactcttgatttaatttgaatttctttttcaaataaataaataaacattactaactcccaaacacaccttttattgcatattaaacattaaactatgctaataaacctatctatgaactcccttgcttagtcatttgaacatatattttttgagatttttttcattttttatactttaattttttttttttttttcttatttttacttgaattccacacagaaacccctatagcaacttacggagcaacctaaattgcaatcaaaatccatatagcaaatccacatagaaaccactagagtaacccaaactgtaaatttgaaaaaaaaaaaatttaaaagatagtatttgaggtaatttccctatttttttattccttttaaatatttatccatattgttccattttaataaatttaaatttatggccataaacatgttatcaaatatttattctaattggggttaaatacttttacaaattatttattattcacatacaatatatatatatatatatatgatatgaatgacgtatatttagacataaaaattagcagataattagcggtttattagtaatttaattattatttatgattatatgtgcattggtagaaaataagtcctattataagaaatatgttttagttatataatttttcaattacaaagattttattgacttctaggagtgtcatacatgtttcatatgaattttgacattttcatattttatgcttggtaacacagaaaattcaacggtttgtcaattagtgtcactttgatacggtttagtatctataatttagtggggtaaaatttatggatagttagaatcttaggattatgctggataattggttatgaccattttactcctagtttaagagatttcttagtagtgaagtaagagtattcttgtcttttactacctaaacttattctagaaatccctagtgaatttgttagaagatgagatttatttatgatgaagtttatagtttatgcaagagcaaaaataagataatactctct

SEQ ID NO: 196313 - DNA, 1123 bp, Cannabis indica
ttttttttttttttttgagggagctcaatgaatcccttgctttttaaattttgtggtaagtgcattattatttacttggtctccaatttcattgactccaaactacatcattcctcatttcccatacaagattataaaactgccaatctaaccttaatattacaaaccccacctacctatctacccctgcccaaaatgatgggattgtcactcactgactatttcctttcctcattgcacagcacacaaagattgatcagaaatcttacagtaacacccaacgaagggaagggaagcaattggttgaatgaaaccctttaaagaaagaatttatggtggaggtgaatgttagatttccataatgcatcctcatataatcataagcacctaaaaccacctaattgagtaatgagatgttaatccaaaatatgcattgaaacattatattcagtgaaaattaatcgctgtcttgagtttgaataggcatattaattagtccttcaaaatgggacatcaaagtcttaaggctaagttgtaggcttaggcagatcttaggggcaggcccaactctagattttggtaaagggatgatttagataagccactattttttataaaaaaaattacatttttacgtttaaaagttttttttttacacttttacggttttctaaaaaacaaaaaaaacaaaaaaaaatacataaaagtaacatgaaaataacaacaaaaaataacatacatataacaaaaaatcaacaataaattaacaaaagtacaacattaaaaaactgtattttctgtaaataaaattaaaaaaaatcataaaaatatataaaattccatgaaattgtatttttgtaattattttgttgattttgtgtatttgtgaaataatccctttggtaaaaccaagttgaagtttgggtctagaaagaaccccacatttagaaaatatcttttttcttccttgagacaaaaggctcctaaattattttaaaaataccattttatacatacattttacaaaaacatatgtatatttagtattgggccccaatgcttcaagaccaatccagtataagatccaaaatactctaccaaatttttaaagggataagttgaa

SEQ ID NO: 196314 - DNA, 654 bp, Cannabis indica
agagaactaatacatataaggttcaataatatgagtgtgatcctcaacaagagtatggaaattggtattgttccttcaacaatattatctcaagaagaagacattgctgatgttcctcttcctcagaattttacagatcaagaaaatggtactattaataaagagattatcgtactagcaaccgccgattaaataaaatgtactaaactctctttctcaagagatttttcttcttttaattcgttttttcaaaattgtgtacaaataatacaatacattaggttatgttagtgttccaccaacatttgatttctaggattaatgatatgttgcaatagtagaagttctttcgttgcaatataaacatcagataaaaatacgtaatggcaaaccaaaataatttacacaaccatttcttaggaaaaagaatttatcctgatttataagtagaacactaaatgtgtatacttaacaaacatatagttagcctctatataagaaaaaggactcttgtcctaattactccagaataactgatgtggacagaggaggtaatacagatgatttataagccaaacgatttttattttcttgatagcaacctaccagtacacacacaccagaagagcagagagtggaattgttttacattct

SEQ ID NO: 196315 - DNA, 665 bp, Cannabis indica
aactcaagtggagaaacaccctacaatcccggtcatatatcacaacaacagtaaaccgacaagtgtctattctaaaatactacctcatatccgcataaaataatctagggttttctaccaaacctcatgacaaaatacccttaaataaacatatttttgctctaatttattattaaaactatagagctcttaacgagcttcaaaacagcatataaaacttctaaaacggacacccaagtaaaaaattatggctaaaatacaaaaaatcagtatttctcggttactgccacacggaattccagttggtacagccctgtaccatctggaattctggttcacaacagcagggtctcaaaaatttcaagttttcaaagtcccaaaacatgcttcaaacataaccaattgtttccaaacttcacagaacacttctatgacgtcaatataacattctcgacgtgatagaaatcaaaatcatgcttaaacacaaaagttgccatgagagttcaagctttgagcttaaaaatttaaacttgactctcacctctctacagcatcaaaatcttcaaagaagcaccaaaaccagtccaaaactcccagattctaaaccaaatgctaatttataccccagcaataacagaaccaaaattcaaccttagaacctaagc

SEQ ID NO: 196316 - DNA, 629 bp, Cannabis indica
atgaatattgatatgtatcaatttaattaataagagctaagctaagctaagctataggattcaattgcttcgatttgcaggactgacagcttgtgttcagtgttcacaaaataattaaataatgacatacattaattgtagtaggtaaggtttgtttattgtagatattaaatatacatttttaatgataaatgttaattaaaaagttggtgtctaatattttaatatatgtatttattgatataattaactatctaatttcatataacttagagtattgctattggtaccgtttagcacccttaagacgtgttgtcttacgatttgctagcgatactctctaaaagttattatattaaactatatgagacccgatattaaattagaccaatagtgatattgacacgtaggagggtgttatgggtaccttttagcatttctattattacaataatttttataaagtatcgttaattaattgtaaaacatcatatttaaatggtacacactactattacttaatagtataattcatttaatttgtatattttataatagattacatgcataagtcatccattaattaataaatatattgtcgtctaagcaaaaaaaaaacaaacgtaatg

SEQ ID NO: 196317 - DNA, 3258 bp, Cannabis indica
aataatgtgatttagcggcttgtaaatcgttgagtagctgttacactcaggttggccggtacacctgaattcaaaaatgaggtaagattagtaaatgatatgcatatgtgattacatgtttagagtacatgtttattaagcctgttagattacatcgatagcagaatcagtatacgtagagttatattggataccgatagatgtatgtttggctcagatactaatcgatgttatcacatcggtacggctagagtatgactagcgtaccgagtacaggctgatattatggtcgatagtactgtcatatgaacgttctagactcagtaccatattggacacggggataggattatggttggatgtatgggcacctgattataatccgagttatagttatgttattgtttatgcttttattactgaatctgtcgactcacagatattatttgcatgtgtaggtaagggcaaggctaaggttgagcagctatgagagcgagcggatgaagattttacatgtcggagcaattaagcctagagcatacgatctttggaatagctagacatattttgtatagtcgctaggtgacaacttttatatctagtacttgaaacggttgtaaatattttatacacgggatctcagttatatatatattatttggtatttgtaagtattaaataaagttttaattaatcacgttttttaataaactcgtgttgattagtaatgagctggacaattaagttaaatcacgataacacgcctaaactagtagggtgttacacaaacacccattctggagttcccaaagtaaacttgggtgcatagctagggacccctcccaggtcgacttggcatgaaggaggactactcaattccaagatattttctttcttgccatgtgtcgaacattgatgtccacatcattagagctacttttggtgtaaacagttgtggactaaaaaaggaagaaatcaattttataaaatataaacatttaaaatcatacaatctaaaattaaaatagtactgaaaataaaataaaaaagattataaatttaaaaataataaatcacaaacctattaaatagggggcacattggtggtgatggttttcaaatctcgtgtaatggtttgttgttctaaggaggcattacggtggtcgacaaaggtgggttggcgaactaaaaggctaaagaggaaaaaacaggtggaggagggatgaaggcagagaaaaaattggaggagaaaaagagaaatgggtgttatcagagcaatttatttgtatttatataaatctattatcagtgggaccccgctagtattagtgggtcctgtcagtaataagtaaacggtcataaaaaaattcgtattagcaacggactccactggtaatagtctatcgctaatagttacatgctaatagtatttgaattaaatgaacgatatttttcctgcacaatctgaaccatgctaatagcaacggaggggtctgctggtataaattaattttcaccgctattgtatttaataattattataaatttttgattttaatgataatggtaaatggtagattaattaataggaatatttgcggtatatatattattttatgtttttaattttatatatttatatactacatttttttttacggattaaatagcatatgttgtatttttgttgtagactagaaattttttttttttttttgagacaaagaaggctgcagaggaggaaggaacaagaacaacaagcagccaaagaggaagaagaggtatgtcctctagctaacttctcttgacctgagagcttctcttgcaagattatgagcgtccatattaaattgtcgaggaaggaactgcaacgaagcaccagggaaatttgagaagagcaatcgaatccgagacactaaaccagaaagtgcagaattgtcctgccaggctccatttacttttgagactaaattcaaacaatcggagaaaactacttgtggagaaaattgtgagtcaatgcaccacttgagactctgcaaaagagcttggccttcagagaaaataggagagacagcaccaggcaggcgatggtaatgagaagctaacacagtctgaaatccacacttgaagacaaaaccagttccagttaggccattctgatggtctacagctgcatctacaaaaagagcaggtgtatcaggtgacagggaaggagggagatgctgatgagaagcatgagggatgcgtgtagcctctgagtgcagagtgtcatcttgttgcgagtattgagtagcactgtattcctgtaaataattaacaataatttcttccacattgttagtagtataatttttgttgaaaagaatggagtttcgagcattccaaatctgccaaatgaaagtaatgaaaatttggaaatcctgtttaggaatattatgtaaagcctgtaaaagaaaatccttaatgtcacttctatgataagtcaagtaaaactgcttgaatcttgaagatttccaaatagactttgctcttgtgcaaccaataagggcgtgagagactgattcagtgttgtgcccacagatagagcaatttgggtgaggaagagtccttttaaggaaaagattgaaagcacaaggcaaaatatggtggaaggctctccaaataaaatgtttaattttgggaggaacaggaagagaccaaagggttttccaccaatgaaggtacggattaggattcgaagaggagggaacatcaactgattcaagagagcaagcaagatggtaggcagatttgacagttaaattgcctgaggggtggaaaccccaaataagagaatcaaaagatgcagggtcgatgggggttgtgaggatatgatcaacttggtaagaagggaagtaataatgaagtttgcggacgttccaagttgaatcatcattaatgaaaaaagaaacataagcttgggactggggaagaggatgcagtaggatgggacgttgaatgttaggaatcaaattgggagcagataaggggacattagttccagtaccaatcttccaaaccagacctttttgaagcaattggcgacctcaaagaatacttctccaggtgaaagaagaattgtgaccaataggggcattcatgaaatcagaatttttgaaataccgagctttaagaacagaatgaagaagggaattcctatcattccaaatacgccaagcctgcttagctaagagagcttggttatgacaggaaagaata

SEQ ID NO: 196318 - DNA, 791 bp, Cannabis indica
atagaacatgtttttgaaaaatattttcacttttctacttttaaaaacagaaactaattaaaaaagtgttaccaaacgccacctttaccttttttttcaaactattttgcatggcaaatatactataagaaaaaaaataataataataattaaagatagcacgtgtgtatcaaacgcttgtgtgttagaagctaaagagaaacaaaatacaaaagaaactagttgtagtgttgttgaaaacttggccacaccttatccacaaacacaacttccattctctctccctctcattctgataacacaaacacaaacacttgcaaaatcctaaatccatcataaccaaacaaaacaaacaaactgttcggaagaaaagaaaaagaaaatgtcagtggcaacttcattcccttacatcaaaatcccatctccctcttcttcctcttcattacaatcttcttcttcatcttcttcatcatcatcatcttcttcttcttgctcttctcattcttcaatcattaccaacagtcttttccaagaagagctttgatcataaggaattctcaaactgaaggtcctataagaagacctgttgctccttctattagggagccttctccaccttcttcaactccccttaagcccaccacctcctcctccctctccggtggtcgccggtggaggaattggggtggaggataagaatgctgtgactttggagtttcagagacagaaggccaaggagcttcaggagtatttaagaagagaaagcttgaggaggctagtcaaggtccctt

SEQ ID NO: 196319 - DNA, 1505 bp, Cannabis indica
gtggactggtttataaaatcctcaaattatatttcaaccaaatcttattgttctccttttttcttttttcaacttgttttactttgttgctattaagcacattgagattgagagttatacccaatttacaaaattcatgactaaatatgtttttattatcaataattaaggttttatatttctaaaataatttcaaaataatcaaataaaaacaataacaaaatatctttaattaaaaaagaaaaaagaaatttaacggcaaaaatcctcaaaaagttcagtttgatacagataagtgcccaacctcgaaaaatagcggcaatagtcctcaaagtcatgctttttatttgttcgttagtcctaatattaactgagacgttatctttttaaaattgccatgtgtcgaaatattattggtctaaattattattttaatttttaaaaataaaaataaaaataaataaataatttaaaattaatttcttttttctttttctttctttttttcttcatcttcttcgtcttcttcttcttcgtcttcttcttcttcttctcacttcaaaaaatggaaactaaataaattgaatgttgtattttgatatacataataaattttacatatatttttttcttttatcatttacctttaaaaattaagatttacacctgtaattttttttttttccaaaaagtttaaaataataatacatatttattaattattattgattttttaaattgatatctattataacttatagcatcctaaaaacacatttatatttttttctcaaaaaaaaaacacatttatatttatattttaataaaataatatcataattatgtatattaaaatgaaaattataaaattaaatataataattcaaattcaaattttacatatatatttaaagagtttttttttattattatttttacacttcaaaataattttttactttgcatttttacagaatttcacataaaaattcatatagcaactaacagaacaacttaaatcgcaaccaaaatctacatagtaactcacatagaagctaccggagaaactaccgcaacaacccaaaccgtaaatttgaaaaagaaaattaaaaagaattgtatatgagataattcttttatatttaataatcataaataatattaaagtagaaaaaaataataataaatgaaatatttattttaaaaaatatctaattatatttaaatttaaattttcaattgaatcatatttaaattttaattgaaaaatatctaaatgataataaatttataattaaaatctaattatattattattattataaaaattataataattgaaattgaatcaatcaaattcttgaagataataaattgcatttattataatactatcgatatggtaagtaaaccaaagacattataacgtatagtgattaattatttattttttataaatgaaaaaatatacatgtaaaaaatacattatatatctacatataagt

SEQ ID NO: 196320 - DNA, 818 bp, Cannabis indica
tagtttttttattgatgaaactgatttgtaaagttagtatcatttttacattattattattattattattattattattattattattattattattattattatttgttttagtttgtgtgattctaatatttatcccatatttaatgtttaaattaattttaaattttgagcaaacaaataagagatttgtcaaaacagagtatgaagttatgtatatatgaggtattcatataaatttatatgttggaaactaatttctatagttgttgtcatctttagattatattttttcattgtattttttttttcattatgttgttaacgaaattagttttagtttctgattgtctttgttatctttacccattttatatacttaaatcaacataggtttttgagaaagtaaatgaaagattgaatgtcaaaataaagaatgaagttagaagctttgttattagatattcatacagaatttacgttcaaaattagtttttaaagtttgtatcgtttttagattataattacttgcattgtactttttttcattatattgttggagaaattgatctttttctgctacttttaatgaaataatttgtttattttaatgttgataaaattggtttttgaagttgataacgtttttagattataattttttgcattgtattttttttattatgttgttgatggaactagtttttttttctgatacttttgatgaaataattagtttcttttggggttgatgaaacttacttttaaacttgatatgttttttagattatattttttttgcattattttttttttct

SEQ ID NO: 196321 - DNA, 591 bp, Cannabis indica
tctaaaataatatttaccctaaacataatttagaaacacttctaaaattaacttcaaacaacataaatgttctcttttcaattaaaaattatatatgaatttaatttttctaaaatacttaaatcaatcaaatgggagtttcacattattaagactactaaagatgataaaaataattttataatttcaaaccaatcagaaccttaacaagttttctaaaacaatatcactaataaataatgtactcttgtttgtcagagatatttcaaaataaataaataaataatgtactctttttttgacagaagtatttcactcatatttaaaaaataaaaaaaagtattcattcacattatttagtgtatttatggatgtcactaaataaaatattaatgccattgactataatgaatatcttccacatttgtaataaacattattaaatttataaatactacagaaatttcttttttttatgagaaaaattcattgttattatataatcacatgtaacaaaattaggctaggaatttcactcattttaaaagtatttccatccaactttacaacatattttgttaactatgaaca

SEQ ID NO: 196322 - DNA, 2339 bp, Cannabis indica
gaactctgttttcggtactgtaaattatttaaaaattttcaaaaatttacaaaaatgataatttctgacataaaaattaattaagaaattgtaataaaagattataattagcatttttcttttttgtatggaaaaaaaaacagcattttattgtaataaatttcaagctcagtcgaactttctatgagttttagtgtataaaattttaaatgaaatttgacagttggcccatctcatgcacatgatattgattatatcctcatttaattcatattaaaggtatataatatatgcaatgtacagttttctttttattttattaatttgtggatattttattttataatgatagaaacgcgtataaaactctttcatcttgttatcatttttatagttatataagagtagtgcttgtcacaatcccatatgattacttaattaattataataggttcagttgacacataattttacagtcttttacatcattttcacaccatcggattaaatgtaatcaaatggttataattaatcaatctgttcataataatttttttttgaaggaaactgttcataataattaaaatatactatgttcaataacaaagttaaattaaatctatatattgctgggtaattaaatctatatttataaacctcaagttgttttatccatgctagaagaaaaaattgaatacagcaagagaatgttaatttgaatcaataagtagaactttctgatatgttgaattcaatatgatggaaattcacttgaaagtttatcaaagaatgaaatttaagagctattgaaaagtctttattctgaagagacttaacaatacatatatgactgatcgtatgtagattcatatcataaaattatgagaaatttggtatgttttaattgctatatatttttatgtttaattctttttactaatttaatgtttttattaaatttagttgttaattgccaattaagtatgccactaggcactcatgtgtacacgagtcatatttttattagcttaaataattttattaatttaagtattataaaaaattattttaaaattaaaaataaataaaacaaatatttttttctcttttctttttagtcatcagaattttatttttaaataaaaaaattagaaaaaaaaataataaaagaaaccctaaggtgcgccagttttatttgtgaagaagaaagataggtcactgcaaatgtgcttgattacagagttaaacaagttgacaataaagaataaatatcttttgctaaggatatataatttgtttgatcagttgcacagaagatcttctccaagattgatctttgatgtggttaccaccaattgaggattctaaaagaggatattcccaagactactttttgtactcgatatgggcactatgagtttctagtgatgtccttcgttatgactaatgcagtagtagtattcatggacttgatgaacctagtattcaaggactttcttgataactttgtgattatgtttattgatgatatcctggtttattctaagtcagaagaagcccttaaacaacacctacgcatggtattgcaacgtctgcaagagcacgagctctacgctaagtttaagaaatatgaattttggctatctcaagtaattttcttcggacatgtagtaagtaaggatggaatttaggtagatccaacaaagattgaagttatttgggatcgaccacgacctaaaatagaaactgaggtcaaaagttttttagggtggcttgtttctacaaaagatttgtagaaggttttgccacgatctctactcctttgactgagctaacccgaagaattgtaagtttatgtggactaaaaaatgtgaaagcaacctccagaagttaaaggagagattaattaccacacaaggactaagttcaccaagcagtgacgagaagtttgtgatatacttgatgcctcgaggtaaggatatggttgtgtgttaatgtagtcatgaaaggttattgcctatgcctctaggaaattgaaggaatatgaacaacactatcccactcatgatgtagaactgacagcagtaattttttccctaaaagtttagcgtcactatctatatggtgaaaagtgtgagatttacactgatcataagagtttgaaatacttcttcactcagaaggatctgaacataaggcgacaacgatggatagagttggtcaaggattatgactgtgaaatcctctaccatcccagtatggcaaatatggtggtagatgttcttattcaaaaaggcccagggcaagtttctgacttaaaataaatctctctgaagtta

SEQ ID NO: 196323 - DNA, 1338 bp, Cannabis indica
gcctagccaacactgctgcagaaatcaggtggttggtgaacttgctatctgagttgcacataaaaccagctcaaacaccagttatctgggttgataaccaaggaacagctacacttgcagctaatcctactcgatctaagcacatcgaaatcgatcttcactttgtaagggatcaaattttggcaaaggagttagctgtccgatatgttccagccacagatcaaatcacagattctcttacaaaacctctctctacagatcgatttttgtatctcaaaggcaaactaaaaatggcttccacccctttacgtttgaggggggatattaactaatgttttactggttttaactgccctttattttctgttaacagttagttaatttcagttagtttctttaactaacttctgttttgctttgtaatctttgagtataaatgaagtgcttactgctcatttttagagctaagctttcagctaattcctctctctctgttctttctttttctctgagttttacgctggtttttaccatctgatttagcttgataagcttctacagagacaaataaagagataattctaaattatactgaaattacatatttatttaatatagaccgtattatattaaataataaatactattatgtttgaataaatgtattgtattaattattatgactaaattttttaatacaatataagttatattatttaatacatagtaaattgtccatattagcttgtattataatatttacaaagtacccagacccggaacccaaacccagacccaaaatcaaaactaggactgggacccgaacctcagacccagaccctggacttgaaccccaaacccggacctcgaacatcgaacctgggaccaaacccgggcctgacttggacctggactagagaaccgaacacggacccgacccgtagttggtcttacccgtagtcagtgttggggtcgattctattgaaaatatattgtacctttatactatatattaatacatgcaagtcaataccaaatatagtattgtattaaatactactaatacaatacaatatagtacaatctatcacaacacaatacaattcaatatgacataccaaacgagccatatatgtctatagttacaagcttacaattattgttacattaaaacctattaaatatttcaaattagaattaacattatgagtaactattgaaatagatttttctttaatgttattttgcaaatgactgaaacaacattaattctcaataaagtgtcgagaatattagataaaagcatcgagtgtgtctcaaaaattatttgcaaagaat

SEQ ID NO: 196324 - DNA, 1178 bp, Cannabis indica
tttattctaacatatttagcatgccataatatttaacatcttttaactactagggtaataaccctagtctaaataaccgctcattttatggtaataaccctaatctcggttcttaattaatcacaatcacaacatacaatatgagcgccactgtgcttaactctacgtgcatactactgtcttacctgatgtcttgcaaatatggagattccaaatccctgggtgttcctgaccaagtgccggtaatcttagtcacaaatttcgggattcacacatatagggttaatacctcattccacatttataaataatatacttggcattcaaaatacaaatattcacatagagctcaaaacgagctttccaacggtatatagaactcccaaaacggagtccgaatcacaaagttatggctattcgaagtttgcataaggatctgctcataaagaaaagggcagcggcacctgggttccaaacccagaaacaccaataaaaacttcgaatttcagcccctagatcacctccaaacaacccagcacttaaccaaaactttgaaaccatcaaatagatttttaatcatcatacagagagtttaaaacccaatttcaaacattaaaaaccaacaataataacccccaaaatcagattaaacaacataccatacacacttcaatttaaagcaagactcactattaatctaccttcaagaacaccatagcttcacgaaaaacaatctcagcccacaacaacaacaaattacagttacaagctcaactaagaacacactagcataaatcacaatatgcattcttatttctagcaagaatttaaattgaaaacagtaagaacactacctcaaactttcccaatctcaagcacaaaagccaccaatctttcaaacttgaatccaagcaaattttcaacaagatcaaaattgaagagatgagatttgagagaggagggggggggggggggggggggtcgggtttcaaggggctgataaaacaaagccgaaatttcattttattttacaaataattcacctttgttgttaattatccaaattgccaaattactctattgccccgaagggccatttaatcacataaaggctttcaaggataagcatgtcattccacataacatcaatacaatcaaataatttcagattattcaca

SEQ ID NO: 196325 - DNA, 1851 bp, Cannabis indica
ctatttatttggctacgaatgataatgacacgatggaggagagcatgaacaaacagtatgtggagggggatgtttcttgttccataaaccctgttggtgatctggaagcagcgaaccttgagtggcatgagcaatgatttgcctttgttggtatgcccaagggttggggaacccttggacaatgcattccaacctttccttagcgtgtaagcattctcctattgtgatcttcatctctgaacaaaggcttcatcttttcagatggagtgggttcgtgtccatattggctttactggttgtttttgtgtggattcagttgggaaaagtggttgtggtacaagttatcccttgctatgttatgagttgtttttgctttcctaagggcactatcgaagatattcataccatggaagctcgaatctgctggggttcatctacttccaagcaaaaacttcattgggggaagtgtctttcaaaaagtcatggtgtaatggggttttgtcctacgggagattacaaccaagctcttctagccaaattatgttataaagttcttatcgaccctcagtctttgctggctagagttctcaaaaccagttactatgctaatacttctctcatggaggcgaagctatctcactttagttcctatatgtgagacatagcatgctctgggatcgtgagattttggaacatgggctttggtggagaataagatccaaacatatataatgtgcgcattaatgaagatcgttggctgcctcgaccttaccctttctcccttcgaacccctcttgctgtccttgagaacaccatgatcaacacactgattcaggataatgggaacttgaatgagtcgttaatctgcaacctctttcacctggaggatgtcacctggattattaggggggagcctagcaggtctcagtggccagacgaccttatttgccacttcacacccaacggaaactacacagtgcatagtggttatgtaacttgaggtatgcttgatgccaaagcagaatgcgctttttatactcacatggaacaatggtgaaagtttatttggggattggcacgcaattagtcctaagataaaaaaaatgtttggagagtttgtttgaattggctgccaattaatttcaatttgaataaccatggaatgcatatattgcaatcttctagatgatcttgttgctaatggtatgctatctaattgtgccaccatctttcacccccgaagtgttacaatcaagtagcccatcacttagctcagttagcttataagaacaaagaatgtttctctctttggtttgaaagctttccttcgagggtctcagctatttttgaagtttattggcctcactttgtgtagttttgttttgtttgtttaaatttaataatgttaaaaaaaaaaagtttcatggcatacattaatcttataaatttaattgaaagattaaataataagtttattattattttaaagtaattttatttctaatatatatatatatatataagaaattatttttgtattttctttttgtctcttaagagtgtaaattaattaataaattaatgaattagtctaaccaaaggaggaagaaagaataaagggccagcattttcagaaggccagtgtccatcgctggcttgtagagctgagaggaattgaactgcctttcttactgatacagtgaccttttcatatgaaatctcttctccatcttctatcttattatcaacttcaccaatccttcctttcaattttttcactcccaaaaactgcatatagacatataaaatataaatgtatgacactatgagttatcatatatgatatacagg

SEQ ID NO: 196326 - DNA, 513 bp, Cannabis indica
tacactgttctcgtattaatagctacaattcctatggtttatgatttgaaaggagaaatatcatattggtgataggatgttttttttttcccaaacataatgttacagaatggagatggtggctttgcaacatatgagctcacgagatcctaccaatggttggaggtactcccatattactgtgcaatatattattaaaatccaatgtttctccttgacatataagctctctaccaactcatgttagtaggatactgtttaatatctggatctgcataatggtattcatgtgttgttatgttgctcatatgtgtggaacccatctttctttttggaccgcatatttcccataaagcacacatatagaaggtgtctgtttgagctcttttgccaccttctgtaatacatagatgataacttaattgttttgttgtttcttttgtatttcagttgatcaaccctgctgaaacctttggtgacattgtcattgattatccgtgagagccaaaaaaa

SEQ ID NO: 196327 - DNA, 1299 bp, Cannabis indica
aaagtattattaattgaaacacataataaattagaagattaatacagaaaaataaaagtatcattttcttattattacctgtagaacaacaaggccattctctgctaaaacagactcacaacaactaaaaaactcttcaataaatttgtggccaacatgttctaacatcccactacaaaatgcaacatatattacaccaattcacatgttattgtttcccatgtacactaagtaaaaaaagagaattgctaaaagacattattagtcctaacatctttctcggtgtcatactgttattggtgtaattaagtattcagtctcatattatttaaaaaataacttttagaaaatatcgctaattaatcatgatacgctacttatagaaggtactggacacaatgttcatatggtacccaacattgttattagacactaatagtatccaacactttctataagtgatctgagacctgatacttaattatatcaatagcaatataataccgaaaaagtactagtcttgtaacatttctcataaatctatatattgtgcttatctctatgtaatgtttcactctcaccaagatatgattctgtcacatttgtaggtagcaggcaattgtcgatagtcacaaagaagaaatttaatgttttcctgttaacagaattggtcaaaatataaataattattataatttatttttgtttctcttattttgatagtaaaaatggattagtaaataataattatttgatacttgaaggccagcatctctagctttcttttgtgctagtttcaattgctcctcagataaagtgatgccagtgtaattgcatccagttcttttgacaatttcaatacccaaacttccccaaccacacccaatatcaagaacttcatgatttttatcaattcttgcctggataacattttgaaaaaacaaagagggaaattaaataaaattatttttatgattttttcattatattatagaattaatgtgtatgaaaaagtgacactcactttctcaattagaattaacatttttcgcatttgtgcattcttcaagtcttcatcaattgactagaataattcaaattataaattagtttataggttaaaattaacctttagagcattactacaaaatcatttgggaatttgaatttctaaccttaaatatagcacaagagtattgcattgtctcatccaagaatagagcaaagagttcattactctaacaccaatcaataaaaaattgtaagttttctttcagaattgggatttgaacatgaata

SEQ ID NO: 196328 - DNA, 1465 bp, Cannabis indica
taatacctataaatatataaaaatttattcctttatataactttgagagagtttacaatacttgacatctaagtaaatttttttaaccttttttatttttatgatcgcatatgttatgactatttacaaattttcaaaaaaaattaaatagtttataatatcaaaaataaaatttacatattttgttgtacacacaaatatttatatacgcggtaggtaattatttaaactttatttttaaaattataaactattcaaattataagtaggaacaaactagttcaattgattttatactaattgcatagacattttatgtaagaatacatattatatctctctatatatatgtgtcttagtgtatttcttttcacctacttatttttaaaaaaaaaagaaaattaatgttcaaggactacgtgtcccactttggttgatgtcatatacttacaccaaaaacataaaaaagttaatgttaaaaggtcacgtgtactgtatacatatatatatatagattatactactatatttatagggaaaaaaaaaaacctttttcaggcctcgtagtcgacatgttcacttgtacaagaaaaaccatatagataactattactaatagaaggaaaacaaatgaatagaataagcacatattgattgaattgaagtagtaaaatatctatttacatcacattagctaacgagggagaagatagaagaatcacaaacaggcagccacaacccaaaattaaacaaaaaataaaacccatttctaaatgcaagtagtaggctaaaaaaatcccatttctaacaaacgtgatttgatgttggcgttggtttaacaacttagttgccaaaacgacctcttcctcttgaaggcctttgctgactgcccctgttgcgatattgttgttgttgatgttgttgtacgccattgttcttctgtgaaagaatcctcatcctctcttctttcatgtttgcaaacaatgaatccagtgtttgaggcctttgcttatgcatcccagcattacccccttgctgatgctgatgctgatgctgatgacgctgctgctgctgctgctgagggggtggcatctgctgctgttgcgggggctgttcatcgaatgagaaactcggttaaccagttgatattctatgtcgaattaataacaaaagccctctatgaaactatatgatcagaagtacaccgtttaatgtgtatgtttggttgagagtaatagaatcattccttggttaggattttaagtattccttccacaagtccattgggcaataaaaagaaaattcacacacattcccattcccgtgttttcattacttctaaccctatcttatcattacttctatgattaagaattattattcaagaaactggtggcaacaatagtaattattatccccagcaataatgccaaacagtaatttgcaggagcttatagaagactaa

SEQ ID NO: 196329 - DNA, 1051 bp, Cannabis indica
attgtgggataatgtcccacatgcaaataaacgtaggataactcaaatatggaaccatatataatgggggctacacttgtacaatgtgtgatccgcacatatacacttaacactgacaaataatattaggttccataggggtttagctattggattatatatatatatagggaatttctactatcgctatggtatgaggttgaaatgttgacagtacaatagactatgttgtaggagataacttaataatcattttttttttctcaaaatgcacacataatttcttcaaagacatcataataatagtattaaaaaaaagatcattgagaaattaacttgttctgcactataaaagaaattgctatttttagtgacaattttttagtctcaacataaaatttttgtgactaaatatgacttttagtcataataaaaaaataatttgggactaaaatatactatttagacacaagttgtcactaatttaattttagtcacaacaaatattgtgactaaaaacacatttagtcacaacaaattgtaatttttgtatctaatacttttagtcacggactttttaatcacaacataagaataataatttataattagtcataatttttttacttagtaaaatttcttgtagtgctcatatcaatatgacaaattaagagaggtacttgaaatgagagtcaagaatggttagatgtggtaaaaatctctattactgagtcagtcttttattttcagaataattcccgctaaagtattatcaaaaagattcagagtttgaagactaataatattgacaataactttcggctacaactcttcgataatcaagttattcgacaagtaacgaaaaaaattaaaattcagatgctttaaaagtgactcggtaggtgatttgttggaaagattgagtctttgaaaattatagataaaatccaaaaccgggcgtaaatcttggtaaggccaaattggtgacccgagaaaactcaattcaagatcgggtgtctttgagaaaaaagttgaagtaaagtaacaaaac

SEQ ID NO: 196330 - DNA, 1994 bp, Cannabis indica
tatatatataaatagacaaaagaacacatacccctgattaatcctctttgttgttcttgttctacagttttaatatgagttgcaatgtgggtatgcgatgttgatttaatgtttcaatttcttgaaataaagggatatgcgaattaaattttttgctctctccctgagaagagcctttccctgaaggaatgcctccgaagcctgatctcaccatggaagacctgcttgatcttactgggaaccttcgtgtcgcggatgaggatggttgggaagtcaacgaggagagggagtctgaggttggaaaatcttgtctgttggggagattctgttcaaacaagaacatgaatagaaacctaattaggacaatcttgggcagagtttgggggttagcagaggtagattgggggttgaagatcaagaaggtggctatcgaagcctctttcctgattttctctttcaagaatgaatcggatttgtcgagaattgtcaataagtctccatggatgctgaacaatggagtgttgattcttcaacgattttcaacaattcggactaactgggaggtggagatgaatcggtttccattgatgggtagagttttgaaccttcccactaaagccataaccaagaacaacatgctacgactagcatcaatggcaggagcggttattgaaatccaaagagaagaggtaacaaagattacagtaaatggttatttttggtttaaagtgtggatcgcgatcgataaaccgttatatccggggtttctctatcctagttctggtgatcgaatttggctccctttccgttatgaaagattgccctttatgtgttttagttgtgggaagataggacatgatttcaggtcttgtgcatcaaatcctgtgactgtcgtggatggtaagggtcattcttcagcagccttcggtgcttggttaaaagtcgatgacaaaccaatggtgcaaaagggaagaacggagatcacagaagatggagagaagggtactaatttcagtcaacctgctgttagcttaaaggggattagcgaagtggagaagtctcaaatggtggaacgaaagatttgacactctggtaaaatgtctgggggaagtcttgaatccgattctactccaagaattaccaaccagaattctctgcgtggggaggtacaaacttctaaacttcttttcctttcgaatttgtgaatttaattgattgcttttatgctaatcggggaggaaaagagttagaaaacgaaggaggctcaggggtgaaaagaagagcggacagtagtgaggttttaatcagggggaacgggttagacaatgaaacaggaaagagattacacagagatgtcagtagaggtaatgagaaatcggaaatggttgtctctagcaaggagggggagtggatagacatccctatcacattggacaggagctgtgggaatgtgaaaaccggtcagaagggagggaggaaaaagagagttgtgaataggaaagataaaatgatagataataaattgaaatccccagtggtaacccaaggtgatgaatggatcggaagctctggaaacttgatgaaggatacagcaacaggggacatttctaagtctttcgatttgtcctctggtttgattttggaagtggagaactcggttgaaccgagtcgccgagaacaatgagtatcttgttttggaatgtttaggggcttgggaacccctggacattaaaaactctttgctcccatgtgaaagattatcatcccgggatgatatttatttccgaaactagacttaatgaagcagcgatggaaagaattcgaattgtgttgggttttgaaagttgttttgtggtggcagccaaaggtaagagtggtggtcttgccctcttgtggaaagatccttttgaagttaatataaaatcctttactatttcccacatagatgctataatggaaaatggtttaggattttcttggaggtttacggggtt

SEQ ID NO: 196331 - DNA, 1198 bp, Cannabis indica
tttttttttttttttcatttttgagttcttgaatttgagtggattgaagaaagattttgttggtttttagtgtacaattgttagattgaacttaaaaattattttaggtatcaatttcatcctatattgctttaatttttcaaaaattaaattgaattgaaagcttgtaatttggatgaattattgaagcatgaaatttgggcttagaaactacatgtataataagtgtaaagtttgcatttgttttttatatttttgggatctcaaaaatcaggttttttaagttttcaaacccaagtaccgcgagccccttgaattcaaaaatagagcattttagaaacaacattttagttacaatataatttcttaatgactaaatgtaaaagtcacaacaaaaagttatttatgactacaagataatatttaaatacaaattgtaactaatttagttttagtcacaatatattgtgactaaaaaatacatttagtcacaaaaaattataatttttgtgactaatacttttagtcacgtaccttttaatcacaacataaaaatgataatttataattagtcacaactttttcacttttagtcacaagttctgttgtgactaaaaataatttttttttaaagtgatgcttgaatattctttttgcaaaattaaagtattcgcgacgcttgtatagacaacagttttatggactgttagaaattttttacccgactatgcaaaaccaacgggaattcgagatttttttagtagtgatttgaaaggaacaaatctattgaaacatatcataaaaagattacaaaaagggagcttcagccttagaggcatccacaagccaagagagaaacaatcaaatgagctaagtttattaataattaaccaaataagtaaaataacaccacacaatttattttgattatctaccaactcatcatgtaataataataacaaatcacatattaattcttaccaaagtaagagataataaatgaagttattataataataatgtaataaaagtacatatatatatatatacgtactatagttgggacttattattatactatatagtatctcatactattattatagtacgagattaaatattaaagatttgagttgatattattgcgagaataataattaggagtgacaaatttacgaagctgtttatcagcttcaaa

SEQ ID NO: 196332 - DNA, 1715 bp, Cannabis indica
taccgttgaagtcttaatttttttttggctcgatgcaagtcccaggtctctaaaattcaatttttaatgcttcggagtcaagagttgcgaccttctctagagagtcccagctctgcgaaagttatagaagcaaagttttagaaatcatccaaaagttgtgaccttccctaaaaagttgcgacccttagccaattggagaaacactcactctataagaaagccaagagtcaaaactttccttagagagtcgcaatgcttgggtattttcaacaatttcctttttgtgcaaaatgaaagaaggaagctaggttaagtgaggggggcttcaaattttctgaaatgaggagcagggacaatagctaagaaggaaaatcatcattggaggatgcaattttgagtttttatcttttatctttattttttcatgcttgtaattgaattctttatttgttagaaatgaagattatgggctagtttctctttagggattttatgtgaatcttttggaaattctttttatggattaatgcagaactttttttttttcttctctcatttcaattccttataatctatagttaatttattataattatttactggtccatttataattattattcatgaatcaaattgaaatctgaaaagtgtaaaatttgataatgttttgattgtttggatgcaaattcaatttagaacgaaagtatctaaataatttgctcaatttatagaagttgtgtgtttaataccttctctatgattcaactttgctatagaaaatatagggagttatcgtttagattgaatttgtaattattaactagattataaattactttgcaacttgtttattgaataggaaaaagaagatagggttttggacattaaaaagtaaaaatagtggaaataagatgatcatatttgttctaaattcattctcattgttattttgttcatagtttattttaattgattttattttatctacttgaaaattctaaattttatttgatcaaatagaaccaaaatgttgattgactgataatgtgtaattcaattcttgaggacgatacttggtttttaccaaattattacaaattgtgattacatacgcttacatatataaattaaaattttgcaacacaattattagtgacggcaaaatatcgtcattgataggtctactattagtgacccattttttgtggtatgagatttcatatatgtggtatgaagactagatctacatttaagttgtattttttatgataagataaatggattattatttggttgacatacttaacttaaaaataagacgacaacgacgtagtcaaaatataaatctctatatttatattataatttattatatataaattgtattaagttagttaaatacgacataaatatatcataaaagggttataagcatgttaatgagttgatatctaaatgggttcaacgaattaggtcaagttaactcgtttataactgagttgagtttgagttttagtttttgacacgattattaaataggtcgaatatcaagtttgagtttgacatttacttataatacttgagccttgacacaatatacacaacccaagaacccaaattaccacccctagtcccaccgtattatacccatcagagcccaacaactttaagcaaagtcacattccattttacacatgtgttattgggtttttttt

SEQ ID NO: 196333 - DNA, 830 bp, Cannabis indica
aaaaacaaacatcaaaactaaaaataattaaaaaatatacatatattaaaaactaattcaaattaaattcaaattaatttaaggtctaaaggcttcggactagctataccttggatcatgtccttaagttggtcaaactgtgcttgcacagaaggatcttttgttgtgggggctttattgactgacccttcttggggaggcaatagattctagagagataggggttggccggatataccctgtgagagggtatggtgaaggtcggccagacctgtgctaaattgtagaccctagccagccattcccaggtacgggagctagccttagccgaccaagcctacacatggctgttgtgattggctgcattgggcagggtctggccgctaattactcccccatggctggccagacctacaatggacagggtttggatgcacgtgatgcttccatggtcggcctgaccgtcaaagggtagggtctagctgcccgtgactctgtagtcaactgatgttggttgtgtgttgataggggtagatcacaccaattgttggagtttggtggatctagatgtctaaagtgatcggtttgacttcttgatcactgttatggatgtttccacccactctcggtccttatcggttgaagattgacctctgggcacctcgctcctcttggggaggaagtgttgtactctggccagccaagggtgctcctgctgatggcaggtcgtccgttggttgtacaatggggggtgttactaagccagagatccctgactggccccccatgccgctggttgttagcatttggttgtttttgtcgtttgacct

SEQ ID NO: 196334 - DNA, 1481 bp, Cannabis indica
gttggaaggctgaccttgacttaaagaagtcaaggtggtgcacgggtgttccgctgccagaaaaggtgagtccgtgacacgtatcctagcatttaatgcactccagaatcaaggtgcgaagtaataatgaaaatgcccatttgttggttttaacaccaataattgaataaccatcaaaatatagttgtttctagaagacgactcctcgatggttgcaccttgtcatacacgctcgacttacacatggacacatcatcatcacagacggaagctagcttccgcagtcaagtgacattttaaatatcactatttcattcttcaattttcacatgtccaaatgaagaaagtgatacaagcttccaccacacacaccattctggaagcttgggaggtaaatattatccacgtttccgacattgaacacgtggattctaaatcaaaatttaagacccatcagtgggactctcattaaagacaaaatgggccaagcccatttgggtgttaccttccagaaacacgtcatggttccgcacttgcaaagtcttccgccttcaacaatctgagcccagtagaatggcctcacgaaatcagagagacaagacaccatgttcctgaaagacccttccaatttccctttatattcctgcacataaataagaaaactttagttggcagatcacaacagtgcatcgaatcaaggttaaagggaaaacttcgtacaccaaattatgtaattaattcaaattaattaccgacaattagtgtacgcggtgttgaccaaatcaatcccaattcgatctgcctagtcagtagatcgtcttatccatgggctagacttcatgagaaagccacgaatattctttattgtaaactccccagtagagtaaaatgagaaacctaatgtaattatcaaactactataaatactctattaatctcatggatcaagggttaactctcttgtattctttgctcatgcaaacttaagaacacatattttgtgtatttcctaaggcatttaccagcaaaacttattgaataatactgattcgtaaactaaggttaattaacgctccaactacgttaaaaattatttgtctcttactttatactttctctattaattatttattatttcatttttgttatttttgttctatttttaaaaatctcgattaataaaaaagttaggagcgctgaagtggtaaattacacaacctttactagtaaagttataaataatctaagaacaaaatataattaaaaagcgaaacaatcattttatttctttaaattatgaaccaagattaatgaaatactttatgttttgataaattaatctctaaatatgtctataattatcaaaattccaatctaatatatacagtagtaaccaatagattaaaaaagtataattatttaatagatttaaaatctcaaactgtgaaattaaaaatgtgcaattctttaaaaaaaaaaaa

SEQ ID NO: 196335 - DNA, 1578 bp, Cannabis indica
ccaagatcgaggtactctttattagggcaccatcttgatcctagacgagattcacatcatcttggccctagccgagatgcacatcctcataagtgcatcatctcgacatcctcaaacatcctcactttggttccaaaatatgcacattacctcgacttacattaaagtccaccatcttaaaccaaagccgagcaccacactccaagcatcacctcggctcaaacaccaccacctcgcctcaaacaccatcatctcgtactacagctcaccatctcggaccaagattgagaatcacactccaagcatcacgttgaccctagctgagatacacatcctcataagtgcatcatctcagctcaaacacgatcaccctgttctaaaccttaccatctcggaccaaagttgagaacatcatctcgacctcctcacaaaggcatcatctcgaccttgtctcatactaccacattggcctactaatcactcatgcattacctcgacctcatattctcaccaacatcatcatcacctcggaccaaggccagatcatcaccttggaccaaggctgaaacaccatttcggcccaagaagatccatcaacatgtgctcctcactaacatgccagcacgtgctactcatgacaaaaacaagctagcacctgtcattaaaaaatatcttcaacaaattatcattttttagatatttattttgaaatattatttattattattttgcatattaaacttaatttgactatagttaagagaaggtgtgtctcaggattaagagattttaaaccctaagagagtcctagatgaaaacctatataataaaagtaatatcaattataaaggactcgaaatgattctcacgattggttaacattttttaaaagttattatcttaagttatatgaggctcgatacttaattgcattatagcgatatgacaccgagagagttctaggcaccactgtgccttttagcattgctcacctttattgcaattgaaaaaactatatttctttttatttattatatatttttatagggaatatttgaggggagaactctcttaacatttgtaattgttacacctataaatttaataaaaaaagtggtgacaaaagtatcttttagctgttacaattattgacgtgatttttcatcaaagaatttaagaatattgtaaacgaacatggtgaacacaagtatgtcaatcaaagtaaatcgttttgtcgaaaaaaaaaaattcaacaaagatgaacacgagaattttatagtaattcactccctttcagcggtaatatgctaatctatttaaattggttattggtctcaatgcttgaggagagttctctaaaattatgctctgcaagagttcaatcctcaaatgaattttagaatgatagaatgagagtttataagacgtcatctctaagtagtaataaacattactctacctaataacaatgctaaaagaaatatagataacatctcaatgaataaaagtaaaacacccctgttatacacacatttaagacacacttaattagtgatttttttttaactaattatcttt

SEQ ID NO: 196336 - DNA, 982 bp, Cannabis indica
taatttcatctcgtgaaaataaaaactaaaagtagatgtagctctattattatcacgatatagagattgagctactataaattattctctctctatttatacataacatatatttcattctcgccagtgtaacgagcgggtgtagcttaaaaatgtttgtccaaataatttttgagtcaacaatatatatattaatttttattattttaattctttaaaatgaaatatatagataaataaaatgtaatacacattcaatctatatataaatgagagatatgaggcagtgacatgacactcgaagatctctctatttagtattatttattctctgagagatatgaggcaacaatatactaattcatataaaatatatacatttttttttttctataatcttcttttttaaaaaaaaaaaataaataactctttagcttttttttcatcaaatttttttcttttttcttaattaaaaatataaaaatcatattttattagattttttagctgtaacgttttttgtatttatttattattttttctttgtaaatctatatatcattctaacaaaaaaaaaaaacaataattatctacatttacttttttttcctagttcactttctttttactttctgtaaatatttcttaccagcaatcaagatttatgataaagatgataatttttttacttctctctcaacataattaaatttcatcaatgataaagaaaattaactaagtatgccaaagtgatttttttttttgtcatagctagcttttaaattttttgtcacggtatgtatacaatataattatataataatttaattacgaaaaaaatttcaatcaccaaataccaagaacaccgctctaaaaagatgggatcaaggattttattcaagcatatatagtatttgttatcaacagttcatggagccaaagaataagcaacaacattacaagatctataattatggactaa

SEQ ID NO: 196337 - DNA, 1209 bp, Cannabis indica
gtgctcaaagtaaaattctcaagctgaggaattttagaaataagagcatttaatgataattggaaaacatcactagtatcattaactgagagatttcgaattttctcgcaactagagagatttatattgcacacagaaacaccgcttagtatcaaagattcaagatttacggcttcaacttgtaaaccatttacattttctgtatctatcaattccaagacctcgaggcttaaactttgtagtggaggcttatcatcaccgcgcaaaaactcataattatgtagtcgcaatttctcaagagaaggacaacccaacaaaaacttaaacacaacatcatgatcttttgaagtatttgattgttgaattctttccaatgacaaagttttcaaagatggaaaactaaacaaatgagaagtagtatccaacctcactgcattcaactccaaaatagtcaaatatcttgcattgtctattatcttaggtaagcaataaaaagactcaatattatcaccattattataagctcgacctatagatagatacaattccttaatcttattctcaactgcaaaagctaaccatttatccaaaatgtgagtcttacttctttgataggtacccttcatgttaaggttaaaactagttatgactgaatcgacgataaaatacatacctttcttgcggtgttccaaatatttttcaacataattataaaacttttttcgattatgtttccattcaactacactaataagtctatgactaatattattcgagaaaaagattgtgggaactgagtaccaaatgagtttccatcgtttcgaaagaagacatgttgtaaccacatctttagttggaagaaacgataggatgtgaatgatcaatgaattgggtaatttggaaaatctgtcatcacccattgatgatattgttattgaatccatattggattgggaactgtaacagaaacaacaacaacaacaaattaatcaaatttaatatcagagaaatctaatgatcaatttaattcatatttaattaaatgttaaattgttcagcattgtatacaatgaaagaagtaaaaggattgagattggttataaataatatttacattaattaatgaagtgaagataatgatgcataaattgaaggtgagttactgaaactcaatttagggccagtttgcagctgtgctgtgggaaaaag

SEQ ID NO: 196338 - DNA, 681 bp, Cannabis indica
aaaccaaatcttgatcagtaatggttgaaccggcgacagcaagagcatctgcaatggattgaactttgtccacataatcggagatcgacaagttgcccttctgaacttgagaaaattggcccttgagttgtaacaacagcgcacgagattgactcgaatatttctgctccaaggcacgccatacaccgaatgaagtggtatgatttgcgactgaagccagaacaccctagacgaatggagccaagatagtaacaattgatctttctttttccattatgcaaaggccggattagcagcaccagtgatgagagtgcagggaggaggcagaccggagaacaagatttcatcaagttcatggccaagcacagtagggacgacttgtgatttccatgccaagaagttttggcgatctagtttgatggtgagttaggagacaagggagctggaaaatggattccatgacgtagaagagttcggaaacgcagcagaagcttgaccattgaggcctgtaggatcagtagtggaggtgtgaatcgaagactccattggcaaaaatctgataccatgtagaaattgaaatcgatatcaataggtaaaaaccaggaagaggtaaaaaccaggggaagcaatagagagcaagcagagaaatgcaatggattacttgactctctttgatgagag

SEQ ID NO: 196339 - DNA, 715 bp, Cannabis indica
aaaaaaaaaaagatttcaggatgagtgttttaatgatcaaccaagcaagacctgattggtgaggtattgaccttttatcccactttgaaacaaaggccttgtttggctggtgctaaaatacattttcatcatttacctcttccctgcgccaaacgaaacttagtaacaatccttttatcctaattttttcataaaaaccgagataaagttgttagtaagaaaatataaaacctagcctgctcgcgaatcctatacacaaaagacactagtgttcatatccttctcctagggcagaacccattttccaggtatgctctctcttttgtgctctttatttttgtgttttaaaaaaaatctttattttttcttctatttttcacattaaaaacttaaacacatcaataaaaataaacagaaaaagcatgaatccttatgaggtcttacagatggacagtttgagagcaccatatagacttttgaagacatgcttcgctcttatgttttggattttggaggtagatggggagaacacttgtcactgatagaattcacatacaacaatagctaccaagtcagcatttaggtatgactccttatgaggccttatatgtcgtgcagatcattgttgtgttgggcagaattaagtgagtatgtcatgactattggaccccaaaatattactagtacactcgagaagattaaaggaatcactact

SEQ ID NO: 196340 - DNA, 1423 bp, Cannabis indica
tttttttttagtaaaaaatagagggatagagagattgagtgaaatgggtgagagagagagagagagagatgatagtggtgaaaatggtggtcatgatggtggtggtggtgactaaaaaatggggaaaacgcatagaagaagaagagaagaagaagaaaaaaagaaagaaaatggggaaagggaattcggtactcggttttattcagcatcaacttttgccagcgtacttaggcgcgctggcaaaagtcaatggtgaaaaaacatttgtcagcccacttaagctcgccagcaaaaggtttaccctaaataaacaaatgaaatgcatcgtttcattaattgtgaaagcttttgccagcgcacttaagctcgacgacaaaagttttcacttaatttctgcgcatatttttaatatgcgagaattgaactgccaaaattttcactacttttaccagtgcatttatttgccggtaaaagtaaaattaaaccgccagtaattaattcacttttatcggcacacttagtttcaccgataaaagtagaattgaaccgtcaaaagtttccaccttttgctagcaaaactaaggtcgcagtcaaaagtgacttatgccagcgaaataagttgccgacataagtattatccgatggaataaactggccatattttgccagcgaggttagttaactatgccgacaaaaatcctttttcttgtagtgttttattttgtttagagggtatgttttgaaaaatatttcctttacaccgtattattgtaaattgatctaaaatattatagagtttcatattaataatgtatgaaaacttaatatcatttataagattatgaattagttcactcattattaattagttttaagataaaatcacatacttcttactatacaactaaagaaaatcctaaggtaatcgatccaagtctaatagtcgatccaaaataagatagttaaaagagtctcttgtaatttaaaaaatacacttataaattaaggataataaatcaaaaagagctcattcaaaatgctaaatggcacacttagtgtctaataccaaggtgtcatattgctgaagtatcatgtcttatatattttaatttaatagttattataaaaattcactaattattgtgtcatctcaaaatggtattgagaatcatattacctattaggccatctccaaccatatatattaaatttggtgttgcactaatatcaaatatagtgttaaagtcattcattccaaccacaatactaaaagttacaccaaaacaattattctctattaatattattttttaaataaaattaaatatcctttttattttttaacagtgtttaaaagtctatttaacatgcctataaaataaaagagtcacattattttcagggttgttattttttttttttt

SEQ ID NO: 196341 - DNA, 729 bp, Cannabis indica
agtttgagcagtgggttcagtcacgtcttttccatataaaatcaaaatcagaagaaaagcatatatcattattatccattatcaacattaattttgatatcttattttctttaatttaagaaattaaattgatatatgaatagatgccaactcatttcccaaaatatttaacatcattgttttgacttataagagtggagatttcattatggggatcgaaaagaatgtttgttgagacatcatgagtaacaattgtatatgatgatacatatatatcatatatacatatggagtgcgatccattatttgtcaccatcaaatactataattataaaagcatatatttatatatgggttcttatatataagagaatttagtatatagtaagtggacatggttaaccaagcatttattatatgtgtgtgtgtgtttacttagtgggaagagattgaatgtgtctccaatttaaaatgtcttttggccaaaaggttctcaacgcattaaactttttatatatattcctcttacgaggagagaattagacatatttttggacttagatgatcatgtggatcccagatgccaaatcaatgtgatttctttaacaagattattagtgactaattaatacatatagggtttttctaactttgttattttgtgaactactattccattggtgtaaattcatatttgattaatttatataatttattgttaggattcac

SEQ ID NO: 196342 - DNA, 1640 bp, Cannabis indica
gcgtccggacacttactgccccaatttccaagaagatcatccccatgatctctaagaatactggttcttttcctctagtttttataccagtagggtgccatctctgcaattaagcttccaactccaaggtatcctaccaacttacctggaatttagcttatttttaaactttgtcaattttttgtgcttgggctaatatttctcaacttgtagcagtgcttcgtttagagtgttaggacggaagagatgatcaagagagaagcacaatatttggctttcttgaaagatcaattgaaggtcagagagctagtgacaattgaacttctctataggtctggcttgatcacaaaattttagagtattgacaccgttagcatataagggcatcgccaacctcccaaggaagtgaaggaggcgattgccaccagtttggctattataataaccaatgcggccaaaaatgatcgtgcctttcacttttgctgggtgtcacgccatcctaatctctacctaaggaagaagaaatcaaggagagatttgctactgcttaccctaatgtgggggcagcaggtgttagtacttcgggaagaggtaatggacccttccgcatcctttgtacccctaacctgagttgcatgttccggaggaatcagggaggatttgacagatatttcctaagcataaatcgccatagattccccatggaggattatatacacagggtagaccaaatagttaggagccctagtaacccgaggactccttcaaaaattgtcaaagtagaccctttgatggtcatgttcatacctgaatttgagaaatatggtagcttcattagtcataggagcattttagcttttgctcggggacaatcttatagacttttactgaatcgttacacccacgcacaagcttcctcactagattctctttcttgttgttgttattgtttattatgattgtatgacttgccgtgacttttcttttttactcgtactactgtcttgttgcacagacacaccagaatatgtgatattgaagtcttggaataaccagatctcagctaccatggatgaggcaaagaaatcctaggagaagggcaagaaaaacaccaagaccagggcttccaggactcgaaaaccacctccccctttgacttcttcgtcatcagacgtatgggagatttctcctacagtcaagattgggcttaccatatctagccattgtgcatcgactggtggggggaagaggtctggcacctcctggaaggtccctgaggtccttgctgctctgggagagaaaccctctcaagttattttccttgtagcagagatagtcccagacactacaccaaacgtgggggttttgatgatagtatggacgaacttgtctttcccccaaaggggattctagctaagtctaagcgcaagggatcaaggattcctcctgatcccagcgtgaagaaggtcaagcctttggtccggaagttaggggcaactgatataccgtcaactaactccccattgccacaacaacaacaacaaccacaacagcaacaacaacaatcgcaaccacaacaacaacaacaacaaaatctcccaccatcatagtctaggtgagtgcctttgccacacaacagc

SEQ ID NO: 196343 - DNA, 1399 bp, Cannabis indica
ttgcaggttcaagatatttaatatgcagtttgaggaacttcatcaaaaacaatctcagtggacagtgcctgacactgagctacgtgaatcactgaggcttgctgtagctgaagtattattgcctgcctataggtctttcgtaaagcgattcgggtatgctctgtttaaatgcagacattttgttttgagggaataagtacaagtatttccaccttgcttacatgcatgcatgcaatgaagttagatttttatatgtgaatataatatcctgcatgtacaaaattcatcaaagtcatatgaactcttaagacattatatccacattgctaagttgactgagaagatatgcatttttttattatttgattttcaggcctttggttgaaaatggaagacccccagaagtacataaggtctcagcagaggatcttgagcgaatgttaggtgaattcttcgagggaaagacattgaatgaaccgaagaggtagatggaggtctagttggtgaggcagcgctgacagtggactccgacttccctgactggtgcatgttttatcttttattcggagagttcttttgcattattccttaggtggtatttttatcatggtaaggttgcggtattccaagattcatccatctaaattgtttgctgagaagggcttgtgttttgataagtataggtaggtgatgggtttactgctctgcggatcacaaataaaaaggggtctgttctttcacagaatgctattatagtacctccctctggtgtgtggctatttattgtttagagcaagtgtatatctgtattaataagtaggtggttttgtatattatatttttgttggtcaaaagtttcatgaatactcgtaagtgagttgttatatcgaaatcttgctcgggtgtcattgatttgtttgacaagtggaccttattgattataactttagtttttggtcggtcataaataaaaatagaaatggagaatggagaatttgagttctgttgtttgtaagaactacgtacattgtgtcacttgaagtacgaataaaaagagaagtgatgctttaagaatcaacatcatataaaataaaaaaccttaataatcttaaagcaaaaaagaaaaaagaaagaatcaactttaatagtcccaagccaaaagattaaaactggttttgaaaacttaatgtgagtgtccacagtatttttaaaaagtaaatctgaatatgaagtaactctgaggaaatatatactctctccaatcttgagatataatgagagcgtcatctataaaaatgagtatatcttaaaatttttaaaaaaataaaagtaaaaattaaaataaataaaataaaataataatacaattcaatttcctctaattttaatataatttttt

SEQ ID NO: 196344 - DNA, 956 bp, Cannabis indica
ttcaccaagtaaattcctacagtatgaaacacctatatatattttatagaagagtatgaaccgatatctaaattaatataaattcaagtacaatgagatattttttggaatttaaatttgaaatatgaaatcttaaaaaattataaatatctcattattttttttcatttttattttttaaaatggtaaataaatatcttatttttatctccatttaattgcggaacaccggtgtccatgtctactggctttcgcaaaaataaaactacacgtcgttttctggttaataaaagtcgtttatacttaaaaacgacgtgtcgttttcatgagaatgaaaaaacgacatatcgttttatatggagttggcttggcttgtggctcaattaaggttccataaaaaaaaagcttcaaaaagagaagacggaaaaatctcagagcaaccgatctgatcaaactttctaaagagaaataacaaaacgaagaagacgaactcctaaccctaaccctaaccacaaccatggccaggtacgacagggctataaccgtcttttcacctgatggtcatctcttccaggtcgagtacgctctcgaggccgttcgtaagggtaacgccgccgtcggagttcgcggcaccgataccatcgtcctcggggtagaaaagaagtctactgctaaacttcaagactccaggtccttttttctcttcttcctaagctcagttttattttacttttttgatttgagtggagtgagattttggataattttgaactagggttttgtgtatggatttttatctatgattagcagtgttttcattttaggggggcttggattgatctagtttttgtgaagttatggttttaggggttttattaagggaaatgtaggtttttgcttgaaattgattttcattgggtttcgttttatgttgcatttgataattgaaatttgac

SEQ ID NO: 196345 - DNA, 1598 bp, Cannabis indica
aagcgggttggggtctaccagggatgattttctgtaattatgttttgccgcttaggtcggctattggcaacgagacttgtaataatattttgtaaaatatttttgggatcccgaaatatgtcattttggttataaagttaaagttattacaactgtttattttcattctatatttgtttaaagtttaaattttcctgcgcttttctatttagtaatcacgtctaggggattagggtttcttaattatattggggaacgtgcccaatagttaggacgttacatgaagattcgagcagggtgtacaagaacaccaatctagctacatcatgtaggcagctggcatatgtcgaccagagaatacgagtttgacatttttagaggtgtatcccatatatcttcatgcttggaagacacaataatatccctaatttcatgaaatggatacgcaatatcaaggaagaaaaggaaacatgcttagctccctattttgatcattgtaattatagaaagtaaacagtttcctcactttatttcttattagttttgagaaacaaattgatataattaattcctatagatagtggaatcgtctcactattcagggacaggaaattcatttagaagaaacacacgagagaaatctagattcaagagtaaaatattgggagatcattataagaactttcgagagagatgaaggctttcttgcttctttactctcaagttaatataaactaaagaggagtaggctattaccattatcaagggaccgaacctctataattttggtatttcctttacttgatcgcaattcatatttattacttgattattcttaatcgctttaatttgactcacagtcgttggaaaaagaaacacaagtctttattgtaagtctttttcaggatacatgatggttgtaacgacatggaggggaaattagactgaagctactaatccaatggctacggattataatgtgtagacacctacaaatcctagagacccagtcagtgcagatcccgatctaagtaatcctcagccaccaacaggcccacagacagtagggcaaggagtaaccacccctctggttgggttcactctgggcgtgtaagaaaatggaaccactagacttggaccgagcaaactgcccctagagttggaattccatctaatattcaaaattggtgatgacactgaactatagaattttcgagctggtttggggacaatgcaaggtcatgacaacactctcattacgatcagcaagatacccgattagttataaattttgcttttgtagaacaaagatgctagttcgaagagtggagagattaagagatggaaatcatgagagcccaacaagaagtgattgataattgctctaggcaggttcccgtactgatcaggagagcctatcagatcactggacgacaactaggggcaaatacttacattcccactgggctacagtatgggccagaagagcatccagctagacacattaagcaaacccaagctaatgagtcatccaatccatggtcacagagtcaaactatggaccacatggtagatgagcaagtttttccaactcgtta

SEQ ID NO: 196346 - DNA, 658 bp, Cannabis indica
aaaaaaaaaaattactttggttctcgttagggccggtctaagcatacgacagcttaagtcattgtacaagacgccctatattaaaaaatcttatttttttttatcattttttaaagatatattttctatgtaataattttattttttaatatataatataataaatataattttttataatgtatactatacataataaatatatataaaaataaatatacacttagcacttacaaaaaaaaaatgataaaatcatgtggtcctaatacacatgattctaaaatttttataaagtattttttctttttgaaaatttaatttaggaattattgatcagtaatttttttgaacagacccaattttaattttttttgcctaaggtcatcaaattgcttgggccgacccttgttcttggtagagctcgaaattcagctcctgctgcaacattgaaaattaactgttcaaacaaatagaccacttgatattcatcttcatacacattgttcatcgttccaacaaaagtaaatgaaattaaaaattcaacaaagactaaagcaaatacaccacttaatatccattttcgtcaaactcaccaacgaaaaaattcttcaatatcaaaccatggcacaaaatttccattaaaaaaacaagaaccaaa

SEQ ID NO: 196347 - DNA, 913 bp, Cannabis indica
tgcatttttttcggctttggtattggaagagttctagttcaataatttgtaacatcgagttgagtgagatttgaggaaaagaaataagatataatatttggtttttacttttctttttaaatttgaaataattattgcagaagaggtcgtttaacaataatgcaaatttattgaaatttacaattggatttagtttgatttcccatctacacaatactttcttcctttttaaaaattgatatatatttctaaaaaaaattatggtaccaccccgagaaaatgagtgtagagaattaatagatagttttaatttaatttttttttaggtatatttaggattttcaattctgaactatgacctacgtattattgtgcccttcaacttctcaggccagttaaaaatagatcataaattattcacggtgttgtaaatatggtgatatctatgagaacggttgatcaatatcattttaattaatcttaaaaatgtaaaaaattagcctaatagagactagaatttacattttagttttaaaaaagacatacttaatttttaagatagatatattttttctttttcaagtttgatatgttactctttttgttttgttatatttatcaaatttaatatgtttatttactttatatctatttattatattattatacatggtagtaattgtatttttgtaagagttttgatttatctatttttttttctctaaagatcatatataatggatatatatatatatatatatatatgatatatttatatatttttgaatgtaattatatcaatatggatatgatcaatacacatattatattttaagtagagttaaaacatcatacaatataaatagtattttttatttttattaatgtgtgagaacttcacattttgtccaat

SEQ ID NO: 196348 - DNA, 980 bp, Cannabis indica
ataaataagcatttttgtcataagtataaaaaaaaataaatgaacaataaaaacactaataatagtaataaatagcaagaggatttttgacgtggttttgaagttaatttttcatagtccacaagtccatcttatttagagatttgtaaattggatacaaaatacaataaataaattatacagaatgaaagattggtataattctctctcttcctcaaattggttgtcctatgttccctgggttttgtccctatttataggagtttagggtgactgttattcccttagaatcttatcacttgtaaccgttcgtgaaatgtagatgatccccaaaatcatatttacatcacatgggataatggcaaataacttctcataactgcttttttaactttatctataagcagttatgctgactatgcttcatccttctcgcaatgtgaccattctccttaagatgctttatcataaatcaacatctaagtatacgtcaaatagtgcttcttgcattctttcattaatgttaagtgaggcatatgtgagacgcttatcacaatatgacaattacgaggtgaaccatgctaaagatgttctcttatctcttcaacatactcacgagtatgtgggtcaatgagctggaagctctttacgataattcattatctaccctttctaaacattatcattatgtcgtgtattctgtatatcccaagatggggcttctgtgttctttgtttatttccctggtcttatcagttagtagttattattcatagctcgcctttgtttttaagaaagtgagtttgaatattcctaccaattgtgcttcctgaggcgatttgtctgaacatatttattattgcacaattcggactgtttaacattccagattacacgtgtcagcaacatatgggtataacaggaagtatttttgagtatggagcggcttgttagtctttactcgtcggatctcatagcct

SEQ ID NO: 196349 - DNA, 1197 bp, Cannabis indica
aaaaaaaaaaaaaaaactcagacagtactatttatgatattaagtcatcccggatttatttgtggagatcttttaaaaaagtctcatatcataataatggagatattaataatctttatatatttgtgatttttttttttcatttctaaataatgtaagactttaattgtacacaaacatttaacacactctttcccttaattagcataatatttatatagatgattactttcttacagcacatgttttaaaagaaatagctatactaaataattgaatgttatttaacactaattatttctcacccacctgtttaataaaagaaaaagaataatttcacttcgcatgtgcaacatatgcgtatatgattggccatttttgtagcattattatattgctccaaaccaaaccactaaatgctaatatctacatatacgtacatagaggagtcaatattaaaagtaacagtccaagtcagctttttttttttgaaaaggagtccaagtcagcctttgcacatttcttttcacaaaataacactttaatcagcaagtattttgttcagtggtagagaagtttcaacagtcacccagtctttggtcaaatctccgctacttcaccaactctactctaattaactctctccatcgaaaagtgaacgaaacttcctcccatacccatactatgatcccatcccatgcccatatgcctattcccaagtataaatatactcacattacaatccatttcttgcatccaaacccaccagaccacaaccactattactcattccaatattgctctctctctctctctcacacacgaaacaaagttttagacagaaagaaaactcaactacatctctagttatatatataattctaattccaatcaaagaaacaagtaatacatattcattattccaatgggtagcctcggcgactttgagtttccccaaaacaacgctcttttaaacatagctggtggctcaagcaatgataacccgctggaccctgaggagttccggcgccaaggccacatggtcattgatttcattgccgattactacaaaaacatcgagaagtacccagttcttagccaagtcgaaccgggctacctcaaaaagcggctccccacttcagcccctttctatccggaatccattgagaccattctaggtgacgtccaggaccacat

SEQ ID NO: 196350 - DNA, 1402 bp, Cannabis indica
ttttttattatttttattttattgtattgaaatacataactaaatttaataaaataagtacttttcatatttcataaaatatataattatatgacaatatttaaaatattatttataaattattttttttagaaatttaatttttaaaataaaaaattggattcaaaatgtttaagattgcctataaactaaaacaaacactacataatcatcacgaaatcatcaattattaaaaattaaaataccaaaagataataaatgacgattaataaagaagttgatttcaattaaagaaaaaaaaaatattcatgatgataattcattaacataatagtacgtaactatatgaatgaaggtaattagttaattataagtagaacaatcggttggcttaaacgaaacagtatttttgacacgatcataacccaccaagaaattcatctgagccaaattcccgtaaatagctatgccttgagccgatacaaaagacaagcacaccactgtatcactcacttgaacaaacgtgttaagctgactcagctccacgtcagcgcctttgaaattcatagtgatactcggcgaaacaaaatctttgccactcgagatttggtagcacagactcaacgtaccactggggtcttccacccgcttctcatttttcagctcactcgccaacgctgactcaaaatccgagtagaattcctctggtaccagcgtcagtgtagttcctgaatcaataattatgttgccttgggacactgctgcaggtgttgatgatgacgatctgaaattgataaatttcttgttcttcttaccgttgaggcttcctacggttataccttcgagagtaaggtaatagaaagtgtcggtttcaccctttacgataggtgtggagactactcccgcgccggaaacaactgcgtttgatccaaagctgagtgtgcttgagtttttcgtctgatttccgccggagataaaggggaccaagcagtaggaaaactttcctccgatggatgatgttagctgggaagtgagggaatcaactccaccgccgagtccgacaatgcccgaaccgcgttcgtcgaaagttccttacaaaaatattatcatataaatacttaaataatttacattttattacgagtgcttgtaacattttttttaattcgctttttttttaattaaaaaataaatatattttttaaaattatattgtataaaactatttattattttttaattttttaattaaaagtttaaatttttttaaaaaaattacttttaaatttattttacatttttttaattaatattttgaggtacaaacacaactagacttagacttagaccctatccccaacttcaaatccaacataaataagatcaacaaacaaaaataaaa

SEQ ID NO: 196351 - DNA, 817 bp, Cannabis indica
ttttttttttttttttcaagtggatcacattttgagtatagaatgcccgggttcaagattacattacaatagaaatatatggatacataaatactacaaacatatgtcatttcaaacaaaacaaaaaaaatactacaaacatatacgtctaacactacattttacattattttcattgctaaaaaaaacattttagattatttaataaagaataatcgaaataaatatttacaatatattatttattaaattttttagaaatagaataatagtgatttaccatatttattttattaaaaaaatgtaatcagcttaaattgacttatagcaatgctaaaaaaaatgtaataatttttattcttattctcgatattttttttttctaaaattcttaagaaatgtcattaagagcaggataaatactattttgtaccatatgttttgtaaaagttaccaattagactttaatttttaaaattgtgcaaataagaccatgaactgattttttgtcaaaataaaatttaataataatttggtctagagattttatgataaaattagatacattttgttatctgttcgtgttagaaattgtcttaaagttgattatattaaaaattaaaattgttaaaaattaacctcaggatttgatcttatttttaccattttaaaaaatatatgatctattatttaattaataatttttacaaaatataagatttaaaatagtatttacggttaagggtattgttatttattgtgtcacatttccctgatttattcatatactaattattgccgtttggtaacacttttg

SEQ ID NO: 196352 - DNA, 1249 bp, Cannabis indica
cacgaagggttaagcacacaaagcagcaaaacaacaatacaaaccacagatggacaaatgctaattgattagacaattcattgaagttttaagatgatgagtttcagttgcataccttggaaacaattgttaatttaattattattgttattgtttttatagaagtatattagatgtggatcgtaagtcatagtattttaattaaaaagtgaatgtttgtatttgtcattttcttttttagaaataaaacatggttcggaacctgtaaatcttttgttttttgtagatgacaacacaaatatcagattaaattatcttctcattggtgatacaatttgtgcctttgtgggagacgaacaatacacatgatgttcaatatatataaggctgattaagatatttgttcatcgaacttttagcgtgtatcaaattatgtctttcgaactttttaagttattaaattttttttaaactattgagattatttagatttaaagaccaaatttgtttaattttacaaaggcattgattattaatgtattaaatcgtattcttaaactttaatatctactaaatcttatcttttaaattttaacatgtactaaattgtagttcttgaactttcattcacattaagttttcgttagtaaaatttgataaaaaaaactttaaatctaacaatttcgatagcttgagaaaattttttacaacataaaagattcaaaaaatataatttaatacatgttaaaatttgaaaagtaaaaattctaatcaacctaaatgtaaattataaatataacatttacctcaaaaaaaaaatatatataaaaaatctaatactaatttaaaagctatggattaatctctttcatcattaaattctcagaatcctgcatcactttttaactcctatctcactttcacaacaataagttacctaataacaaaatacaaaacacaacagcacaagtgcctaattattaagcttctgattccacatgctgaacttggctttctatggtacaccaacatagcatttgcgatgaaatgaaagccaaacttctcttgtcgagttgatacagttcgttgtctctattgtagtcacttacttttaggtatcaaactcgagatcaaagcttcggggtaaggagaggtggcttcctctttgcatctcataagcgatgttaattgaacttctgctatgacgcaaagagaattctgcaagtgaatttgactttctttcgggggt

SEQ ID NO: 196353 - DNA, 865 bp, Cannabis indica
aaatctattttattttagcatatgtataaaaaaaatttagtttgatttttttaatagtatatattatagttatttaaaattattttaatttacaatatcaaaaacaaaatttatatattttgttatatatacttatacgcaatatgaaaagtaactattttgttaaataattacaatatacctgattatgaagaagaataaaattaaaacaaaaaatctaaatgctaaaataaataagaaatctaccataacgataatttaagggactactacaaaatttttcatgtatgtaaatagatgtaaacttatatgaaaatgcgtgtcatattagtccgacttacattttttaggctttttaaaatacgggtcatagcgtgtctggccataagaaaatatagacaattttataggttaggctcgggacaaccataagtctaataatttcgtgcaatgctcggattcttgtcatgctttatttggaccggcccattttttaatagatcaacttattttgtaatatgagtatgaattcgtgttctatattttttacatttttattataattgatgaactaaatattaaattataggtatatttttataatttttaattattttttatattttttttcaattaacacaatcatataaaaaaataactatatattcttataggttgaatattactattattttaattgataaataaatatttgtcattgttacttttattaaattattgtactttttaatgtgtcatactttcaagcttacgtgtcggtgtcgtgctttcaacaagaccgaccctgagggtagacaagacagttgtacgccttaggcctctctctctctaatttgtagttttt

SEQ ID NO: 196354 - DNA, 531 bp, Cannabis indica
aatctaatactaatttaaaagctatggattaatctctttcatcattaaattctcagaatcctgcatcactttttaactcctatctcactttcacaacaataagttacctaataacaaaatacaaaacacaacagcacaagtgcctaattattaagcttctgattccacatgctgaacttggctttctatggtacaccaacatagcatttgcgttgaaatgaaagccaaacttctcttgtcgagttgatacagttcgttgtctctattgtagtcacttacttttaggtatcaaactcgagatcaaagcttcggggtaaggagaggtggcttcctctttgcatactcataagcaatgttaattgaacttctgctatgacgcaaagagaattctgcaagtagaatttgactttctttcggggtaagatcaccgtgacagccctgcagtagattttgtgcaacgataaaaaaatgtcaacagccaaaccttgatttaattaaggttgtcaagttcttctttcattttttttaaag

SEQ ID NO: 196355 - DNA, 1424 bp, Cannabis indica
ggaagaaaacccagaaagaaagtctgagtcttgatgatagatagagagagagagagagaggagaagaagaaggccttttcctcctttggtgttaagttttttttcctttgtatataactctgtgcttttgttttgtattgagttatagtagaaaagaacaaaagaccatttaatgctctgaatgtgagaaaattcaaaggaaaaaaaattgtaaaattaattataataataataataataagaaaccccagaaataaaaatcaaaactttatagtctcactcaactctctcatgggtgtgtgaaaggaggtttcgaattattggacaaagtttgcatttttagagaagttgagtttttgaatgggcaataaataaaagaagaaaatgaatcacaaaaattaacttttcacaaacacaaacaaaaatcaagagaaagtaacagctctctctatatgggatgatgggatatctctctttctcactcctttttctttctctctctatatatacataataataataatatatatatatatatataattctcccaggtgtatgttttgtaaacacagaaagtttttagaagagaattcaacacgaaaaggaaagatcagatccccttcctcacaagaatttcctcatctcatctcatctctcaacacctcttttctctttctctattacctatctctatctatctatatgttaatgtgaatataagaactactcaaaatatccataaagctaaatataccccataaaaaaaaacattttttttttatttctaaaaatactactaactacactctgttattatgtgataatatgttgattataaaattataatctttacccatacccacgtagattacctttttagatactaaaaaaaatttaaaaaaaaaagtttggatttttattgatgtatttgcattgtccttttttatttttattgtaattagtattatttgtttaatatattcagttcattcgagataatggagtgagaaagagacactcactttttgaagagagagaaagagtgaaggagtaagtataaagagatcacaatttaatatattttttcttataaaaaaataatattcacgactacgaattgactgccttttcttcctttttatcactctcctttgtttgtttattacaacttttttatttatttatttatttattagaattgataaggacctaaacaacaagaaaataaaaaattgtctttttatataaaatttggtaagtttttttaaattgttaaaaaatattattagtatttaatatttttattattgtcatattattattaatataattaaatatcaaatctcatataatttttaataaatatcagtaactaatcataaaacggcagttataaaaaatagagcattgctataaagtaccag

SEQ ID NO: 196356 - DNA, 1993 bp, Cannabis indica
tcaaaattgtcgaactgaagtgcagcagtgtgaaaactccaaggactttgaaaccataaggctcgggcaaaactgcactcccaaaacaagtgaacttccgattctaaagttgtgttgcacagagcacacatcctatcatgagcctgcagaaagccaaggtttgccttcaggggaagacacccgctcattgttttccacatcagtaaggcatgtcgggggtgagttttcagcttccagagttttttccagcactccttttcatggtgaaaccggtgctgttgagacagccaatatgcgctcttcactgagaatacccctttgttgctggccttccagaacacaacatcctcctcaagaggcagaggtttgatccggaggatagcatccggaatagcaggttggaagcaagcttgaattaaatccgcattccacaaacgagtacctggtaaaaacagatcagcaacgatagtgaatttgtggttaggcacaaaagagaaagattgtctgatttcctcaggagtgaaaccagggatccaaggtttggtccacaattcagtctttccattgcctatgatgatcccagcgccctcaacacaaatttgacaggtttcaatgatacccttccacaagaaagaatcgcttccttgcttctccacctcccaaaaactacatgagccacagtacttcgccaaaaggattttaacccacggtctgttgatgttgcataacaaactccacgctagtttggccagtaaggccaaattcatatctctgaatcttcttaaaccaagtcccccattccttttaggttgacagatagcggaccaacttttcagggcaaggtaatggttgtttgaggagtcaccatgattccctttccaccagaatcgcgccatgatgctgtcaaggtctttgcaaatgatcttggtatcctgaaagtggacatagcgtaacaaggaatactccgaagaaccgattgtgctaaggtaagtctaccagcatgagagagacacttagctttccacccttctagtctattgagaaccttggcctttagaaaagagaaatcctcccttttcttgatagaaactaggagagggttgccgaggtacttttccttgtgcataagagttgagattcccaaacaatccttgagttcttgtcttgcttcctggccaactttaggggagaagaaaacgctgctcttggccttactaattttctgaccagaccagtgttcatacgtctccaagcaacgaagcagattctgtgattctgcatgagtagctttgcagaaaaacagagcatcatcagcatagaaagtatgtgaaaggggcatggagtttttacctatcttgattcccgtaatctcgcccttagtctccgcacggcaaaccaacttcgagagaacttcactacacaggatgaacagatatggggatagagggtcgccctgtctaagcccacggccagggcaaaaagctttgagaggggctccattgagcagaacagaaaacttcacagatgtaacacatctcataagtaaattgcatacatgttagctgaacccatttgcgattagaacttgatgcagaaaatcccattcgatacggtcatatgctttgtgcatatccgttttgacagccatgtatccttgcttgcctctgattttcttcaaagtgtgaaaagcctcagccgccagaatggatccctccgcaatccaacgccctttgagaaaggcattctgcagcgggttgattagattatccaggacaggctttaggcgatccgtgaggatacgggcaatgaccttgtatccgaagttgcaaaggctgatgggccggaattgctcgaaagttgaagggctctctctcttcggtatcagacatagaaaggtgtggttaagatccttgacaaactttcccgatttgaagaaatcttgaaccatggtgcacacatctttgccaactatgttccaataagtacggtagaa

SEQ ID NO: 196357 - DNA, 616 bp, Cannabis indica
gatccatcctaaataaaaacaagtgattgaaattcatattaaacttaagtgtgtatcaaaattttgagtgaatgtatcattactctactcaaaaatagaaatccaatgtattatgtccacttaacatgtttgtcatgttttccttaatagtgtaaacaatgtctttggcgtgtaactaggataagcattataattagctttcaataaagagtcctaacatcatcattcatccatctctaaataggtttttgtgtaaagacaaaacaatccctcttgagcaaacaaaaacactaaataacaaacccaaggagaactttagttaataacattaacgtatgtacttctaaatctaattaaagattgaactaagaaaaaatcttcttattttttaataactatatatattgtttttgttatattattttttaaaataatttttttgtgtagcattaatataaagttaatttagtctaataaaactcctaaaaaaaatgtttagtcgcagtattaatttataatgtgtgcaaccagatcaattgcagagagtccaaaataataaaaagatccatctgaattttgttgtgtttttgtttttatttgaaaatgttgtattttt

SEQ ID NO: 196358 - DNA, 1981 bp, Cannabis indica
acccgcgagactaggtcctcgcaagaaaaaggtttttctaacggagcattttctactgaatctatttcattcccttcatcgcccacactgtcctcgacctcgcgatcgggtagtttaaaatcctcgcccatctcctcaacttccacgtctggggcaatttgtagataagcaaaactaccttgggcgaacactgtggattcactatcttgcacctctaaggtgactaattctactaactcctgtaccatgcgatctatcttgcttgtagatagtgagccttctcgagccctacccacaggaatctcatcgtctaacaataaggtgggtatgaagttatcgcttttataggattcatcggcaaaggccccctctccagaatcatacctatggctgtccgataggtcgctcatttgaaagataaaagatcttttcaacgtggtgcaagtgtaatttgaacaaaaagtgttctcacccgaataataagattgcaaaccaaagtgcaacaaaaaactaactgttgtctcaagaaatggttgggtgtttcccagcatcctaaggggcatgcaactgcatgaacattaagttagagggaaacacccaccatttcgagaactcatgtagttttcatatcaaccaaaatgcaatgaactaaaaccctgaagttaagtaaaagtggttacatgtgacctaagggttgtcaagaaaagttaaaactctgagataaggtcaacctttaccgatattcaaactccgggttaaatgggttcaaaaatgcgagtatgcaaaagtgcattatcatagagatgcgagtattcaagagttcgccatgaaaactcgctagtattcaagtgtcaagcaatcattttcaagagaaaataccatattctgtctaaatttttgattatctctataaaccttattcatttcgtaaaatccagaatgcatgagaacattcaaaaaaaattattatagagaaggaaaacactaatcttcaatgtaattatttctgagattgctcttgcagatgatcgagtcttaaaaattattttcaattagcagaaatttgaaattttgaagaaattctcaaagttattttgggtaaagaagagaaagtaagaaatgagagggaaaatgagtaaggatcagtttatatctgtggtgattaaatacaaatactcctcattcattgggatacagatacgtggcaagagaatgcctaaggtctcccaatccaacggtctccagagaacaagtctgcacataccccaaagggtcttgataacgtggcatcttagaggaataaagtaataattacaatcttctttctgagaacctcgacaagacaaccaaaagtcaccatctcatgacaacaactcgcctgcctctctcgaatagtttccctaatgacacggttgtcagtcgcgaaactaggggcatgtgttatagtgcgaatttcttgcctagaaacttgagatcaatcccctataaaattgacacgtggatccaatcctcaaggatggatgagctgttaattaatgactcaccaagatttgatctcgcttgaaccaaactcacgagatgatgcggccttgatagggtctagtcgcatactatgcctcacatagaataagataagtaggaccgagagagatttatataagtcccgcatatactgacacatatgcgatgactatgcagccttcttttgggactaagtaaagatcatttatttatgtaatgactagtccaaatgacaaagcgtgttcaataactcgatagggactcgtgtgtctcatgttgtcgacacatatgagatgtccatatatacaattcttaatagaatgcaaacatcctagtacgaggctcgttagccttttagaacgcacccaaaaattgcgaggttgtgtaggaatatgaacatgcaacttgcaccctacaggtcacataacacttattagaatagattaaattgttctccatt

SEQ ID NO: 196359 - DNA, 579 bp, Cannabis indica
cacctagggaggtaatcatctactttgatcaattctcaataagttgatatgatcaatcaaataactaatcttgtctataagagcgtggtgtgagagagtgaatttacaaagaggaaaggctcaagatcatttattagatctgagcaataaatctttatctggtgaaataccatcaccaaacatcaatactcaattaccataaacaaacacaacatgaaccaataaaccaaagttaattaaaaactgaataaaaaactaagtaacacaccaaggattttaagtggttgcactgcaggcttttcaaccatgatttggttcactgtaaaaacagttatgaaagccacataggctttgaaaatctttattaaatctctgtaataaaaaagaacattataatcaaaacacttaggtggcgttttgttgggagaaatcaaaatataggaataagaatgggaatgagaatgagaataagaatgaaatggcatcaaatttaaaatgcataaaaaaattgataaaaaaaatcattaaatttttctcttattatattagaatgatatttctttcttttttaaaatggaa

SEQ ID NO: 196360 - DNA, 1945 bp, Cannabis indica
aaatcagtcagctatagataggtcacgatttttaatcgtacagtaatacccctttaaaaaaaattcgaagtttttaaggcacgcttaaaaacgtatcgggaatgcatcatgagtgtttaaaaccatcgagaatatccaattttctcgatggttttaaacactcactaaattttttagcgatcctaaaaaaaaaaacatttttaggaccttcgggaatattgtttttgtagtagcaccctcaaaagccccaatgcccaatccaatacaaagttgtctcacacgaagaaaaaaccctagcaaaggattctgattttcaatcagaaggttcgagatccaattctcgagctgtcgtctctctcaaagaaaaaaaccctaaaggttccaagatcgaagagaacaaactctatctcttagatcaaacacacacacacacacagaatcaagaacactaagatacacacacacaagacaagagagagatgagagttagggattgagagaaaacaacagattacgagagaagaacaccatgatttaatttcagagttcaccccagaaaagaagggctacgtctccgtcaagctaccttagagtgcttgatctttattaatccaaacaagtattacaaaacttgcatcaaatttcaaatcacaatacgattaataatttgtcttgatttctctttttaattttctttctgtattttctctctagctaactaactctctttttctttatttttgtgtatgaatacaactcgagagcttctctttcgacttcttatctctacaataatggctcacacaaggataatgcttcaggtatattcctcttctcttagcagtaggtctttttatagtactaggggcgatactagaatttggattggaaacttcatccaaattctagttgagccgaatttttcttgatgtagtcttttttcggagtttgttgtaactgcttttctgctaagagtcttggtagagaattaatctgtagtggacattagcccaaagggcatatttggttcctgtgttgttaataactttagcttataaggagatctattcattgattctcactgtacgagatgactcaagaattctaaaacaaataaaatggtacctcttttagggtactctttatgcattatgtatatattgtgctaatgatgcatttttatcgtgaatggtgcctctttacatggaaggttacaattttaagattatgtttagtaattaacattactgttaaagttagtattttatttaagaatattatgttaaaccacaacaaattaaagttagataatatgtacagacaagcatgatgcattctttagcatatggttactatttcttccatatgtatgattacaattatagaaattaaattcttctcaaataaaattagaaagtaaaaaaaataattaaattaaattaaataagacagagaatatttattatattttgtgacgttggaagatatactaattaacacagtagaagatgaaatcttaactcgatcgcctaaaaagctaataaagacatcgatgtaatactccattttccaagacgtacgatgtcgcatcaatcatgattgtctagatattttaagagcaaataaattatggagtttctctatatatgagaaaggtagaataaaaaaatataacacaaaggagtgatacaattgaattacttgaagatacaataacaactttttttattgaagatgagaaaaaagccttgtaattgtaccttatataaatgtcgtattttgccaaaaaagaaaattaaaagagggtcttaacctaaagggaagaggccccgtcatggatggaagttgaaacaagtaaaaaagaatcttattattactattattaaattaaataggaaatgaaataaaatgaaagaaaaatgaaggagaaaatagacaaagagta

SEQ ID NO: 196361 - DNA, 1551 bp, Cannabis indica
gggtgtttcaaagagggtgatctagaaactgccgtggagattaggaaggaaatggtaaaggaaggaatcgagcttgataatgtagcttttaccgcccttatttcgggattatgcagagagggaagaatcatagatgcagaaattacactgagggagatgttgaatgctggcatgaaacctgatgatgctacatataccatggtcattgatgagttttgtaagttgggggatgtgaaaatgggattcaaattgctgaaggatatgcagagaaatggccgtgtaccaggagttgtaacgtataatgctcttatgaatggtttgtgcaagaaaggtcagatgaaaaatgctcatatgctcttagatgctatgcttaatttggaagtggttcctgatgacataacatacaatatcttttacaagggcattgcaagcttcgaaatccagaggatgttgataaactacgaagtcagatggggcttgtttcagattatgcttcatatacttcacttgttggtaaaattaaataatcatttaaactgtaacttgggactcaataacaaaatcgaaggtggttccctttttgctttttctctctttgtatgatcaagtgctaaaagctgaagttcttttcattgtggagaactgttagtttaaattaggtatgggcttgagaacaagaaaacagaatgaacaattagttggtcttggctacacccttatactttctatttgtctagctctagacaggtagggaggtatcaattagctatttggtcactccaaaattatgggtctgactaaattcaaaagcaatcttcttttaaacttttcttgtttttttggtacaggtgcgtatttcaaactcttttgctgggatgaaatttagctcccaaaaatagcatacccaaattatatgaaagcctatggaggctacaattacagaatttgcactttcagaaattttatttgcattaatatgtaaataaatcttatttcttattctggacaaattgtttgaattaaatatgtattgattatagtttactctagcttaataatgtatattatgtgtgaagatgagttctcaccggagtaagctatatgttatcttatattctactaattttttatatttgaaattttgtgagagataagctgtaaattatgttagtccggtctattttttgttgtattttttaaaattaggggttatgtcatcataaaatatatatatatatatatatatatgagttgtgtcatgtgaaactcgtttgcaacttcccactttctcagtaagtattcattcattgctcatttgcttcttctaaccaacataagtaataattattaatgaacttgtgttgtcaaactttccaagtcacaatgctaaacatggaagctaggacattatgtttgaaactataaaaatgggaactattacaatggacactatcttcgaatttggttatgaggcataacgcaagaaccataaataataaaaaccttgacataattcaaaaaccctgaaaatgattatgaaaattaggtcta

SEQ ID NO: 196362 - DNA, 752 bp, Cannabis indica
ttttgggccttttgaaatattagccaactattttaagtgtatgagaggatagaattgcgggctagaaaatgatacattgattagttaaataaagtgttgataaaatgtaccaaatcatgtcccttgaacttttcaagctgttaaaaaatccgccgaactattgaaattgttaaatttaagaatttttgtcaaatttcattcaattttactaatatgacgattgtccatatactaaatcatcttcttcaaactttgatatctactaaattatgtccctacaaaattgtgccccttaaattttcatccacatcagactttgtttagtaaaattggacaaaatttcttaaatctaacattctcaatagttcgagagaaatttttaacgatttaaaaattcaaaaagcatgatttgatttcgtgtaaaaatctaaattagcctcatatttattttgttttgaaaatatttttgcataatttttctgaagaaaagagagacacctgtcttttacagttctggatagaaaaggaacaatcaatcccattaattacataattttttaaaggaataaattttccttgtacgtacgaataagaatgattggtgtgacttggcaagaagaatgaggtgcttcacttgttgttcttctccctcttcaatatcccttttcccttcttcctattctctctctttattttccaatccaagcttccctgcttctgcttctggtatagtatttctctctctctctctc

SEQ ID NO: 196363 - DNA, 964 bp, Cannabis indica
accggacccgttgatctcgagatccgggagcttgaggccggccgaggccttgtcgccgcttaaggaaggtcctgatggaacggacggtgaagattcgaggatggaagggaggtggggtaactggatgaagggtcaactctgtagggcaccgtcggtctctagctccacctataagaggtccgatctgaggttgcttcttggggttttgggtgcgccactggccccggtgcacgttagcaccaccgaacctttacctcaccttagcataaaagatacccccattgttagtacctctctctctcaccctgtttatttccatgttttcttttttctgtgctttctgcgttgatcatgttcttctcatttactacttcatttatttaactaaaattaatacttataaagagttgctgctgaatcttgttgtgaattcatcaactttagaatggtagttgtgatttttgttagtttgcttgatttcttatttatttattattatgtcttgagtgaagatttttcatgggtatatttcgctgggtagaataatgtccatcagaatttttggttggtcaagatttatttgtttttatttttacttttagctctgcgatagaacatgaacaatatactacatatactactcatataaattatatatacatagataataaaatgatggaaggaccatcatgtgatttcttatgcatgtcgaggtcttttttataatttaagagaacatgtttatgattgtaataatctttatgtaaaaatgcgttactttagttttacgcatgctatcaagtatccacctataagaatgataaagaaaaaggacaaaaaagtaaacgcatgctaacctatgagagtaggaaaaaaatgggctctctctctctatgttgcctagcactgttcctttgggctcagataaacgactcttcatttcgttggaggacacatgaaggtc

SEQ ID NO: 196364 - DNA, 527 bp, Cannabis indica
gattaaaagtaataattgttattaagtctattgtctcttgctctgccttcaagttgttcaacgtacctaaaactaattcatttacttactccattcatcgatgagctcattgattttcttaattagactcttaatctccctctcactctcactcacaccatcaatgtacatatatatatatactaaggtctctctttcgtaagaaacactctctactttcatggtgttttgaatgttttgtgatcacaatcaatggctgatgatgcagacaggatttccaagcttcctgatacagtcattcttcacatgctgtcgcttctaccaactaaagacgtggttcgaacatgtcttctttctaagcgctggaaactcctctggtactcggtccccaccatctctttctcttacgctgattttaaatgtagtcatcagttctccaattatgtaagccaatatttgaaacaccgcaagaaaggtatgtactttatcgtcgattcagtcctaactagttttaagcttgacatgtt

SEQ ID NO: 196365 - DNA, 1060 bp, Cannabis indica
agaattgtacctgcctttacaaataaaaattatacctgcctttaacgatttaaaaaaatataaataataataaaaaagaaatatacttattaggactacatgttagaaaccccattttatcactttagcaaaattataaacacaatagtttttcttctaacatcatctccctctatcacacaagcttcctctccttctccttttgtggcttctgagattctgaggcacgacgtcgacctcccaaggccaagctcaagccacgatgatggcctcccaagcccacaaccaccgctcggttgttcgccgcccaatagcccacaaccaccgctcagttgttcgttgccaaatagcccacaaacatccttttctctctcttgttcatctatagcaacccggccaccttgatcgacccagcgcgatagttctggcgaaccctagttctaaataaatcgcacccctttgcactctcggtctctctcacttctttatacacgaaatcaaatgcagaccagccgagaacgcctcctgcttggcccagcgttgctagacttccgtgcgattccctagtctaatttgtttattttcgaaatgtattcttgccctttttttggttttgtacagttaactatttttttcggttgtatctgttgaaaaaataaggtatttgtgtttaatgtatttgttaactctattagtttattgtatcttcttgtatggagtttatttattttttttttgttaaaatgaaatattaacaaaaaaattgtgtattcatatttaatgggtcttttaggttcttaatattttcagatctgttcttattggttttttttatttgagtgttcataataactgttattgttctataaatatctttttatattgcatttattatatccaatattatataaatattttgtttagtgtttaatttcctaccattaaaagagaatataatgtaaataaattttattatacacatttattttactaagatttagtttttaattcaaataaatatagtgacacactttaagagtaggtgatatcagaagaaaaa

SEQ ID NO: 196366 - DNA, 628 bp, Cannabis indica
tcaactccatctctggtgtctctttagcagctgcagtcatgtctttaaggtatgccacaataaaagggtgtttataactttgtttcagtcaatacttcatagttgatagtgatacggttttccttacagcacagttacaatgcataagttataagagccgaccttaggttaagatgagcttgcacttaacccatgatccaaaacaaaattcccttttaaaataattgcctcatactaaattacaaattttatgattttttataatttcagtgcaaaaatatgaaattttttcaaaaatattatatgggaaaaataaaaatatagaaaaactaaataaaagtaacaagatactcttaggataactagtcagctacattgttagggaaaccagttactaagagagtaatcagttactttttatataataattttttgtaaaaaacaaatcatacttttgcaaacttatacttaaaaatccataagaatgaaaatcttttactagattcaccaattcaggctggcactacaactatgttctttcttatgtatactagattctgttttaagagtaattttgtaattgtatttgtagttactctacaattgcatggggggcttcagtgctata

SEQ ID NO: 196367 - DNA, 2231 bp, Cannabis indica
gtattatattagaaaatattttgataaaatttaagtttgattagagaattaattactttcaaaatatattttatatattatgtccaaacatatattttttaaaaataatgatagtaatatatatatattttatagatacattctaataatttgtaattaggagtgtggttatatatatatcattaattaattttttttttgaacaatatcattaatcatttttaaaataaaagatttgtagtgaaattaagatttaaatatgtatattttatatatagatgtgattatacgatgtaatttttatgattgcatatatataataaaattaattttttatataaaatatttacataatttttatctttaaatatatataataatattataaaattaataaaaatattctattaagtaattgagatatttgtgaaaattaatgtaaaaaatttaaaaacaccaccacattttatataaaaaatagatataaaaaaaatacttgatagatggaaatatcatttggttagttcaagtgttaagattagtttgattaatgaaccatatagatatatatttattaaagtaactaactatataattttcattcttgtttgtgccggtgcatttaggtatttcaaatttagataacagaattcagtttagatacttggtattattttaaagtaataattatttccaaagttttttatttgttttgtcgatttaaaaaaagagtccatcaataatttacatgggcacaaaactaatatatagtctgtatatatacatgacaaatataatgttatactgtagtaaagacaaaatattttatgaatattactcagaaatgttttttataatatatatttttgaaaacaataagtaatatgtagtactagtgaatataaatattctggtatgaaaataacatggaccgaccaaaccaacattataataatacacaataacagtaaattgtagccacgtatagatttggtcattatgccctcacatgactcttaattaattttttttgtataattattacatatgatcctaacacatggcgtcactaaaatattttgagattaaaaaaaaaagtttacgcataaactgtatatagtcaactttattatgcaaaattcattttatattttaacatatattatagagttttgttttggctttttgatactgtagacttgattataataacagttttcgagttaaattattaatttatttacccagtttcatgataattggaaataaattgctattatttcacctaattttacccagtttcacataataaattaatgtgaaaattatatatcgaaatgatgagatgtgcttaaaagtgttgaaaaaagttagttaacgttattaatgtataattatgttgatctaatatatgtctttgcttgttgcgaaaaaataaaataaatttatatcattgctaataatatatgtaattttttttagattagatgagatatgaaacaagttacctgagtacataattttttttttaatccaagtgagaaattaattaatgtaataaataccatcactcatttgataataaagaccatctagatgtgttgatcatgctaaaatctatagctatatatatacatatattattggcatgaacatttgtatatattttaaaattcatatatatatataatataacaaagtgttagacatcactaaacctttttgtcaactttatatttataatgtgtgtgatgcggctgcaagcatgaacaggaaacagggaagccaaataataataagttaataagggtgacgaaattaaggactttttctattttttaatctttattttttttctttgagaaattttcaatattattataaatcaacagtcatttacaataatagagaaaataggataaggtatttctcttatccaaaatacatcttcatccaactctagagcgtacttagccaagtcattgacagctttattagcctgcctacgagcatgattaataataactctaggaaaagaggataaaaaaacaacgtatatcatcaattagatcattaaaacatgataaatcattatgagaagagttcagagctgaggaaactcttagcgcatttgtctccacaatatctattgaaaatggacattgaaaatgattaataataactctagggaaagaggataaaaaaaataacgtatatcatcaattagatca

SEQ ID NO: 196368 - DNA, 505 bp, Cannabis indica
ttccataaacttcacaccagcaacttcctcaagtttcagagactggtttactgctgttacaaacagcagcacttctaactcgacaactgaagttctcatgattgcttggcaaatttggagttccaggaatgatgtgttgtggaaaggaagagttaagacaactgccaatgttgttattgaagcaaaatcttaccttaatcaatggttacatgctcagaaaaaccgatcagcttccatcctactgatactagtcaaggtatggaaattgagcatttggactaaacccgttattgatacgattaaggttaatgtggatggagcgatatttgcaaatctaagctcttatggagttggtttcatagcaagaaatagtgatggccgaatccttgaagctggttccaagttgagttttggcaatgtctctcctgaaattgctgaaatatgtggaatcaaggaggctttaagttggataaaaagcaacaattggcataatgtatcccttgaa

SEQ ID NO: 196369 - DNA, 1718 bp, Cannabis indica
gttatcatctgcgtgtaattttaatttgcgagcagttcgatttcaccctgttatatgcgagcagtttataatctgctatatttaaatatttattttttagagcaaacttaaaaaatattttgaataattcacctctggaactattttgtatatctttttgattgcttatatgagtagttatctcatctattcatattttagcttaagtattatttttccatgcatttttgtgcctcgtttgttatacatgccagaataatgtgagcctttaagtatttaacttcgcatgtagctctatgttattttataagttgatctcatttacaacttctttttttttttgactttttcatttctaaagaaaatgtttttaatttcttgacttagaataagcaatgaataacatgtgataaaaatggacaaccaacctgagttagttagaaacagaaaaaaccaatcctaacagaaactaactaacttgccaactcattatcgacacatttttcttctattattccaatactaataaccactaataatagtgcacaaaataacagtgaaactttgttgctaataacttttagccgcagaatatggaattattagcggcggagggctccatcgctaaaacctattttaaaaacttattaaatggttattgtaatttttttattagctgcataatagccttattattttaaagtgatattttgatgatgtgctaagcactcacaacatgctctttatagtagagcttttgtaaaaagaatttagctaaacatgataaaattagcttgcttctcatatcctctagataaattatgtataatacatatgcacttgaattaataaaacttggtctaaatgtagaggatgaatagtctatactttaaccttatttcaatactatataatatttatatatatattgaagattttatcatttaaatatactgaaaaataaaaaatattactaatttaatattgtagaaaaaattacagagaagttgatgtattgtgtaacgtaaaagtttaatataaaatatagagcttataaattttataatgtattttgaatgatctaactatattgtacatacaattaaaaaaataatgtgttataacgcccccacttcaagctcttattgggcccttacacccatagagttatgtctcttatatatgggtacgccactttagttactttttggaatgagaactagacctacaaaccaacatgagtatttctagtgtactttatgtttactcgtacgcttcttggaaaaacttcttaggtgatcacccatcatcaaaattactccaagtcaagtacgttcaactttgtagttctcaagtaccaaaaacaaagatgcaccttattaatataggtagtacctgtaaatccattaaagccctcttcaactgtgtagtctcatgcttacacaatctcagaatcgtcacacttgactttcctaggcaatgtgggattgcacaactcccaatatttttctttgcagatcatgggactttgactgtcacaatcaccctccttttagtgtccgacgtcttcgttgaccacacttttggctaggttaaggttctgataccatttgtaatactactgcttcaagcctctattagacccttacacccacagacttatggttcttataaactggtatattactatggctacttcctagaatgacgattggccc

SEQ ID NO: 196370 - DNA, 544 bp, Cannabis indica
gcagaggaatatctttgattctaccagcaaaacctgacagtttttaagcacaacatctaaggacgagatcaacccagccaggatacttggcaaccgccatgaaggtcattaaaagctcaatgtagatggcacaatgtcaactaaaagtgcacgctaaggtgctggagcactggtccgcaactcatcacgtcaaataatagcaactttagctcagagtactgtaggacaaattccaccacagtccgtagaagcttgggcaatgctccaggccctacactggtgtaaagattagagaatccccatacatcatgttgaatcagactgcctcaattgaattagagacattaagttaagacacatcatgcttacatgttacggggctcaagtagaagcaattaaagaagtgttatctttcttcactacatccctatcccacgcccaaagaactaggaatgctactgcacatcaccttgcccaagcatctttagggttacataacatgtggacttggtatggaagttgtccctttccttttaatctttag

SEQ ID NO: 196371 - DNA, 1839 bp, Cannabis indica
attcaaaatttaaatgtctttcaatgaatttgctcattgccacaaaaaaaaaaatataaaataaaaaaaaaaaaaatccaaacagaattcaaaacaaaagaaaatcctataagtttctaaatattgaacataccttcatgctgcctcctctatatttccttccacctgactttgaacatcttttcattttagaaacagaccatatgggccctattcctgatattctatcttggctattttttattcatctttaagaggtttttatattcattttcgtactgtagttaggtttgggggatgtacatctctaatgcttctaactaagaaaattggaaagtaacatttagacgctgtcaatttgatcaattataacctggctgactgttgaaattctttgcacaattgattacgagcatccttttcttccctctgtcaatttttctttgatgtttgtttccacttttcaaccttgagtgtgctaccttttgtggtggtttttgtttgtttattggctatctttactttctattttcattggaatgtcttacatgcagtcttatttgtattcatactcccctttttctttttttagacacagataacctaggcaggcaactgccagattctcttacaaatcaagatgagaccactcgatgaaacagagacaacagcagtattcgagaagatcttcaagttcacaggaaataacctcaagaatattgtagagaatccttctcatgaaggtccagactccgaacctggacgctattgcttccgccttaacaagagcaaagtctactacgtcagtgagtcccttgtcaagcgtgccacaaatgttgctcgcgttaaccttatatctctaggaacctgcattggtaagttcacacatggaggtaatttccacctcactgtccagagtctgagtgttttggcctcgaatgccaagcacaaagtctggcttaaacccacctctgagatggcatttctgtacggaaaccatgttttgaaaggtggtttagggaggattacagagaatattttgcccggtgatggagtcgtggtgttctccatgtctgatgtacccttggggtttggaattgcagccaagtccacccaggattgtaggaagatggaccctaatggaattgttgtgttgcaccaagcagatattggggaatatttgaggatggaagatgatctctgagtttgaaattaatgatttcttagagtaatttttgataaagtcatatacaaagtgtgaacaagaaatgtgagatgagaactttgattagattgaggatgttcatatgttctctgtttcgagtatgtaattcaagttttgtcagttttgatattctatataacattatgctaaaacaatttcaagattttccttttaacccatgtgtaaactattaatttaacccatgtgtaaacaattaattttgatttttgatttttgtatttatttattttgggtatgaaatctattttttttatatggtcccacttaaagattactagacctatcttttattactaaagaataaatgtcatgtaaagtgtaattagaattagaataatcaagaaatgaatgtgttaaaaatataaaataattgaaaatattatttagggtgattatttaatggttataactttaatgtaattagcatgtttatattttttttacctttaataataggttactaataggggtgcacaaaatatgggcgaccctgaatcattgggctgaaaagtaatattatggattggttataggtaggacacattactctatataactcaaaccaacccattttttgaaagatgttccaaatt

SEQ ID NO: 196372 - DNA, 1619 bp, Cannabis indica
gtagcgaccagaccacaccatcttgtcccttggaggggcatgagccaagtactcctcacttggcaactcagtgttgagactcgcgacaaaattttcagccaggagtttcatcaacctcaaaacagtgaacgttgatgggggagacacccaagccacctcatcttagggttagcaggcctctcagcctactcggtaggccttacaacctgctcaataggcctttcaacctagttggcctatgcatcctgtcccattgccattagttcagcataatgggggtcagttgaaggggtttcacggtaggtttgatttgtcttggatagttttggatcctgaccattctgccgtgcaatggtaataacaacctcagcctcaaacggtttcttcacaaaggatgacatacgtgcctctggcagggtatctgggacacctggctggacaatgtatgtccaagatgttggaaggaatttcctctaaccctagttgaattcccaaatgaactggccctaattttctcctcccatccgttcagagtgatggtggttttggatttatggtacaggagaaccactgctgacttccaagttagaaaaactgctcgaagagttggtcggagaaagaccatataaaaaaccacttgcccgaagttccaattaatctccaaagagaagttcgagttgatgtgcatctatttggtgctcacctccctaatagtcacgcatgttcgtctgtgcaaaagggaaaggtaagtgaacattcagacaacataaagaccatacaggcagcatataattagttggctagggtaaaaacaccttgattaggcaagccaaagttcctactagacttaataaaacatattttacaaaaagaatccataaaaccttgtttatttgtgtgcttcaagactcagtaatcaaaaaactaaaaaacaatgccaagattcaaccttttttaactaaaaaccctacagttatctaccttaacatactcgtgcgaccagtgagggtgggttttccctaaatccatggcatggaggtttcttgacctccagcaacggtgtaaaaacgtaaatagaaattctaaaaacactttcaataagaaaaaggttaaagagacttactcactaggtgaatcctgaggcgagacctggatgatggtaaaagcgactgctggttttctcctgcatggtgggaagatagaggaagaacacgagaaaagcaatgagttttcttgaagcttatcttgatttttctctccagaatttgtctggaagttaaagtgaaagtgaaagtgagaagggatttgaaggaaaggaatggcctttatataggactcatttaattcaatttcgcccaaaaatttaattaaatcagaaattgattccctataaaatcatcatgcggaagtagaaagagtaaaaagggcaattatgggggagtgtagctgtcaacacgatctcccataaaatgtgttttaaaactgccataatgagaactgacacttaatggtgagttgaaaaagctaaagtgtgattattcacttctgctcggtacagtccccaaagtacgaaccaggtgaagctcacatgcttgccaacacccgtataggtatcaaat

SEQ ID NO: 196373 - DNA, 691 bp, Cannabis indica
aaatggtatttaccctaattttagttgattgattataatttgggctgctgatgctgcaacttattgttcttactattgtcaacaagagaaaaccttacacatcactctcgcagttgagttcaagagaagtagctgaactcatcgtcatgtatttaatactggcaaaggtaaagcaagtgtttatgaataaactaggtattggtgttgttgtccatgatgatgatgatgtattgttcggtttctcgccagtttggctttaataaatggtgtcttttggtgacactcccttttataaaaaaaaggttgtttgaaaaaaatgttgctgaagcttttctattaccgatgacgccgatagacaccatgtgggatttcacatcggcgacaccgattttcatggcaaaagtcaaaggtagggagacattccaggtaaccttattctcggcaagaagattatggccatacattttcagacaaaattatatgacctaatttaaaaacattgcagaaaatttaattcttttttttttaaataaaaatgtaaattataaattaattgcctactaattactttccttatgtagaattctactcttatattgatatactaggtggatcttacgtggcgagccacgtattgttagttttatttaagattttaatttttcttcgttcacctaaaaccccacttctc

SEQ ID NO: 196374 - DNA, 2244 bp, Cannabis indica
tttttttggcatacatttgtaaatagtaagtcaatattaacacaaacttattttatatttattttttttgccaaatttagtacaaattttaaatttcccataggaaatgatctttagcagtaacaagttataaacaggaatatataattttttcaaactaacaaggacagaaaatcatacctaagtaatataattgaaaatttagtgttgatacccgatcaatgtttaaaacataatatacctagtgtaaatcattgaaatgtatctacagtccgaattggatcttaatagtgtgcaaacaaaaacaggataccctcaaaagaaatttatgaaaagctaagcttaaaaagttaaatgtgacgtctcttgaccttgcccttgcctttcccctttccaggacgctttcttttacccaccttgaactgccttttggacatcttccctacacccccaattgctttaagcgagtccttgcttttactattatcatccatatccacatctgttttaggcaacacagcatacagacactaaggtaagttgcctaaaacaaaataaacaaaaaaaaatatatacatggctaaaaattgtccacatatgttttaacagaataaacaaaattcaagtaaacatctacgtaatagaatacgcaacaggccaaagttcatattctgacgagacaaactatgttatgtatgtttaaattcaaagattgaggtaaagatattgatcatgtctgaagaatattttatggattgacatattttctgaggacttgctgagtaataaagtaaattcatacaaggctatccaaattgctagacttctcacgtaacagcccaagaaagaacgattcacatggaatgatgctgcagaattggctacgtagagttctagctattgaaacctagttttcagtaataaacatgatttaggaaggttttttttttatctttcagtatatctgttgcgtgtgtcattaaaataagacaaagctgccaaagcaaagcctaagaaatttgcaaagttaacaaggctataaatgtggaatttcatttttttcgttatagatgtggagtttcattttgaaaaacttcacggcctctaccctaatgggatacttaataacaaatcacctagttaacagcacggttatgaccaaaccatcccagaaacaaatcaaagggtatccacaaatcaaaaggaatatattcaagtttagattgaattgcagttaacagttcttgcttatataaaatacatatatagcatattttccttagccaacatcacctacaggctataaatatcattatcaagtattgagtattaatgaaaattccctgccattttggaataattgaatcgtgaattaaatgttcatagtttgcatatgagttaggtgatgaataatcataacatttgggtgtgcatagtaactagccctaaggttgtagtaagaacaaaaaacgctgacaaaggtgcaaataaggtcatgacacaactaatcaaccccaactaagtctgctaagagactctaaagaagctataaacttttaaatcaaattaaactcgacctacaagaaaatttcaaactactgttttgtctagggattcatcgcgaaaaaacaaaacaaagcctagacagcacccgatgattatatctaaactaacataactaggtagactaacagccacaagttataaatagttgcatatggtttatgagactcaaagagaaaacttagtaaattgaaaaagcagaatatacccatagtgttagttgtaattgtagcagcactggtggtggggacgagctccattgaagattcggcattcgggataggtttaacagggagcttgggagcagccaaggcggcttccatggcggcgtacttcgcaagttctttcttttcgtatagaggctccaccatctctctacgaatggccctgagacgtttcagtttcttcgatctcatagatttcgccatggcttctgtctgccttaacctgtagcgttcggccgcctttctttgttggggactttaggggttagggtttataggatcagagaacagaaaaaagagaaatagaacttgcttaaaagactgattttgtgcaaccctcgaataagcggtgttgtttggctatctccaattttgtaccccgatagtatatcatgatattcttattagaattgattttttttttcttttttttgaatatccatatactatttttttt

SEQ ID NO: 196375 - DNA, 1317 bp, Cannabis indica
aaaccatatttttacaaatttatgccttcaaaactataaattcaaaaagaaaaaagaaaaaataataactttaacggtttaataagccaatgttgatctcatatattagcaaaattttcttaaaatggttttttttttttcctattttatgtctgtttacctttttttaaaaaaaaatgaattagtatattttttatagtaaaaagaaacagtattatttggtattatcttttaaagatcattgtttattgaattaattctactcttataattttttacttacacactaatgtgaggtttggttggaaataacaaaatagaatggaaataaaataattttattgtatttttgtttggtaatgtcattcttattcaatagaatgattttttcatcattttggtgaaatgactatatcattttgaaatagaatgaatgatcatttcaatgcaaggtaaaaaaaattaataatttttttttatcaatttttattatacattttaaatttaattcctatttctattcccattcatattcatatattttcattcttcataaccaaacaccaaatgccatttaaaagaaataataaagagataattacaacaaaggttccaaaaaatttagggttgatgcaaattaatctccaacttcgaaaattaaagataatagtcttcaaggtcacactgatccgttaaactcaaataaagtgtcatgtgtcaactttttattggtctaaataataattttacttaaaaaaaattagaataaaataaaataaataatatattttaaaatcataaatttattttattttattttatcttttatttttatttatttttcatgttcttcttctttcaccgagccatgagagctcccccagagtaccaccacaagatctcaagacttggagaggtcatggatgacctccattttggcatggggtgatcggagctcgcacatcatgcactgttgagaaggagagatggagaacgactgacagccaaggggcttgagggtggaaggtcaaggtttggatttcgagtttctagggttcatttcaagcttggaggactgagaatggacggcgtcgggcctggccgtggctgttcaacgatgagagaggggggggggtggtgagctcgacagatcaaggatagtagggagaactagattttgggttttaagatcgggggattttcaatttttggtatgctttgaccaccaccaccactaaagatgttaagacgacaccgcaagggagaaggcaaaaagagaaagagagagtgcggcacatagaatgtagcctgataaaa

SEQ ID NO: 196376 - DNA, 591 bp, Cannabis indica
atattataaattattaagatatatataattattctcagtagtcgaatcacatgcttaattttgtgtggtcacctgtcattataatgagaatctgaatttttaaaagtatttattttttttaaattttaaaaaaataacacaataataatgctcaaactcataattttatttaaattaaaatatacaacatatatacatgacattccaaaattaatcaattgtaaaggtgttaaatattgactttccacttatgcattgatcatatctaattgatgattcaaatccatttagttataagatttaattaacaaaaactaaaaataaattaaatttgatataataacaccattaaagcagtacggtctattatttttattcaataaattaatgatgataaactataaatgaaaatatattaatttcatagttgaaatataattaaatacatacaattaatattgaaaactattctaattttcatttataattaggctaattagtaattttttcccccgaactttgacatgtactaaatcgtgccccttgaatttttttgagcgttaagaatttcgctcgaactattgagattgt

SEQ ID NO: 196377 - DNA, 883 bp, Cannabis indica
aaaaaaaaaaactatttttcttcacacaatttaacttgagtatttttattttcacaatctaaaatttacatggatttttttctataatattttaggtatattatttttgttttaaaatgatgactctatatattgctcttttatatgtgtaaaaaccagttctgccaattgtatatggaagaactaagaagtgcaagcatgtgtagtttttcttgatctttctttttccctttaaatttgtatggtgtaggaaattaattagaggacttaaaatctttaattattataccctaatttttattatctaatggtggtctggtcttattgtgtataggaaaaaactcttgtgattgatgagttgtgagccctagctatatttatataatggaaattttcaagtcaagtagctcaaaaagcatcaacagcagcaataataataataataataagcaacagctccatccagtcaaccaagcatttgctgattttgaaaatgatcacacaccaaattttaagctcaaatcctcaaaatatcgcggtgtccaaaagtcagtatactcatataaatatatatacatatatatagatagatatatatcaataagttcaatttcgatgatattttgataaaacatgcatctttttcatcgatctttcttttgtgggaattgtgttaaatctacttaactattttgaaatgatagttcatatgtttcttgtcttagtttgattttctttacatattagaaagagagttttttttttttgtcttctgaaagggacttataagctgagtaaatgaaataataccatatatattttaggcagttcaagttgttatgaattttattaatgataatactttgcatcaaaatattataga

SEQ ID NO: 196378 - DNA, 986 bp, Cannabis indica
ggttcacgtcctccaccaccaaacacacttacaggtaacctccccaacccagaatttcaacaatggatgagatttgaccaatttttaatgcactggctaatgaattcaatctctgaaaacatgctgggacatgtgattcactgccgcacttctgctgagatttggactaccttctctcaactctttgcaaccagatccagggctaggattctccaacttcgtgggttgctacagtcgacgaagaagggttctcagaacattgaagattacatcttaaagatgaaaacctttgcggatagtctcactgctgctggacaacccataaaagatgacgatttgattttatacattcttggaggactcggagctgagtatgagtcggttgtggtcaatctcacatctagatctgaagatctcactttacaagaagtgcaattcttgcttcaaaatcaagaaatacgattacaacaactctctgccgaatccgtagtcaatgttcaagccaatcttgctaatatgcaattcaacaatggaggcagaggttatccagctaatcgcggttaccgtggttcaaatcgagggggaagaggcaattacaggggcggtcgaactggtaacaatagcaacagacccatttgccaactatgtggcagagctgggcacacagtcataaagtgtttccatagatttgatattaacttcactggcagtcaatccaattctacgccttccccatccaatgatgaatcaccacaagccaatatcacccaaaccgattctacatcaaaccaacctcaagcttggttcttggacacaggggcaactcatcacatggccaatgacactcacaacttcagtcatgcctctgattataaagggaaagctaaggtggttgtaggtaatggttcctcacttcctatacaatccattggtcaaagttacattcattcttttcttcaacaaatccattagtgttacaagatatc

SEQ ID NO: 196379 - DNA, 1434 bp, Cannabis indica
acaataaaaaatactttgtccatcagccagaaacaaaatcgtgactaaaaatactttgaaatatgatatgtaagcgaggtgcatatgattttattgtaaaagtacgtaattttttaaaattttatttcttcatatatgaggtaggaaaagtaataatccaagaggattttcatatactgtaaacagtttaaaagatttggttttagtaataaaaaacattaacaaagtaattttttaaacttttaacgctcgtttaatacaccgtatcaaggtcgtattatattaattattacggccaaattttttaatacaatgtatgttgtattatttgatacataataaatggtctgtattagcttgtattataatatttacaaagaatttggagtcaacacaaatctccgacccagacctagaccccggaccccagaccccggcccggaccctggacccaggcttggacctagacctgggaccccagcctggaccccagtctaaaccctggacccgtacccagacccgaaccccggacccgcacccagacctggacctcagacttggaccccaaacccgaacccaaacccggactcggatccggaccgcaactcggaccccgaacctgcacccagacccgggaccctagcctggaacccggcccagaccccggacttcaacctcgacctcagaccccggacccaaaccccaaacctggaccttggaccctggcccagaccctggacctggacccgtacccggaccacagaccccaactcggacctcgaacccagacccagacctggacctggacccggacctgaatcccggatccggaacccagactcggaccctgacctcggaccccagacccgatcctgcacccggacatggactcgaacccggacccgtagttggtgttgggatcgagggtattaaaattatattataactttacataatcaattaatataagtcaataccaaaatattgtattgtattaaataatactaatacaatacaatataatacattactatacagcgtaccaaacgagccccttaagtatgtagcttataggttgctggtgttagtaaaatatgttggatgagattacacacttgtgatcattcttctcttcaattaatttcgaatgaatatctattttagcctaatacattggtatttcttaatttttgtagaggagtagataaaacactgaactagaatgacttaagaacaaattctcaaaagtcataataaactttttaattacctcataatcctagaaaaatatctaactagttactaataaggaaagttcttgacccttttgtcaattaggtgataaaaattttaattgaccaaattatgcaaattattatattattttaagaaattcaaagatgaaaaatgtaactttttgcaaataacttaaag

SEQ ID NO: 196380 - DNA, 834 bp, Cannabis indica
cccgaagtcagatgcccagcaaacccgcacgtgaatcccacgtgtcgtcgttcgtcactgccatctccttcatgcaccagtgcatgtaggcgtgttaccacttcgacgacgcccttttctccgacattttcattctcggcacaccctgcttcatctagtcttaacaaacttttattccgaccattgaaaatcaaccatggtcactgaggttgtttcccatcaccgttcagctcctagaaacaattttaaagggttacaatatgattgttgcctaacctggagcatttcctttcaccacagatcagattgctcatctccatagggctgctaaagtcaacttctgcaccagatatgaactctccgagtgttttctctactccaaacactcctgttgcattcactactaaaatctcaccatggatcattgactccggtgcatctgatcacatgactagttgatcttggcattttattacttacaacccttgtccaagtaagagtaaaataaaaattgttgatggctctctatcaactgtggcaggtaaaggttcagtttatctatcttcttcccttgctctcaaaaatgtcctccatgtgccaagtctatcttgtaatctcctcacaattagcaaacttacctttgatcgttgtattgcaaaattctcaccattatgttgagatttcaaagaaatgtcctcagggaagaccattggaagtgcaagagaatgtagcgagttttacactttgatgttgatccgtcatctactcaaggtaataaagtttgcatattgatttgtattgcttctaatattgatattatgagatggcattacc

SEQ ID NO: 196381 - DNA, 2054 bp, Cannabis indica
gatacatttacatgagacttccaaagaaacacttaaacccccacttaaacctatgcgaggaacttcaataccattaggaaaattaaaagcagaacggaatttagaaagagaacctacactaagcttagtttccataagaaatattacatcaggttttattattagaaatgagcagtctaagttgacggaatgctctcggattgctcaaaccccgagcattccatgatacaacattcatggtgactggcgaggctgagcatcagcctgcgccaaagaagcaccattaccatcaccttttaatgaaagagaagacatttcagaagaagggtctggttgtggatgcgtgaatgtgttggttgtatcagcaagggggttcaatcttgtacgacatctcttaagaacactacgcacattaccacctgaagtagtcaactgtcgcttagaaaataaagatgacattctggtatgactagccgttgaagagcctggagagaattcagcagtaagagcagatggaacctcattgtccagtgggtgagatgagacaacagttgaatgtgtaggaataaccttgtcttgctggagagacatagtattagcagaaggtgggtaaatatgagcataggctgctggtgtggctaaagacaacctaacagaagaattaggcacttctgagatgtgagaattatccttaataattccttgagatgaagttgaaaaggtagcaggcattgattgtatgactttctctggattaatgttaggattagactgcagaaagaaatccttgctagaatttttgagatttggaacaaccacatttgatgaagaggcaatagaacttgggtgaatattcacacaaggagtattatttggtggtttttcaacaatctgatttgtatcaactgctatagatttgcctttctcacgttcagtaattaaagtcggcaaagcaggaaatgttttcgggtgcgaaataataggcgcaattgtgttgcgagcaagacgagtgataaagggccacgggccagacttagaaaagtcttgtctgtaacggtcataactcgaccttggcagagaagatccttgaagccatggtccataaggtagatctggatcccccccttcatccaatttttccaagtatgaggggcatttatcaaagacatgaccaattatcccacactcataacagaaatcgggaagcctttcatagcgataatcgatccataaatcatcttccatccaaggaaaagtaaccatctgaccacgaagcaggggtttggaaacatcaattccaactcgaattcgtaagaagggtccccaaccttcattaagagaatcatcatgaacttcaatgaaggacccaattagattgccaataatcttagcaagagcttcagatttgctaagaaaaggtagcctatagacttgaacccaaaaaggagttgtagtgtatgaactaaaggccaaattttgaagagaaccaggagaacataagatcagatgcagattgtggaagtgccatggttcctttgatagtactcgtaacagatctccctcacaaccaaaagtaaccatataggattcttcttcatagacagaaacagagacatcaaatctgcctttccaatgagtgatgaaaaaattcaccagctgtttaggattgaaacctcgctgtgagaaaatccgacaaaggagacgatggaataccgggcgttgaacaggaatggatactcctgagagagaaacaacctccctttcacgagcagagagagccttagatatatctggtagaaaagactccatggtaaatagaaaaaactgagggaaaaagggaagaacaaaagaaatctgggaggaaaaataagaatggaaacaaatcagatgaagatcatagcaggcgggaacggttgaattcaaacaaagagaggttactggaatgataaaacagttaaaaagaaaaacagggaacaaactgccacagagcaaataagagggcagacaaagctctatctcaagaagagaatccactaatgtattagactttagaa

SEQ ID NO: 196382 - DNA, 2005 bp, Cannabis indica
ttgaactgaattttatttttattaagaataataaagtatgtgaaaatttcaaattaaaataatatgcaatattccaaatgaatcattacaaaaatctcaaagtcatatgcatacatctttcttgttcctcctacccacagaccaccaaacaagaataatcaactgctttgacaaaaattacaaatgctgctctcacttattattagggaatataatttaattttatataatgactatgctcaacggtcaacactgtgttctttgatcacagtaatcccgtgatgacgaaaacgtaacccattactaatcccagattatgagattaatgtgcgggtggacccgccttcaatctcacgtgtcctcaaaattaatactttatcttaatatattttcatcaacatttatggtaaataacatatgatatagatatactacaatttttttttttttttgcttgtgcgtgtggttttttatcatcactaaaagtattttatatttatatatttaagttttgaccaagtgtttttcttctttttcttcgcaaattaggacagtttaccaattgaagtaaacaggactaactttctatttagactaataatctaatttggtgatttaatttaacttgaaaaggaaaaataaacttacagttttactttcacaaaatatggatttctatatttattcacacaaacaaacacacgattgactctgcatatcgaagaaatctctaccacaaaggaaaaaaaacaactgtatctgtacgaatattattaagtgccactacaaaaaaaaaaataagtaagtacataaaaagaaatgattggttagagttagatgagtgagtgaatgggtatagtttagtggagttattaacaataaagtccatcccatccctgttgagtattagtaatgattttctttttcctcatacatattgatattggatttagatggtttcgagtgcacattattgaatgcataagcgttggccacttggctggccatgtggcaatggcaaatgctaagttggagccagcacagccgatagttatcacacttaagaccaaagctttcactttctatacaaaaagtagtcagaaatagttgattaaatactgaaatcaaaagaattaaacaattctaaatgttgaaagttattaaaaattgtgtgttttgcaaaagaatctcactaagtgatctttttttcttttcacataaaaaaaaaatatcatgattaaaagttttgatacaccatcatattttatagatcacttcagtagtagtggagcactgaaacttaaaaaagaccaaagcaattaaaagaaaggaaccaaaatgttgtctatggtggagtaaaatgttctcccttttgtttttgcttttaagttgaatactgtcgtagtaattttattataaaaacggttttatatgtacattttttttccaatcagttttaaaggaatctaccaaaacttgcaatgctcaaattgaaatgagagaaaaataactgagtgaaagagtttgtgtttggggttaagtggtttgggatttgcctacaaattagaacattctaattccacggctcactaaatgctgacacatacgctccaacgatgaaataaaattacttattaggctgtgattgttgtttataaatattttaagtattttttcttttgaaagatattataagtattttttatatatttagataaattataattataatttatatttattcatagttaatttagaacgaggaggtcgaatatcaaaatactttttcttatatgtaaccagttgattaggctagttaatataggatagaaggtattggagggaggtgcgtgtgtagggattataggattgacttctaggcgtgtataactcaaaaaaaaaaaatgtatatataaaagacacttcttctagcataaaaaaaaaatacttattttatgtgtacaactaaaatactaaaaatatctggtttactgtaaattatatt

SEQ ID NO: 196383 - DNA, 584 bp, Cannabis indica
cagtcttgtcttcccttgatattcccccaaagaaaacctgagacttattcaaattagctttcagcgccatgctattacagaactcctcaaaaatcttcttaacacaagccaccgaacctctattagctttgtaaaaaataatgagatcatctgcaaaacaaaggttaatgatcttgagattcttacattgaggataaaatctaaactccttatgattagcaccatattccagcatgcaagttaagtactccatgaccaagaaaaacaattggggtctccttgcttaagccccttagctctcttgaaacctttttacaatcgaccattcatcataagaacatatgaagtatcccgcagacacaccataatctaatgaatgaatttgattgggaacctgtagcatcttaataactcccaagaatctccaatccgctgtgtcataacctttactcaaatcaacctttagagcacatctcggagaagcattcttcgtattgtagctcttgatcaaatcctgaaaaataagaatgttatgagcaagagtcctcgctttgcaatctgtcaagaataatgtatttatgatg

SEQ ID NO: 196384 - DNA, 978 bp, Cannabis indica
aactactactaactaataacagaatttgtaacaacttaaaccttacaactaacactttaatactccccttaacggtggagagtatatattacaaattctcattttgctcttgagagtttcaaattggctaggagaaaagccttggtacaatatcagcaatctgatttttcttagaaatatgagccagttttaatcactccttcttgtactttgtctcttacaaggtgacaatcgatttcaatgtgctttgtactctcatgaaaaacaggattcacatcaatctgttgggctgttttgttgtcacagagcaaaatagcaggtcctacatgttcaatgtttagctttttcaaaatagacaagagccaaaccaattcacatgtagtattagacattgctcgatactcagcttcagctgaagatcttgagactatagattgcttttttacttttccaggaaaccagagaattgcctaagaaaatgcaaaatcctgttgtcgatctccttgtatccacacaagctgcccaatgggcatctgtgtacccttggagcttgatttcagaatttgcaggataaaataacccctgtctaggtgttcctttcatatattgtaaagctctttgagcagcattaatatgtgtgactctaggggaaacaaaaaaactggcttaatttgttgacagtgtatgctaaatttggtctagtaatagtaaggtactgcagcttccctataatctgagttttagatttacctccataggtgtgttagcagcctcacatcctaattgtccaagatcttttaagagttttagagcatagtgcctttgagacaagaagatatatacctttgttatttctagcaccttcaagacccaaaaaatacttgagttcaccaagatcttttaacttgaattggtcattcaatctggtttttaaattctggacaacaaccatgttattgcttgctatgatcacatcat

SEQ ID NO: 196385 - DNA, 686 bp, Cannabis indica
tacttccgcttaaacaatgtgtcaatgccttacatttcactttacaagaatgtgagatttgactttggtcaaacctctcacaaatcatagcacctagaatttttttaaaaaaatcaaatcttatacatataagtatattatatattgctatgttaagctacagcaaaactagaaaaatagagcagtgtagaataattggttccaagtatcaggcaatccagggaggcaccagtggctacaatcagcagagcgagaagggttagccctctgggaaggactcaaatcgccactataaatggatggatgaccatcttttctaagctcagaaagcattgttatgtcaagcaagtatgcagggctctgcatgtcccttatcacactgtcaaccacccttgtctcagctgggtacgccccaattgggtaggttgcgcccccgctgatcatcggtgttgtttcaccataacagttctttgttgatgttgcagccattgttgtagccattgtcccatcatcagtccattcattttggctgcaaatcgaaacttcgtgattagaaagctaacaagaatgtgcactcaagtggccatgtaacatttagtgtgacattttttggccttgtttagataccctatgccgacacaactactctacaccctaaactagaagaaaacatgcacatggtttgc

SEQ ID NO: 196386 - DNA, 2057 bp, Cannabis indica
aatagtttacaatactataatttctgatattccaatttactatacatgttcaaaaaattttaaacctatttccagcactgtaaactatttgaatttttttaaaaaatatacatgatggtgttataactatagctataaaataaatttgaaaaaaaaatattctagtatatatttttgaatataaaaattaattaaaaagttataatagaagattgacggtagcactcctcataattttttattaagattattcagttgtattttttatttatttattccatttcatttagactacctatcggattagcgatttacaaaaatttataacacccttactaatttaattggatcttattaaaataaaatgttagttaaaatgttagtttggattgcatgccacctctaattttttttttttttaatgatatttttattttctttgttgctaaacaaacagtcttcgaaagaaaaataaggaggagcatacgtggtaaacagtttcccctttctatttttggtaatctgtttctcacagtgtcgtgtccatcctgatgcaacagtccaaatccattgacggcaagccaaatccatattgaatctagtcatttttgtttttccctttcagagaagattagcagacgtcagtgctgccggccgcaattcttcctccgacaaatagtgacgtttctctatcgggatttggtacgcaaaaaatcgagtttcgaggtttgtttctgctgcctctaatttattattagttttggggctttttgagtcggtttggtcctcaggaagcttctggcttaatttcgtgtccggccgttccagactgaggttcagctttaagccttcaactttgaccagtctcgattgcttattttgtcaaattgcgatatgcccagatacatgaatataattctgaaaattatgtataattaaaagcatttctgcgtctgctacgactaatctgagctgggttttgttcgttttcgttgattgtgagctttggccttttgttgcagggtggcggtttaggcgagctgtattcattctttctcttacaggttagcttttttgtcttgaagctttattagttatgttggtctctgtgttcaattcaatatttggtcgcggagtgtttcattcttaattgttaatattttgtctgttgggtgtgactgtgatttataaagtaaatttactttctggccactgcaggttttgtactttctttgccgataaagtttggctctgtcgtgaattgaattcgtttgtttggttcgagtatttgttactatttatagaaaatgaagggagaactcatgaaaatcaccgagaatcttgatataattgtggggagagacagtaaagatataagagttttcttaagtgtctgtaacttttggaaactctagcgtttttaagttttcattttcagtgactcttctgtagagaaaaatggaacccttctcgcctaaagagggggataatgactattggtcttctccaagtgagcaggtggagagttttccatcgtttgatggtgttcccagggatatgttatcagaggatgtgttcaatagtttctcagagcttctgagttttgatacttacgttggatggtccagcaatcctgcggtgacagatcaggtctctgccacatatgggttggcctcacttccaccaactatttatacgccgcagaatacatcagactttattgaacagactgttgaggcactgcctgtcgctgaagttggaggaaacctcgacttaccaagaggttccttcaattatggtgacaaagctgtatttctgccagaagatactcagttggaggcgtcagcacattccaataacggcagtgatttagtagctacacaaaatactgatttcttagagaacggtgagatggatgtggagaattcaacgtacccaggccagttagattgtcacttgatgaaaagatgctgaaagcactatcttttgtcaaagcgtctctggtatgggaattttggctacaggtatgggttcctgtgagacgtggtgacgagtta

SEQ ID NO: 196387 - DNA, 1199 bp, Cannabis indica
ttaactcattttgcttgttgcttaacatttttgccatgccttgcaagaagactttatcatgttattggcaaggttgtgctccatgtgtcctctatcttagcttacacgaacatgccacatccagtggaaaaaatttggaataacatttgcccccaagtccttgttcgaacatctaatcggatagggacgtttcctagctcttgtcttgcttgtagtagcctctgtcgagcagtcttgtctagccaagtgttggcttttttgcatggcatgcttttatatctttgatcttctatctctctgtatatgcttcatcttctcttctttgaacctgccattgtcaagtttcaagctttttaagcttttagaaacttttttattcttatgttagattgtaatctttttggtattttgatccgcatgattgttttagaatgcctaatatgtgatcttttgatgaaaaagattcgattttagccttcgttgtgattcttggctctttgagccacgatgaacatgaaggacacattcgaatttggaaaaacacacattttatacaaaactaactttggtcggccttaggaggtcttgtttaagacctaaccagccttaggattcaattatgggagttagccaactttagggtttcagcctaagaagctagctggttcatgcctaggtttggcaaccctggccggttcttggctgagtcatgggaccctggccgatcctctcaaggcttgagaatcttggccagcctaggccttagttctaagtgggtggccaattttttgttctcttttgaccttagcaaacatcctgtcatggccttgtaggcaaatacaaccttagtctcatatgtggtttccttagaaactctgtatgaaactcaattgagtctattatagtcgaatgctcaacttaaaactcaacattttttcaagtcattacacttgagactatacttcgctgatatctagccttgtacaatgacattatctggcaagtacctttgggtatagttgtccaaagttttgtctatggcttgggacctgcaaagaactctgccttttggcttggaacctgtcaggaactctactgtaactctttactaaattaggcgtgttatggtgttttctaaatactgtgcacgccttcgctaatcaaaggattttattagaaaaagtgaataattaaaactt

SEQ ID NO: 196388 - DNA, 1842 bp, Cannabis indica
tggctagttcaagtggggtaggagtggaggcagggagatgtctttagttttcagattgaagaagaagatttggcagggctaacaatcggacatggagggagaggaagaggggatcgacgacagatggtgtcttgtaggaagatttttgtcgaatcgtatgatagatttcgaaaaaatgcagaacattttagcctcgttatggcaaccgggaatgggaatgtttgtcaaaaagcttgaagataatcgcttcttatttcaattttatcatgaagtggacattcaaagagtcatcaatgggagtcaatggacgtttgatcggatgcaattaattatagaacgactaccggtgggaggggattcgaattctcttcatttaaatcatcttgatatatgggttcaaatacatgatgttaaaccgggatgtatgaaagaagtgacggtgcgaggggtaggaaatactatcgggaagttgttagagaatgatcctaagaatttcgtcggtgtttggagggattaccttcgggtaagggttactcttgatattaggaagccactaagaagaagactgaagctaactcacaaaaatggtagctggttttgggttcacttcaagtatgaaagagtccctactttttgcttcatatgtggtgtaattggccattcagacaagttctgtagtcggttattccagcaacctcttgatcagattatgaagccttatggtgagtttatgattgctatgccacaaagatcgtataagaatatcggagcaaggtggctgaggaatagagggtggacgccggtggcaaactccggggacaatgcacctggtcatagttcaaaccagactaatatggaaactaatcctccagttggtgtggccacaagtcacgcccaagaaattttgcacaagaatggaaagaatcatgctatgattaatgatatgatggaaggtgatctggaaggggattttgttagtaataaagatggtgaagtcaatgtttctaaaaatggaaataataaagaaaaggggatagtgattggtggtaattctgaagtgactatatatgataataaaaaaagaaaggttggtgatgaggatagtgttggtcacgtggggcaagcccatattggtagtggactctcaaaaaactctttagtggcgggccttggtttgggggctcgccaaacattatgaaaatattaagctggaactgtcgtgggctggggccgccacgtaacattcagttcctaaaagaggtgattgaccaaaaaaggcccaaggtgttatttttgtgtgagacattaagcaacaaggagaaagttaatatggtgagtaggaagttgggttttgaagggtgttttattgttgaagctcagggtagaagtgggggtttggcattattgtggaaaattgaggaagaagcggtaattgattctttctctgcaaaccatattgattgctttgttcattttgagggttatcctaaatttcgatttactggtttttatggggagccgaataggagtcttaggaagaattcttgggagttgttacgcaccctacatgatcggtttcaagaagcttggtgtattatgggggattttaacaacattttgcacaattctgaaaagaagggaggaagagcttacccgacttggcttttggatggatttcaagatacggttcgccattgtggattgtgtgatcttgacttgcttgggcacaaatttacttgggaaaaaaagtagagacacccctgagtggatagaggctagactagaccgggctatggtgaattttctgtggttgactcgatatcctgaagcaaaactattcaa

SEQ ID NO: 196389 - DNA, 567 bp, Cannabis indica
aaatacttgataactggcagattcgaaatgaaaaagcacgaaggtatcttagtagcatgcgaagaaaacaaccggttccattctcacaaaagttccctaatgtggatccattagctcttcgtttactggaacgcttgcttgcattcgaccctaaagaccgtccatcagctgaagaggtattgtaattgtttagctgtttcgaaagtattataatatcttatgttgttgtccctttattcttccaggcactagctgatccttactttatcggtttgtcaaatgtggaacgcgaaccatctactcaagccatctcaaaactcgaatttgagtttgagcgtaggaaattggcaaaggatgacgttagagagttgatatatcgagaggttcggccctgttgcttgaaacttgttcatttgctagtgccatggtttcgttgtaacttaaactatgtttgaatcaaacagattttagagtaccatcctcagatgttgcaggagtatcttcgaggaggagagcagactagcttcatgtacccgaggtcagctaaagatcataacttttacgaaa

SEQ ID NO: 196390 - DNA, 1055 bp, Cannabis indica
cacaccttttcttattcatgcgaacagctagaattgatgttaagaaattcaattctcggagggcagttccagtcatcgtattgaataaacatagacgacggggcgataaagatggctgtagcaagaaaaaggcaacttgtactataagtacagaaacaaacatctccagataagaataagatggtgcactataagcacctgttcaccagctccaacaatggcaagtagactagaggtaaacagcatttcggcaatagtaaaagctccaatagctgaaaacagaatgcaatcttttataaacattctcaagcttttcattcattgattcaaacaatattttatacattatgaagcatagtgatacttacagcctcaaatgagaactcagcaatgcctaaacaatacttcaatcaggtctgataaaacagagcttaaaattattccaacattatccaattagagaagaacacttacaccacattatttaatcagtggtgggcctaatgaaaatcaataaagtacctccctttccctatctattcacatgcttactttcaatttcaaacacaattctttggctcaaatagttagtgcaattagaaactaataactcaattgtatatttcttctccttcttttccaaatttttcacatttaagatttattcattatccaaagctgaaaacacaacacatttcataatttttgagaataaaaaaaaaaagttaaaaggaaagaaaagcttgaataactctgcacaaggtcacaattctctataagtgtaaaaccaaacctaacaatatactcaataatgacttgcctcgttcgaagaaaagccgtccagtattcgaatcatatatcttgatgccatctctagttccaataacaaagcaactgccaaaacaggtataattaacatctaattcgcatgtattcaaacacgcacaacaaatacatcaaaattatctgtttctgtttcccgagaaaataactttaactaaaaaaaaaaaaaaaaaaaaaaagaaactttcgtacctggcgtcctgattgaaaga

SEQ ID NO: 196391 - DNA, 1019 bp, Cannabis indica
gaaccaacattcattatttgtataacatagagtttaagcatccattttcaacagagcaatcaggcaacaaacttaagacaacgagtatcattatgtatagtctggcaacgacatgaacaaaagcgtataccacacctcacacaagtatatttagcagcagaaccacaaaccgtacagtaatgccggcgagaggttgagctcggaggtcctacagcggcctttagatacgagggaacattgggaggcaaagattccaaattggcctgttttagaagaaacaagatgtatcagtgaaaagcaataaaacaccacttatgaaagccacattgaaaaaagaaaaggatatgcagtcagcatttcaattgttctttttacctcatgtagaagctcaataaatgatcttggagctttcctagcctcgagggcttttgcttgtcgtgttttgcgcttcatggtcttggaatgtttcttttgcatgtacgctacaacagaggccataaaaatttaataaacgagtacttgcagccattggaagacatgtttcaatagcagccattgcccaaagaaaagaaaaatcttgtaaattatgtatttcagagcaaaaaaaccagcaatggaatcaatcaatcccaaacatcagtaatgtttccctattaaagagctagatagttatgttatagcataccaaaacccattaaaaagcaaagtgtgttgtggaatagaatccctaaagattgaaactttgaagcttgaaataatcaaaaaaggtactttcagtgaaaaggaaaaataaatcctgaagaaaataggaatatttcagtgtaggggagtaccatgatcgtcttcgtcgagagaatcctcgtcttcgtcattaacttcaactgtttcaataccggcattatcattctccaaggcttcaagacgagctagagctgcctaaaacgacagattttgtcaaacactttcactttcactttcactttgggtgtcggcaataagagataaagagagagagagag

SEQ ID NO: 196392 - DNA, 5426 bp, Cannabis indica
gaagaagattaaatgaaaagaaaaagaaagcaagaaccaaaaaaagcagatcctgtggggacgatttgagaaatcataccaatgatcgtatttgtggaagggaatcttcaagtgacaaaactcaatacttgaaatgcaaagtcgaggaattgataaagatcatagagaagatttctaaaagaaatcggaactgtgtccgattcagaagaagaatacacagaaccatgcgtgaaaagaatcatagatgaaccactgtcggagcacttcagaatgtcccaaatggatttgtatgaaggcaggacggatcccagagaccacctgtccaagtacaaccgcacgatgcaagttgctaaggccagtgatgatgtaaagtgtctctacttttcactaactttggccaagtccgggaaagattggtggaaaaggctatctccgggatcaatccacagctggagggacctataggcaatgttcaagaaacaatttgtaggagcgaagaactttgatctggaagccagttccctgaccagtgttaaacagcaaccaggagaaagcctgaacatgtatattcaacgtatgatggacgttgcagcaaaaaaaaagtttcagatgatatgaaaatggtggctttgacatcaagattaactactggattcttgctatggggagatctccaatgcaaaagagcagagactttgactaatttcttaacaagagcccaaggattcattaacttagaagatgcttacgaccaagcttacagagtactccagcaccttccaccaacacagtgactacccaaacttcacagatgacaactccatcaatttatcctcctgcaactacctttacaactcctacaatttacggacctagtgcttccgtgtagccagctacacaagctagtttattcggatttagagctgtataaactagatacagtgctgctcctggataaatgaaccaaaaagtggaagctccagagtccaatgtaagctgatcacggagtaaaaggagttccaagggtccaagtcagaatgattctgcaaacaaagggaaaactcaagagtcaagatactccaagtacacaagccttgtcgatactcgagaaaatatctataaggcaacttgtaacatggtccattacaagaaatatctgccaatgtacaaggcaggaagaaaaaaaaacgagatccaaacaagaggtgcaaatattacgatgatataggacacaccaccaacgagtgtgactatgagggatgaaattgaaggattggtctgaaatggtcatctatctaattgggtaatgataccaattatttatgctggacaggggttgcacatggccaacttttattcctggacaacatggagctattaatccttagggagtaggccacccacaagctcttggaattcaagctcacaatgcacaagcccttcacggggtgcaacaggctatagcagcaagacctgctatagctcccagtcctagaaatccatatccttctggagcagcccagccagcactagatggccacgttgcaacctctggtggaccacacatttccgaaagcactcgaaatgcacaaaaaaaaatacttgaatgagttagatcaagaaaaaacttgcaacttggtacaatcatctgcttagcatcctcggatgatgaatttgccaatgactttcacaaaagatgacgccaagcatgtacattttctgtacaatgacctttggtgatagaagctcagattgcgaataaaagagtttctaaaattctcatagataacggaagcccctttaacatcatttttaaagatgccttcaaagccgtcggtcttatggaagcaaatttattaccttgtccaattcaactgcaaaatagagacacattgattccaatcagaaaaatacaacgttcaatgacgataaatgaagaagtctctagaagcagtgtaatatcctctttcaagtatagtacctttgtggtagttgactgtccaatagcttacaacgtcattttgggatgaccatttttggtttattttggggcagtaacaatcatcggccatctatgcctaaaattcctaggtgataccgaaagtcgaaagtattggcaagaagctgctataaggtttcaaccaaaacgattcttatggtctgggaaggaaatatagcagaagccataacatcttcttactcagcactgagggtggtccgtgaagaggatgaactagatccatgggttggtgtggaacgagtaattgagctgatggaagaggtagaagaagatgcattgatgatgaggataccactaaagttatcaaagtgggaaagaatctacctcaagttgttaaagaaaagattatctccagagtcaaatcaaacagtgatgtattggcctggagtcattcagatatgactggaattagttatcgtgtgatttgtcatgaactgaacataaaccctaaggcaaatctagtttgacagaatcgaaggcccatagatccagtgagggcagaagcagttaaaatagaagtagataagttgaccaacatcgacttgcttagggaagctctatatcccatatagctagccaatccggttttgcttctaaagcctaatgggacatggaggatgtatacagattttacaaatataaacaaagcttttctaaaatattgttttccacttccgtgaattgatcagatggtcgatgcatcctcagggtatgaactcttaagctacatgggtgcatactccagttacaatcaaataaaaatacacgtggctgaccaagagcatacaagctttcaaactgagaaaggcatctattgctacaaggtcatgccctttggattaaaaaatgtcagagctacctaccagcgaatggttaataatatgtttaaaaatgtattggggaagaacatggaagtgtatgtcaatgacatgttggtaaagtcaaagacttccatgagccatcatgaagattaagaagaagctttttccattatccgagaatatggaatgaaattaaacccaaagaaatgcatttttatagtttccttagggaaattcttgggtttcatatttagttctcgcggtattgaggcaaacctgaagaagattaaagctcttctaaatatgccttcacccaaaaaacataaggatgtccaaaagcttactggaaggattgcaacacttaaccgattcgtttctaaatcaatagataagtgcatacctttcttcaatgtgcttcgagggaacaacaactttgattggacaactgagtgcgaagatgccttcagcaacttaaagaacatctaagaaaggctccaatattgtccaaactaattgagggagaaccattattcctgtacttggcagtgtcagatcacactataagtgccgccttagtgcaagaagaaggaaaagtacaacttcctttatattatgtgagcgaaagattgttgggcacggagtccagatatcccatgattgaaaagttttccttttgcttgctaattgcttcacggaagttaagaccatactttcaagctcatgccatcagggtactgaccaaccaccctctccgttaagtattgcagaagctagagtcatcaagaagactcttaaaatgggcaatggagctaagtcagtttgatatccaatatcaaccaagaatttcaattaaaggtcaagccttagcaaatttcattgtggaatgcacgggcacaaacaacgatcctgaaatgtccatcctagagctagaagtctggaagatatatgtagacagagcatcaaatgagaaaggtttctagagcgagaatcattctaatttctccttaacaatttcagcttcaaattgcactctaatttgaattcgaagcttccaacaacaaagctgagcatgaagcaatgattgttggcttgtagttagctaaagaagttggcgccaagaacattgaactatacaataattcgaagttggttgtcaaccacgtgtctggagaataccagacaaaaagggaaaagatggctagttgcatagtaaagaccaagagctattgcaatatcttaagcactattttgcgaaaaaaaatccctagggataaaaatgcattcgtagacatgctagctaaattagcaacatatctagaagtagataaatactgactagtccccatcgcccatctactcactccaagcacagaaacactgggggtgtcagttattgatcactcaacttcttgtatggctccaatcctaaaatatatggaatttggcacacttttagaagatagagtcgcttcgcagaagatacaatatcaagcccccatatatgtgattatggatgaaaagctatacgaaagagaattatgatgccatacttaaggtgcatagctggaactgagataagcattgtcatgcatgagatacaagaaggattttgcaaagatcacacattcgaacccagtctttccaagaaaatcatttgccaaggttatttttggctaaccatgaagaaggattgcactgagtatatccttaaatgtggacaatgccagcgttattccaaggttccaagagctccaccaataaaggtaaccctcatgaacagtccttggccttttgctgtttagacaatagacttggtgggatcacttttaaaggttgaaaatttaaaattggggaaaaagtgataaatagagtcttataagggtactaatacctaaggtggctatccgtgtgaagaggaatgaatgatccacgatcatatctataaaagaacaaatacatccgacggttggggagtctagcagtcaagcgtgtcaaacaattaatacgctctagaatcaaggtacaaatcaatgatgaagatgctatttattagttctcgcacgaaaaagtgaacacctatcaaaataaaagtgtgcccagaaagcaactcctcaataaacgtgctcctctatcaccagatgactaccacgttaacctactacgactgaggatggaaattcaccttccatgatcgattaacacctaaaaagaaatgcaagattacttttaaacctccacatgtccatattgatagaattgggcaagcttccaccatacgtagcattctgaaagcttgggggtaaatgttatccgtatttttggcaagggacatgtggattccaagtcagcaccaaaagcccacaagtggttcccaaagaagataatttaggccaagccaaagccatacaagaccttataggaacgcaccttagctccgtgacaagatgagcttctgccaataatagatcgtatacagaagcagctctagtatcatgatgcccgagggttagtatttttggcaagggacatgtggatgccaagtcatcaccaaaagcccacaaatggttcccaaagaagataattta

SEQ ID NO: 196393 - DNA, 3355 bp, Cannabis indica
tccagtgttctgaaaaatcagggaataaactttcgaacatataattaagattatattccactgtgctgacaacactataatcattaacaaattcatatgttctggacttaaatagaattcatacattatatatatatatataatcatgaaaataaatcatgtgaaccatgcaacataaaatgttatttctgatctttattaataagtaaatctgattatattgaaatgggttttatttagggcacaaaacccaacaagtttcccatgcatggtttcataaactaatattagcactattattctttaattttttatgttctaaggctgacaactccctttttgcatgtcacactgctcaacacacactatttgtattagtgtatgttgatgatatttttgttatagggagctcaactgatgtaattcatgccctagtgtctcagttgcattcttcttttgcattaaaatatctcggtaacttagcatacttccttgggattcaagtgcatcatacacaatcaggtcttcatctatgtcaaaagaagtgcattgaggatcttcttaccaaagtcaatatgcaggaagccaattcttagtcaaaacctatacctagaggtgaaaaattattagcttttggtaataatcccatttcatatccttttctgtatagaagtacagttggagcacttcaatatgccacaattacacggcctgaaatcttatatgcagtaaacaaagtatctcagtttatgcaaactcctttagagtctcattagaaagttgtcgaaaagatactgagatgtatcaaggattctttagaccatggctttctcattcagccatcttcctctctctccctcactggtttttgtgatgcagactgggcatcagatccagataataggggatcaacatctggcttctgtgcatatcttggtcctaatcttgtctcttggtcttcaaagaaatagaggactgtttcgagttccaacacagaagctgaatatagaagcttggccaatgctacagttaaagttatgtggattcaagctttattgatagaaattggttttaagcttcagcatcctccaacaatctagtggacaaccagagtactgtgctaatgttagccaatccatttttgcactcaagaaccaaacatatagagcttgacctatactttgtattggaaagaattttgtccaagtaactctttgtcaaacgcactccttctcatgattagatagctgaaattttaacaaagcctctttccagcacacggttgttccttttcaaagacaaactcaacttagtgttcctaaccaagctgagcttgtgggggtgtttaagactcattatgagtctgatattttctgttatttatacagttagagttagttatttgttagctttttgtcttcttgttttggttagcttgtaactaacttatacttgtatatatacaatgagcatatttctcatatcaataacaaaattgattttagctcattctctctttctctctttctttctgttacattctgttactctcacacatatcttgtctcttctcctgcaacttaatggtggtttgcttgtgttaagtgtacaaccaaagtcacacatttgactcgaaatgggaaacatcttaggtatttaaggatgaacactatctccataagattgatggggttttcatcgacaaatttctcctaatgctgaactctactggtcggatggccgccagcttctgacgtctccccatttctcgcagtgccccgctgggcatgcactgtgggaggtgggttaacgtcatccatgacgacatcttaaccttgggcaatgggttatacaacagtggtttttctggtagccaccattgttataaatacaacatagcttcaaatcttcaaaatatttactgagatttttgaaagtcgaatataaaagagttaagaaattaaactacgtaataaaaaataaagatggatgtttttacgtggtctgggtgttaatgaaccctagtccatgagtcaatcatatttgactaagtagccttaatgtattatagtggagttctttacaggcttaagaaccatagcttcttgctatagtgtttacacaatgaatttccaaccctttacatgagggtataatgtggtatttataggttagaatctgggttcaaatatatctatgacccgctagggtttgcatgtaagtatgacccactaataaggtaaatacataaggtatgttacctttgggcccacgaactgaggcccaacccatggggcggaggcgattcgtatgcttggggaccacgcgatattgatagatggcttgcgtgtgccgctcttgtgtactgtagtgtcataatagtggttgtcgaacaaaagggagatttccttttggtaggactcgtatccttaggctcaaacacagggcacaatccttgattcagtgggattcgatgtcactgggtcatcacgtcatcatgtacaaggattttgggatgcctcttcaactgcccttccatacgtatcccagatgctcatccgaagggtctcaactgcttcttcatattcgggcaggatgccctttcggatccaaagagatccaatcttggatataagtatcttgggcctcaggaaggtttgaggcccatccttccatacaaactagactagtagtctcgctagggcctttgaccaaggcttaaatgagtaatctcgcattgggaatgccacgtatccccttccaaaaatacggataacagcatttatctacaattttgttgttgtactaaaacaccaatgttattggttacatatttcttaaatgtacagtaataaaatttttagaaaaaatcactcaatatgtgtaattggatatatacattattatgtttgcgaaagaatgtacatattatttgttgctattacaatgaactataatctttttgatgaaaaaatagcaaaagaattttagagaaattctccaagtttttgtagcttttgaacaaattagagttggaagaaattgatttgttgctctttataattatctattgcagcaatatgttgagaggaacgaaaaggttgttgagcttcaatggtgattttgaaggttgtgtttctgtttagatcaggttaacgaattttttatttttagagcttcaatcatgatcttccatgattaaaatcaaattttttgttggttgattatttgtttttttttttttttttgaaaaattcagtttcaattttttggttagatctgtaatggtaaattgaaagatggaagatcatgtgatttgttgatcagtcgctgtgtttggctcgattattaaaat

SEQ ID NO: 196394 - DNA, 1969 bp, Cannabis indica
cagaagggagaccgcctgattggagattatctactgtttatttttctattttgaatttgtctaaaaaaactgctaagttgtgttttccttttcattaagagatgtttgaattctgtggccgatggtgtggcaaaaaacactagaatctctagtgatattgttgttttgtatcaaagggagggagtgccccctgttattcccatcttttttctagttaattgaacaagatgttctttcaaaaaaaaaattaaactttaataatacatgtataacttggattaaatatgacaaattaaaaattgtgtcaaattgaacccaaaatataatataaatcaaatttatacgataataaatattacattttttattatttatttgttgattattcattaatgtaatcgataatcttttatatatttttataaaaaatttatatatattttcaataaaaatctaaaatttttattgactttttaagttaattttacatctaatataatggagtacaactgtaaaatttcgactaaatatagcatttggtttatttttttttgtagccaaatttaacacacattttacaccatagatatggtttaagacttaatgaaaacagtagcaaggctagcatatccaaatgctgctgaaagcttcttcaagtgccctcttcctgcttagttctaaactccaccctccagcccttcctcctctctcggctcttagcttcaacatctcctcatcgtcaatggcataaccgtggatgtcagtgctcatcccgagcggcagcggttgtggggccatgccagtaggccgtggttgtccacctgcaacagttggagcatactggccttgtgtactttgtcctgtttgggagctctggcttggaccctattcaaattacatagaaaacgtaatcagttatcacactaatagatgataaccaatattctacacaatcttttcccctttacaagttaatgctaattcgaatctgacaatccaaaaggaaattcattccccaactccactagaaaatgatgcaaaactattgcgtctttttaaggattacattgaaatgaaacatagtcactatgacactatcattaacttcatactcaccccatcattttcagattgagtaacaggtccccccctacttgctgccatagctgcagctaattcttcagcctgtttaatgtagagtcagaatgaataatctagtaggagttatggtaaataaacaatgaatttggttattacaacactaggaacacactttcttgtttgtcatttacaaagttacatctaatgaaaatggccagacttagaaacttattgataagagaaatttctaagtaccttccgtgctcgatttatcattatttgctcagcattttcttcctggtaccgtgcaattttctcttctatagcagcaacatctataccgtcgatcaaatcaaatgctgcaacaaaaacgttttatcttttcttgtgagataacaattacatcaacaagaattccatatcaataaataacaaaaagaaaaaattggaatgggggcaattaatatgaaacactcactcatgtcctccacttcctccaaatagtcattgtactctttcaacgatggaaaatcatcttctctcttattaaatctaaaatatttacataacctcattatcagtacatgagacaattgcagtttctacaatgaatttaagataaaatgtctgaagattatgtggaaaaacacagtaagacggtggtgtatttggttagagtaatggaatagaatgaaatcaatttttatccattcatatgtctagttacagatttaagtattagaatgttattccaaatggagtgactttccactgttctaatttttttgtggaatggccaatccttctaaaaatgggaggaaaggataattcttttaataatttaattttactcatattaaattttatt

SEQ ID NO: 196395 - DNA, 1016 bp, Cannabis indica
tatctgcaagggtttaagatgccaacaacaaccaagtacgatgggagtacagatcctggggtacacataagtgacttcaacacacttatgcgtgcccaccaagtagttgacgacttgagatgtgtgttatttcttgtgacacttacgggagtggccaagacttggttcaaaaaatttaaaaggcattccattacctcttgggaccaactctcacgcgacttcaagaaagaattttatgccgccaaggccagaaatttagaattttcctcccttgccaatgtgaagcaacaaccaggcaagagcttaagagcctatatcaatcattttaatgctgaagccgccaaggctagagacgttgatgatagtggaagacttatggcgctgggggtaggaattactaatgggtcccaattttgggatagtttgtaatgaaagggagcacgcaccatagatgagttcatgaaaagagttcaaaaatacattaatagggaagaggcaaggttggccaataacctccctctttcatttggagcaatagaagctactcccacttcaacaaacaacaacccctccaatgcaaatacttattgcaaaaggaaaaatgaccatggtggggaccacaacaatgctaagaaagggaggactaaccacccactttacactgtcttcacaaaattgacgaaaacgccagaaacaatcttcctcgccaatgagaaaactgtgagtttcttgtgttgatattggtaatattgagtaggtcttaacttgcttaagtttattcctggtggtcacctcggaaggctcatgatcaagatcaagtcgtttttcaagaagtctactcaccatatacgcatccttcgatgagtttctcgaggagaggtctctatatgaacctgctcgatcatagaaacctatggccaagtcaaaggcagttgttatcttttactttaaatatgggcggttatgtatacttctcgcctacgaatcagagcatgacacaaaaatatctgggcttg

SEQ ID NO: 196396 - DNA, 1273 bp, Cannabis indica
tctctctctctctctctcgataaactagcaaggagttgagttttccaactccatttttgggtgttctagcaagaccttagtgtgtctaagtcaaggtaaatcccttagctcttctctctttggtttcttaaagttcaagttaaggtttttggcatgattttgtgaattagggttctgtagtttttaaagttgtttgatttggtattttgaggttgattgagctgttctgggttattttgttggttgttgtggtgtgtgagcaaggttggagtttaaaagctcaaactttgctcttacatggcaattttttattctgagcatgttgagttattttgttgtataaaatatgtttattatggtattaatagcaggtctggatgttatggaaaagtttgggtttgatttgtggttatggggtgagtttatgtgtatcttgcactgaaccgaaattccggtttagggggacctgtaggaactggttgactggttggtccccagaaaatcccacaaaatgggaagatcagttggggcatttttaggaaccctaatttttcctatttttgcgatatttagagtattgccatgtttttcatcgatagagaaacttttagtttcaagtttaagtcctcgaaaagtgatttagcgtgtcatcacttaccagttttacaaattatgtgatttaggggcctgtaattcgtcgagcagctgttccacttaggttggccggcacaccttaatttatgtaacgaggtaagattagtataatgatatgcatatgtatttacatgtttagcgtgcatgttagtgaagcctgttagattacattataatagcgttatcagtatgtttagtattatactggatatcgataaatgtatgttggcttaagtgctattcgacaatatcacatcggtacgactagagtacgactaggataccgagtataagctgatattatagtcaatagtactgtactacttgatagtatcacatcggtacgactagagcgtaccgagtataggctgatattatggtcagtagtactgttgtatgattgttctactcagcaccgtgttggacacggggataggcttgtgattgggtgtatgggcgcctgattataatctaagttattgctatgttattatttatgcttttcttactgagtctgtcgactcacagattttgtttgcatgtgttggtaagggcataaggctaaggttgagcagccgtgagagcagcagatgaaaattgtacatgttgggggcagtta

SEQ ID NO: 196397 - DNA, 1525 bp, Cannabis indica
gtcctaattaaaaagaaaatatatatatatacctttctcggccttttggctaagatcaagttccattgaaaaaaatgtacatttattttttaaaaagataaaatcattttaatttgataattacatcaaaaataataaataaaaagttcccgacaaatatatatttataacaattaaggacccgaaaaattaaataaatttactttaattacatatatttttgaaattctactgtattgtaatttttatttatagtaaatatataaatacaatatattttttacattatttaagtctttacaaaataaaaatttaggtatgactgattatatgtatatttattgcatgtaaataaattataattttttttttatgattgtctataatttttttgattgcaaaataaaaaaaaaggtcttagagcaattttttcgaaaataattaaatgaattgtatataatacaattagtttttatactcaaatgataatatttagttttctattaatatggtagccatttatttaattttttaggctatgaaatattttaaataaattttcttaaaattgcatttccatataccatagaaactttatttatacgaaaatatcataatttttaagaggaatatattaaaatgtcatagaatatgtattttttttttttaatatactcagtaattagaaaataattagttacgagaagagagaagaagagatagaactaacagagttaatcttgaaaattgaatcggttaagtaggaaaagagaaagacacatgcatggcagctatttattgaagggacaggaatgtgactggggatagaagatttttttcccaaaaatactatcaggattattaacaacattaatgtcatcatctttttagtacttgatagttttagttttttttatttatttatttataaaagaagcaaatttatgggaaaaaattgtgttttcatcacctattctaagccatttgaccatggctctttgatgccattaagcttcttccttctataacaatgtatcaggcaaagattggagatgttcaattttattagcagttttctaagtatatcgcagtgaattttgtagactagcaatatcaggcaaagattggagatgttcaattttacaaaaggcattttctaagtatacattaatcccaaggaagattacataaagcagaatattctaacaaaatgcctagggattaatgtatcctacatgtgaggaccacagggacacatgtcacaccagtgaaagtgagattagatgtagcaaagaacagaataagactctgtacaccagcaatagaaagttggaaaatctcatttctcaacattattaacaaaatcagatatgttattctaattactattaagctccagtttaagagattaatgattagaaccaaaaagaataagtgatgaccagtagtttttgagtgtattggatcacaccaagaataacttactacttctagattagcctttcattatagaattattagtcaa

SEQ ID NO: 196398 - DNA, 629 bp, Cannabis indica
aaacgttactatccatcttgattgagttatttctagaaggcacaaaattacccaagtcccactattagtcaaagatgaagttgtgtaaccttagtttaggttaagattcaattgacgtatgcaagcatcatgtgccttgatttggaaggataatgagaagaaagatttatgtcttgatttggagaaaatcgttcgaaaaaaagaaagggagaccgaaagaaggttgcctgacaagatatgcggtactttcccctaacttcaggactgatgaggttataatgtttaagacattcaaccaaggacatgtggcattattctaagtgacccaaagaggacggcgtgcttaggcatcctgtacatgcaaaagagtggaagtgatttgacattcgacatccatcctttgcacttgaacctagaaatatgagattggtttggccactgatgtcttcaatctgtttggtaacatgagcaacgcttacatcatgtgatcggtgatcttagtcccatataacttacctccttggtagtgcatgaaagcggagtcgttgatgttgtttctacttattttaaggtgtaccaccccagggaaagacatggatgttttcttgagaccattgattgatgaattg

SEQ ID NO: 196399 - DNA, 1186 bp, Cannabis indica
cgatttcaatggactgatgattgcgcgaaaacctctaagctataaaacatcaactatgcaagtcattgatcttttcaaaaccagtagatgttgaagagttattcatctacttggctatcactgagcatgcagccagtgctgctctagtggatgagaatgaagggacacatcgcccggtgtactatgttagtaagtgactcattggagccgagtctaggtatcccccccccattaacgaagctagcttattgtttagtattggactccaaaaaggtaaggctatacttttaagcccatccaatcaaagtgttgattaaccaaccactcatgcaagttctgatgaagccagaagcatcaggatgtctactcaaatgggttgtagaacttggtcagtttgaaattgcctatcaacctcgaacaacaatcaaaggccaagcattaactgacttcatcgctaaatgcactagcctctaagaagacaaccccatcatctgtcaataccagaaccacatgcttgagactgtagctcaagagagttttggaccttcttagaagctctacatagatggggtcctccaataggcatgtcctcggtgtaggtctcatccttgtaattcttgaagggtttcacactcacaattccttgtggtttgagtttaatgcaaccaataatgaaactgagtatgaggcactcctagtaggacttcaattggcactggctgtcaaagctggatcattagagatttatagtgattctcagcttgttgttaatcaaatccttcctgaatacaaagcccaagggctgaagatgattacatacttgagcaaagttaaaaatttgttatcctagctaaaacactactccatttagcaagtaccacgttaagaaaaaatgaatgtggagtcctagctagctagtacaacagattctcattgaatacctctctaaacaaagcatcagtgatgactcggagtctgttctcataaaaaaaatagttcatcatggataaccttgattagccaatacttagagtaacgttttctcccaacagacagcaatgaagctaagaaactaataagaaaagtagctcgctttatcattatggttggactgatgaatagaagaagctactcaattcctcttctaatgtgtgtcacaacagacactactagaaaaaatacaatt

SEQ ID NO: 196400 - DNA, 845 bp, Cannabis indica
gggtcattggcacatcaatagcaatatcctctttattgttcgggggaagacgtggagccacaagaattttattagaggttttctcctcttattgttgaaccttggccggaagagccaccgaccttcctctttagcatggcactaagtttgcacgacatagctacatggaaaaaatgacttggtcaatttccacaaaatacacaacaaaaggcaaggtgaaatccttaaaaaagtataccctggaccactgggggagcatcctcctagaccactattcaagggacgtcgtcattcgaagagtcttctctcaactcttccttaatgatcattttgcctttcccagcaacaacctgcacaatgggataggaaacctcctcggaaacttccttgatcacaatgggaacttcagttagttcttgtctttctctttggcttcaatacttcttgaacaggagtagaagctagggctataggaatattttcaacagtctccttagatggaaatagtccgtaccaataaatttctccattgtggccaatagggatttattacgagacctactaagcagccgaagtattacttgtgcccttgaccgcaatcccaaagtgaaaggtggacagtaatatgtatttgccagctggaaggataagtggttagcctccatctcttgtacgttgtaataatctttgttgtacccacctattttggtgacctccttggtcgtcgtgccagtcagccaagaatgttccacttaagaaaattaaaaatatcctaagcggtggtgacccgggctagactttagctcaaaaaaccaattagtatcatgaggtgaaggcattcccca

SEQ ID NO: 196401 - DNA, 1253 bp, Cannabis indica
tgtggtagtgttaaatactatcggtactttctaacatttctttttatttcgttaatacttaaataatcatttcaacaatcaattgataacaaatacacgaacttgaattgataataatattatttttataactttttctattatttggatgaaattttgaatcaactagtaataatattttaattacacctttacattatacaattaaaatcttggtacaaaatttaaatctttcaacctaatccatgtggaaattaatagattcttatgtactaataaacacaacaaaatttgcattcctgtgataagattaagttattttgtcaaaaaaaataaagaaaaactcttaaaagttttcatgctcgagtttaaataaactcaatttgttatatattattgggatttatttgttgaaatattaaagttgtcgcatgcttagaattttttctgtgtcatattattataatctaattaaatattaaattttacatattaataattattataaaaaattagtaccactttacaaaatgccacctccataatttacattcttccttactaccaaaattatttgttatttatttatttgaataaattatggaattttattaatgacaattagttaaaataatggtctgcaattcaattggaatatctcatcggttaaagacatggccaagattagaattagaaaaacaaatcaaataatcagtatcctaattctcacagattgtctgacaaaaaaattaaaataaaatcatatgacaaagattgcactgttaccgttaaccttaagaacatctatattcagtttcatttatcgctcagaagacataatagtagaaactttagcagcaagttcaacctcgcagtattgtgtaaggtacgtaaccgcactaccaacaaccccttcagtcgcaaaaacttgttatttccaaccactaacaacgttgtaatgacaagccattgaagaacaaagaaccaacaccgaaacaaaacaaaacaaaattatttcacattgacaagactaaaacacttaaaaccatatcacacaagcaagactaaaacactcaaaagtatgtcacagagacaagactaatcgcactaacaaaatataatctcaaccaagccatacctaagcccaaaaaatgccgacgggtgtggccggagaaatttttttcccctaaatttggattcttcttcttgtttttttttcaactaattccaaaattgtttgttattaaatctgt

SEQ ID NO: 196402 - DNA, 803 bp, Cannabis indica
tttaaagtttcttatggcattcctgatgatctttttccatatttgtaagtttttctaaaaaaataccatattttagggcaattaagtttttatgccatatatatcaaaacatatctttcatttttccaatatttttgtaaatagccctttttattttttaaaaccaacaaaaaaacgtctctatacaaataattgagaattataagattataaatcacatgcaatgtacttgttcttgtacggacaaacttgttgttgtatagtatatacatacaaccaagcacttaattattgaaggtgtaaattattggttgcaataccccaaagaaaaaggaacaccaaacaaaaaatataaaaaaaataatttatactataaataataagtacttaaattatatttttcataataaaaatatatttcatcattatcgtaaatacttcttcgttttcttttttgtgatttgctagatggcatgtataccataaatatcacatcactaccattacttaaaatgaaccaatgccatatttttttagaaagacataatttattaagatcaatttactattacagaaaaaattaaaaattgtagacgtacaagcatcccttcaaacacacaatttcataaactaacaacaaatgttgctaaattaatttgtgggcaacaccatttactgagcgcacaatggcactgtaagaaccaccaatagcaattaatgaagaattaatatctcataaaatagactgaaaactaaaattcttgtaaaacttattaatctaacaaattactattgtaaaatca

SEQ ID NO: 196403 - DNA, 1772 bp, Cannabis indica
ttatttattattttaagctattttttatttgtttagataatctcacatcgtcaatatcgaaagataatagaataatagaatatacaagatgaattggctactccctttatgaatttgaaataaaacaaataaaactcattctaaattcttacataatataagagccagtcatcttaattggtaccttatcccaaattctacaggacaaaataaataaaaaaaaccgctactcctctcaaattctaataatattattaagcactactcgtgcccaattctaaataccaataacaacttgatggtgttgatcaaacacgaggactttgcacattttactgtattatatttcttactataaatattatgatgtttgatcattagggttagtatacagtacataatcctatctttgtcacgtgacaacattgattcattactcaatatgtatgttccgtcacggtgtcaccaccaccaattgtaattgaaactttatatgttaaaatatattaattagaaaacgtagttaaattaattgaataagatatattatatgagagaagtgtactgctggtttgttgttgtgactcaggcttatttattttatactggtatctaagactaaagtcaacaaaatataggcattttaataataaaatttgaagcaaaaaggaaagaaagagggattgtaagttttgatgaagagagactcatacgaacgacagactaccttcctctcaaattagctgagtcaggtcaccgaagctgacgagtgagattaatgtatggatttaattaaaaaagagattaatgtgtggatcgatcaaatgggccccagcccaatacgcatacttttgcttttgggcctatactgcgacgcgtgtcgtttaaacaaaataaataaataaaaaataatggaaagcgaaaaaagatcaaaaataaacaaagaaatggggaccacatctcgtgtgtggagacaaaaggtatctcttatctctgagtctttttgctttttgggtggggaccagtcccttggctcgtgcaaccacgtgggggctacacaacttagaaaatccacgtgtcgattccttattcattcacaatcgttgcttactcctgaaaaattgagaagaaggtgacgatttttggagagtaaccatcttgtgctgcactggcacacactattatcgtggacgttgaaaaccccatgacctggtagaccccgccacgtgacatatctgaagctcacccaccacttgattttacctttctttatctcaaccaataaattaaaaatggaccaatgagggctaagatatttaaggtccaaatccaaaataaatataaatgaattaatgaaggtgaaatagaatataaatatagtggagaagaaaagggaagggcaggggaaaagggtgtgacacctgtccggggtccatccgaggaaggtcattttgtcgagtcgggaaaatccggaccatgtatttaggtaaatttgtccaaaactgtttttaatttaattacttaattttatattgccaaagtagaaaaaaaacttgtggttaatcatagacccacgtctaattaggtatcgttaacgactaaaaatagtacttaaaacaattttttaattgcaatcttggattaagactaggatctaattatacatgtgataactgtgatgggaattggtcatatcttatatcaatcgactcagtcaaattttaagatttgatataatatatattaataatactaagtacttactttttaac

SEQ ID NO: 196404 - DNA, 1223 bp, Cannabis indica
atccaattttaaacaaaaactaggtctctctctcattctcatgtttactatatcccaatccattctttttttttttttttttgaaaaatcctaataatttattgactaaatattgtaccaaagaaaaaggggttaaagaatattatgaacagtcctcttttcctttttttttcatccaatcggtgtccataacatgatgtgtacaaattttcagcaaaataatgagataaaaatttgatccaagaagggctcaaatcaaaactggtgaagataaatattagctttccttttaattaattcttcccaattaacaatgtcaatgtatacaccacttttccactcttaaatcaatggtcgtagtcatccatacgaaaatcttctctcatattcacacttgaatgctgcaccaaccgcattaatgactgcaccacctccgatataggcggccgaaattcaaactccgtctaatgtgtcatatgagaggaatgttagacaaagcacatgaaatgagaaaaagaaaagaaagaataatccctaaacccatgaatgttagaccaattaatgagcagacggttctgtcatcgcaccaagctcaaacatacacagaagtgcatttggaaccttgcacaaagctcaaacttacacaaatgccaagcctgatcagggctttgcagaccaaatacaaatttaaataaaagtttaagcaaagccataagaattatccagtttgtaggaagcatactgcattggttctcacctgaacgcattgggaaataatatctgcaaagcgtgaaactgattttggtgggtagagtccacgcaaagcagggtccaccatgtttgtcagggaatcagaatcatggagccgcggtgtagcccatacaactagacattgttctgctcttggtctagaactaaagaaaatgcagaaacaaaactaattaagaatacactacttagtagactagataaacaccaataattaaatgaatacctgtcgaaaggcctacgacctgtcaataactcaagcatgaccactccaaaactatatacgtcactcttcagtgtataggctgatcttttgcactccggggcattgtatcctacaccaagattttggcttgtccgctgaaaaatttcaagtaatatttcttgcttattagatcaacaaacaggtatagtggcacatcagcacatggaatggaatgacatttaaccaacaa

SEQ ID NO: 196405 - DNA, 1595 bp, Cannabis indica
ccaagtcaccacacgggagagacatgaggacgtaaaattaagaaagttcttaggccaaatctcattgtaaagggtataaaagagaggtgttattgattgctgctagaaaatatttttaaaatatatcatacactacaagggaaacaatgaacaccaaaattaatcgaattctcagcttcttggcaagctaaaacgccaaattctgtatgtttaaatgtgcgagtaaatgtaatacacatgtaaatatatgaaagaaatattacttactttaataccagggtagtttcctatccaagaaagattaagtttgtacttcaatccatcaattgcttcatttaagtagtggttatctgaaaagaaatacataattggatgtttaggatataaacaaatcgcaggatgaaaggctaatttcaaatgtatactgtttacgaatttcacacataccagacaagtgtcttgacacacaaaatgtgtttggttctagaaattaaatcattctttttgttctaaaggcacttgaatgagctataagaaaattagtttctcaaatcctaataatgcaaattgattctaagttcaatatcaacttttacatttatgtcacttttataaagaatgtacacaggtttcctttcaaagctcaagtaccatggcaaaagttatcattttccatctgttaattaacaaaaatgtcaaatgagattgaatactacaatttgaagggaaagaatacattaggctaagagcataccagaaggaagaattgccaacttagcatcagtcatgttagaaaatatccgagatttagtcattgcatagttcatcattgtcttgtgcctttccaaatgatcaggtgtaaggtttagcactgcagcaacctaaaaagatgcacatatcgtttgatgatgtcacgatagaaaaggcaaagaaacagtaatgtaactatcacagaaaattagaaggcaaaacttgtaagcctcactcacagatggggagaagtacttgttgggaatgtccatttggtaactgctaacctcaaccacagcaacctgtaaaccatttttttttattataactctatcctactatttgatctcaaagtgcatagaacagattcaagaaattgacaactaatacttcctaattttttttttacctgaaacttgtgtcctgaagaagttgatggcaaacattgtaaagcagcttctgatagcggattcccaaggttaccccccacgaatgcctcgatgcccagttgtctaagcatctggctttaaataataaactaaatatgaaatgctgaagaccaaaatgcgcgaagaaatgtaaactaaagaaattgttcaagaaattccagtcaacaacctttgccacaaaatacttaaaacattaacaatgtagcttcgagaaacaaggctaaatttattttggaaaaatcatatcgccttcaactatgtaacaaacagattctcattaatatcttaacttttagtctgattttctggctaaaattcctactcttacaatgcaaaaattactcgtaaacataaaaaatttgaagaaaactttacaacctgtccagcaaacgtaac

SEQ ID NO: 196406 - DNA, 723 bp, Cannabis indica
atgaaaacctatactctacttgatattaaaacaaagcaaatcttccaatctcgagatgtcattttttatgagactatttttcctctcactgccaacatctctcattctaacatcaacactttttttcaagatccatgtctatttgtatttcaacccatatctcgggtccacacacacaacacgaactggtgtatatcctcaaccagcaccagtaatcaatacaacaaaccagatttctggtctatccatcacaccagcaacaattcagcatgctcaaactccatctggtatcatatctgatgcccccaatatcactacagcccctactgttgctgataacacatcgagcaatatctcaaatgctcccctcattacaacagctcctactgttgacaccaactctataaaatccaattctgctgaacaattcacaccagcagaagccatacctgatgacagtaatcaaaataaaataaaaaaaattactacatcaaatactcatccacttccacagtcgaaaagtggcagacctatcatcaaacctacacacctaaaagattatgtttgccatacaacatccacagcttttccaattgaaaaatttatctcctacaccaaactcagcccgcaattcaaggctactgtccttgcagcatattcccatgtcaatcctcgctcttattccgaggattcacaattcaaacattggcttaaggctatgga

SEQ ID NO: 196407 - DNA, 1546 bp, Cannabis indica
aaattatcatttatatgttgtgaataaaaggtacgtggctaaagatatttgtcacaaaaatcacaatttcttgtgactaaatctgttttttggtcacaatacttgttataactaaatctaaattattgacaactggtatctaaatactatgtcgtgggaaaattacgagtaaatgtgcagaatcaaatcaaacaatcaacgaaattcaaacaatcaaacaaatagtaaagacaagattatcaaatcgagaacaactatcgtatgaaaagtaggggcaaacagattattaaaaccagaaaacagtaaatacagaaaataaagaaattaataccaagatatatactggttcaagtcctatagatcgatgtgatctatgactctactccagttttggaacaccactgtaatccttctttattgattgagcaagaatagctacaatatagtgaagacgagattctctgttgagttctcactaattgtttcaactctcacacttacacccaagagtcttcttcatctacagaagattcttcttacaaaatccatgtccaatctctctcttttctctgcacctctctctctatctctctatctctcaatctcatctctatgagttctcaaactcgactatattgcttctctaaagggataagtgaagctggtatatatagacttatggatcaagatcataaagttggtagctacaagaaacgagattgttaagttagttaaaaataactaacttaaccaacttctctttgagcaaagtctccatgtcagctaaagtatcagggccttcgggaacgtaaacaaacttttgacctcgcggacaaagaatactcgctgaagacgattttgaataggatagagtctgctgaagttgactattcagagataatcattccatggtggccacaactagccaacaagatctccctcctagagtgaggctatttatcctgagaactggactcggagtggacatgatagacatccgagaactcccttctgaactcgactatcattccacaagactctttccgggactaataaccgtgagtaagcaattttccaaaaatgacgattacagagaccttttcatttggaagaactataccacatatgttttaatcacatgtaactttttattgtgactaaaagtcacatttagtcataaaaaatttatgatgtgactaaaaagttatcactaaaggtagttttttttgtagtgtctagaagacgaatcaaaacaagagaagtgatattgagcacgactttaaccacattcagaactttgtgtgttgcattggggcaattcaccacatgggaccgctacctggaaacaacccaaattatgtataaaactagggaactaatccgcgcttcgcgcggtttttataatagttttaaattttcgtaggctaaatcattgtataaaattaataatataatataatgacaacacaaatttttgaactcatatttttaacaattgtatatgctcacacataatattcatatattttatctatatatgttagga

SEQ ID NO: 196408 - DNA, 933 bp, Cannabis indica
aatctatcgtccacagtgtctaaaacttttaacgaccttttgcgactgtcgtcgtcataaggacttaaaacaatttcccactgttcaatcaatgtgtcatacacttcaaccaatgtttcgtttttcatacctccaatcacataaatcttgttcctcactatagctatgctagcttcagagcgcggtatacgcatgcttgggccccgatgccacgtgtgggaacgacaatccaatatccatacgtcagaagagcaaaggtgctcattcacgcggccaccaatggcatagatgttggggcccatagcagcataggcagaacccgtcaacttagacgggttcgcctggattcgagcaaattgaagacgatcgaggtttttgtaaatagcgaaccactcattcgtgtcaataaaggcgaaacgaaccttgaaatatagcaagttttcggtgaagttgaggagagatcttatggtgaagaactgcgaagaagatatgacagatctaatggattttgatacagatgagaggattgcatggtattgtctcggaattcgagctagaatatccaatgccaattcgtttgggaggcctggaatgaggatagtggtggccattgacattggagtagaaatttctaaaggagaaaaaaaaaacaagattatacaaataattataatttagtgtaaaagtaacacatacattaatactaaataatgaaatttgtgttactcaaaaacataattcgtttataattgtggctttatatatataaaaaaaagataatatctagcttaatttgattataaacggttaaattttaaaatatggattaaataattaaattatatttgaattcaaaaattaaaattaagtattattattattattagaagggatatttgtgaaaaaatctggaaaatttataaaaatactgga

SEQ ID NO: 196409 - DNA, 1190 bp, Cannabis indica
ctcccattgcagcagcctacacccaacacaaatgtgctcccattgcagcagcctacaccgccttatcacaatcccaacacaaatgggcccccatcgcatcagcctaagccgcctgatcaacatccctccatgtatgggcccctgtcgcagcagccccccatgcctaaagtttcgaccggcccagaccccaaacctcaacctagtctcgtcccggacaatacaaaagatgcttgtccaaaacgcgagcatacaactcaggacatactaggtaatgttatatttaagtgtttaaagagcttctataatgaataatgagtaactaatattaatgtcctcactactactctactaaacgcagatcatcctgagtcacaagctggaaagaaagctcgaaatatgtttttgggttttaatatatttgaaaagctcatggaattctctaaaatgaacaggctcaagagaagagctttctttgtaattcttcaacttatttatctttacttgaatatattatttttaggtggaatacttttagatttcttgttccacttagcatattcttcttttcatttttaacgagtgccttggtgatgatatttatttgattctttttcctcttacttaattttgaatttgcaggaaattagtgtttatatggtagaaaatgatgcttgtttaaaggcatttttcaatcgtatggatgttagcagcagaggaatgattaacatggatgaactaatagccggattcaaactttcacttccatgtccatctgttgatcttctaatgaaaattgtaagcaaacaataatttacactctctttgcattctgccaatagaacttgttagaatgcagaagggtgagtatatgataagatgtatgagttccatctcaaaataaattagtgataagatgtattaagttttctacatatggctctctctaacaaaaagtactagctcactatacatagaattgaatttacagggtgatttagataaggatggatatttggactatctagactttgtgaacatacttgttaaggtaagaattctaggcaatgaaaacaagcacattcgtgcagcctttgaagtattcgacgaaaaccaaagtggatatatagaaatggacgatcttcgacattgcttcgatgatggtattaatgttgaagaaaacattgaagaag

SEQ ID NO: 196410 - DNA, 867 bp, Cannabis indica
ctcaccatctttcttttatttcatttcatatttcttaccaaatttttttttacactctcattcttcatcaaaaatattaccaccaccaccatccacctcaaccaaaaccacaattgcccgacaccatcagtacctcaacttctttttcagatccaaaacaaccacaactaccgcacctccaccacagccccacatttcagatacaaacacaataaaaaaaaacttaaaacagtaaacacttgccacaatctcacatccaaatatcccacaaaaataaaagaaaactaattaaaatccacaagagaaaaatcttagatcaaaagagaaatttcgaaatccagattcaggttagagagagagggagagagatagcttactcaacatcaggtccatcattggagaacaaccatcgaaccaccacgtgcagtgctgcccaaatttgacaatgatgaaatgagtagtgaaacgtgagatcgagaagcccattccaaggagaacacaaatctagagtctatttgtcaataggaggtaaaaaagccattggatcggaatggaatatctcagattctgtggatttcgacgaacactaagatttgattccaatgatcgtcaagctcgacttttagagggattttattctccaatagctcatgagcttaaccgtaccgcttaccgtgagaaatagtgttaaaatcacgcccaaaaattaatttagaggtttcggagccaagactttgattgggcaggcaagactcgcgtgggtgaggtgttaggcggggctcgcgtgagtgtgtcactggcgtgaaaagagatgagagagagaggtcactggtgaccatggagcaaatttaaaaaaaaaagaaaaga

SEQ ID NO: 196411 - DNA, 1449 bp, Cannabis indica
ttatgattattattatttatttcgaaatggattaaaaaagataattaccaccgtcctaattgtagtaggattcaaaatgcaaaatttaaaaattataaagtttaaagaggaaattagggtaccaccgattagtatatatttacgagatttaatcagcgcagaggtgtaatatcgtaactgtaaaaaaagaaagatcaaaaatcttgactccaatttcttcgtttccacgcaactcactttccataattaataaagccttttcctttctttaaccgcgtttctaattctatcttccttgtttgtttcccgggaatcgcctggaaaagaaacaaactttcagtactccctcgctacctacgcttccactgagtcacccactctttaaagttcgaagctttttcaattgggtaagctgattgcttctacgaatggttgaatttcaattttaattacaattttgctgattccctattctgaaatttgaattttagggttttcttaaggtccgctgctgattttgaagtaatttgttttaattgttatttttctttatacatcgttttgtgcaggaaatttcgagtgattcaggatcatgaaagagtctcagaagtcttggtgtaataatactaggtgttatttcaccaaagaggaaattgaattttcttctccatctagaaaggatggcattgactttaagtacgagtcacacctgcggaagcaatattgctcgtttcttcaagagattggcatgaaacttaaagtgtgagtcctttgattcaatataatgaagatgaggacatttactctttattatcaacagtggataaaaatatttatctgctaatgattgtttggctggttatgtatgtatatgtatgtatacatgcttttgttcttctttgatttgtttgaaatttcgctagtttcatagtaactggtttaatcaaacttcgagtttgttttggaatgatctttaagaaaaagaaacggttctttcttttcaatattcttgtgttcaatgaggattaaggtaatgaacatttcatgtctctaaattattagctgttatttatagacaggacattgaataattatagtctcacagttttcctacttttaaatttgataggatctctgcttttattttgtattcgtgtttgttagactgtttaatgttcaaggatggtagttgatgaaatatttattacaggcctcaggtgacaattgcaactgcaatgatgttgtgccaccggttttatatgagccaatctcatgctaagaatgactggcaggtaagctagatatacagataatactttatgctaatagatatgcagaatgattttttctaagcgagataagtgacagtagatcgaataatgtttatatgtgtactctatcttcgacttgatcacgaaaaaatgtcaatgcatgaatacacattcacta

SEQ ID NO: 196412 - DNA, 2101 bp, Cannabis indica
ataaaagctggtgttggttgtgcaatgtgaagatcagtgaggagatattggatccaagtcatctcactagtggttacagctaatgcacgatattcggccttagcagagcttttggacactgtggcttgcttctttgttttccaggaaatgaggcaatcgcctatgaagatgcagaagccggtggttgatcgacgagttgtgggacaggtggcccagtcaaaatctgagaagccgcgtagatgaagtgaagaatctgtggagtagaaaattcctttgccaggtgaaccttttaagtaacgaaggagatgatgaagggctgtcaaatgtggtgtccgagggcatgacatgaactgactgagggtgttgacagcaaacgtaatatctggccgtgagagagttaagtagagaaggcgaccgataagttgttgataattggaaggattatcgaggatgtctccttcagtgtcatctaatcgttgtcttggatccataggagctttagcaggcttgctgctagtgtacccggtgtcatgaagaagttgtagggtgtactttcattgggacaaaaagagacctgtcttggctcgggcaatttcaaacccaaggaaatacttgaggggacccaaagttttgagtctaaatctggcctgtagggagtcttgtagagcttgaagaatgtcaatgttggggccagctatgatgatatcgtctacatagacgagaagagcaataaaggtattctgcgatccttttgtgaaaagtgtgtagtcagcttgggattgagtgaatccttcttgcaagagggcgttagtgagcttgttataccattgccgtgaggattggcgaaggccataaattgatttgtgtagcttgcaaacaaggttgttccctgtgacagaggatggaattttaagaccttgtgggatttgcatataaaccttctcttctaaatctccatttagaaacgcgttgttgatgtcgagttgtaatgcgtgccattattttttggtgacaatggcaaggagaagcttaaaggtaaccattttagctacgggggagaaggtgtcgaagaagtccaatccctcttgttgagtgtaaccttgagcgactaatcaggctttgagacgttccacactaccatcgctgttgtactttattttatatacccaacggcaccctatagcgcgtttgttaggtggaaggggcaccactgtccaagtgttgttggtaatgagagctaagagttcatcatccatagcttgtagtcatcgtttgaattggaacgcttgcttgtaattctgaggttcaaactcggctgtaactgcaaggatgaatactttataagttttggagagtttagaatatgaaataaactttgaaatgggataagtagtattagatttatcctgtagtaaattatagcattcaaaatcttgtaaataactaggtggttttgaaactctagtagatcttcttagtaaggcagcaggtggagatggtgaattctgctggtgctgagttgcaggggggtctgcaatatgttcctggtggtttggagttgtagaatgttctgcagtgggtgtttcttgagtgcgatcgagttcatcctgcaaaaaagagttaggagaaacaacacaagtatctggtgcgttataatcagtgatgtgtgtgtgtgagtaacatgtgtattaggaaggacaagaggtgtgaacgggtcaacagtatgaggattagtattaagtttgtgaaaagggtagacactttcgtaaaagaccacatttcttgaaacaaagatctgtttagtgtttaagtcttacaatttatatcctttgatacctcttggatagccaagaaaaacacatgtcattgctcttggttcgaatttagttctgtgtgaagtgatagttgaagcaaaagccagacatccaaaacattttagatcactgtaatcgggtttcttatcaaataaaatttcataaggcctgcgattaattaagaaaaaagctgttaataggcactcagcctagtatttgataggaactcttgactggaaaaacaatgatctagcaacattaaggaggtgctgatgttttctctcagc

SEQ ID NO: 196413 - DNA, 527 bp, Cannabis indica
tgcataaaaaaaatcaaatttccaaaaattaaaaggaaaacttttttaaatatccaaaataacaaaaattattaaaaattacaaatttacagtttttaatatttttatttgattttcttttttttttatataaaagcacggactcctgattttatgttgttttttacatcattattatattatgtctttttcacatcatttttattttttgtactatgttatttacacgttattttcatgttgttttcatgaggatcggtaaaaatataaataagaaaaaataatccctaaaatcatatatcataacctgtaaaaattaaaataaaataaataattttagacactttgtgtaaaaatctaaagttaaaaactttatttctattctcgtttgccacccctcaaacttcaccctctctctctctttttaagttctgactctccctcttctcatcgtaatcgcacatctttcatcattcttcctttccactctctcattctccctctcctaatcattctctctctctctc

SEQ ID NO: 196414 - DNA, 616 bp, Cannabis indica
attaattaattattatttgatattttctaatttgagacaaagaatgttataccttgttaaaacattttcagttcttgttttgtaataattatttaatttgatgatttcttttaatttgtttattacaggaaagacctgcattccaagattcctttggatttttacaacagtcttctctatctggaaaccaacataaggaaacgagtaagcacaactcttaattttataaatgcattttaactgaaataacattaaaactgataataatatagatatttttctttacaggtggccgtttgaagggaaggagatggaaatagtacaaccttttttttttctttaattaattactcttaatatgcatggtttgtctattaatattgttcaactatagccattttattaggttattaaattagaatatatattaaattggatatcaataagtgatatcttttattttattttattttattttgactgttgtcaatgaagtgggaaacaacctgagtgaaataagtttgggaattaatatctttgtttccagaattaaatttcattgtcaatgaacagtgggtacaaaatgagctgcatctttatatatattatatatata

SEQ ID NO: 196415 - DNA, 1054 bp, Cannabis indica
atgatcaaggtaattaagatacgataatggcaaaattcaaaattgaaactaaaattatttcagccattaagatacaataaatagctttcatgcaataatttcagccataattcttaccgggttcgcaaattgtgccattatattcgcaccaccggctcaaatcaccatttccacctgcattcatcggaagtaacaagcaggaccgagtccaaaagaacaccaaatccaacatgcctttttttatatgcatccacacagttgaacgtacatattcgttcacttcaaggatgtacctccgacacactagatcaaaaatatatacagaatgatgatgaattatttgctacaaatggcccgtcggcaaacatatccaaataaagcattatcattgaaaaacattaaaacccctcactaaaaataagttacccaaaaaaatgaaataattttatagataaaaaaatctaaaaataaatatcatatgccacatgatattaaaaatcataaactacatacatataaaataatgtataacatgatagaaattaatacttaaaaactactctttctttataatgtataccttctacattatatataatcataaaaaatttgctatcagcctatcaccgcattctactccatacaataatgagacagttattaactttccggtaaactatatatacttcataatcgaataactaatataaaaagtataccaacacttagaaaaataattagatttatagttatgacttattgctctctttatttttctttttaatttaaagaaatagttaacattaataaaaatctaattacatttaaattagtataataaattaataatcataaattataaaaatagaataaaacaggagaaaatatatttgagatatttttaatttatatttattataatttttcttaacaaataaaaaagataaagtaatttggagattttaataagtatttcttttatatataaatatttatatttttgatatttatgaacatgatgattcatttgatgccaagtattaatatcaatcac

SEQ ID NO: 196416 - DNA, 1951 bp, Cannabis indica
gtttacttcgtaaactttggtttgttattggtttaatgtcgaagaaaactaggaattaatcgattctattttattttgttttcacatatttttgtaaacctgtattccttcgcttacttcgcacttaccaaaaaaaaaaacagaatacaaagatactattaactatgttagcgtgattagcaaaagggtataattgtaataaaataaagcaaggggagatcttaattaattgttgttatatatgttcgaagcattaatgatcattatctacataagaaagaatagagcaagaaaaaaaatgtttctagtacttctgtatgataactctgtgttagaaatgcattatactgtggaataatgaaatacattttcttgttaaacactttatcatacaataaaaatcatttcctgcttatataaataataattcgccaataagaataacacaaatttctttgatgtgattttgtacctaatatttccttggctgcaactggagatctcctacttgaatctttaaggacagcgctctttgaagaaagggtacatatatacaggagtttctattttgcgtttattttttattatgatctatttatgattaggacttattgaaatgagcgaagggttattttgacatatatttcaaaacatgccttgttaaggctagtatatgaattaattttttaatttggttagtattagtttcttcaattactctttctttattattgttttcttttctcattattacgtgtattcttatttttccctctataaatacattctgctctggcacacatggttgctgtgcttttctttacttcccattctgttgttccatgcctatataatcaacgttgcaaaacatgcttttgtgtaataggataatgcagagaagagtttgagttgaggtgagacaacgatttgtttatattgagttactttaggtgcgcaagtcatgagcttagaaatgcatatatacatatcgttatgaacgatgcggcaacatcattatttgaaaatgcagtatacttataatttaagacagcccatacttatgggaaaccctatatacaaaataggataatctattaattaatatgacaataagtttggatatcgatggtttaaaagcagtcgttcccttttagcagccctttaatatattgtgtactcttaactccagcttttttttagaaaaataataacaataaaatatataagacgttaatccaaagccggcttcgcgtttaattaatcaagtaatgcccagtgtcaacgcgttaattaaacatacaacttcaaaaccaaagtaaagtaaaacatccaatccacaaaaaaaatgttaattaaaacaactataagctttgtccaatattatgtttgtacgtacgaatatgtacacactacacaatacgggcaatagctatacaaacaatccacatctgatatatgatattcttacccttttacaggatcacaattcatatgtattaattccaatgcagaaacttaatatacttgatcagttggtatatggtcaaaatttcaaacaacttaatgtttaagagaattataatttattgagtcacacatatttataagcgttattatatttattagaaacgaatagagtgatcaattatcattagaattaagaaaagtatcataataatatttatgaacttcgatgaatacaaagaatattgtggcataattaaatatcatatactataaatttataagcatatgtatttaattatcaattatcaattatcaaattaataataataataaattagtcaaaataattaacactttctcttcttcatccgaatttgagactttctcttcaatccacgcaattggttttcccaaacttgcttagtaaacatagacgagggtgacgatcttctcattccttctactccaaacccaaaccctaagt

SEQ ID NO: 196417 - DNA, 1193 bp, Cannabis indica
tctctctctctctctctaaaacaaagataggagagagaaaaccatgcgttacacaacatttccaactcatatataaaccctactcccacacccaccactttcaaaaatcacaaactgtctctcattctcaatctcattcattttctctgtcgtttttaatctttcactgtcgttttgttttagtactactactcacattacaatgccgaggaaaagtaatgacgtggcagggcgagcttggaacatcctccgtttagcgctgttatgggcgaggaaaggcggagtgtttaaacggcgtttgatgacggagctccgtttgttaccgaaactcatgaagagtatcggccacgacactcccaaggacagaatccgttacggcgagcgccagctatcgttcgataagaccccgatttttccggccattaagattaacggatcttcgtcgatgagacacttccacatcccttgcctgaacccgcccacagtagatttcgactacgactttgacggtcaagacgacgacgtttattacagaggctattgtaaaaataacagtaataatgatgataaagaaaatgatggtggtagaaagagtttcctgatcaagggtggagatggtgatgttaataatgatgataatgaatttgtaccgtacgatcaggaagagaatattgatacgaaggcagaggagttcataacgaagttttatcaacagatgaaaatgcaaagacagatttcttatttgcagtacaacaatgagactattaccacaactcccagaagaagcatttgttaagtttttattgttattaatattatttttgggttgagttgaggagggtattattgttatgtttttattattattgcggcattttgtagatatacttcattattgttatttttaataataatgataaaaatgtagagagaatgaataatgtttttatttttttttatgttcaatcgtgtttatgtttcgtaaagatcaaagtctccaacagaagaaattatgatagaaaaaggttatgatttggttggttaatttggtgttggattggaattggaattgcactgacattattttgtttttggtttgggacgttaaatttgacagctcatataataatatatatataatatgttatttgtaaatgttaataggatggtcaccttccatttaatataaaatg

SEQ ID NO: 196418 - DNA, 789 bp, Cannabis indica
accctaaaaacaaccctaattataattgaattattaattatgaaatataatacacaatatgttaataggtactaatatatacaaattttaactcaatacatctgatcggaatagaagaaacaagtgtagaacctcgataattaagggggacaggaacaacattactactattttgagagactatcactacctctataggggatgtatacctatactatacaccaatatacaaaatttgaccttagtccaactctaacctaccatcctttgttacaaagtaaagaataacccaagtacttaatagtgaatttaataatgaaatttgtaccctcccaatacaatcaatagcttactatgatgttttgcatatgtattaacaacaagaaaaatagaccactttaagtcttggtttaccaatattagtgtctttttgcacaagtgtcaccaaatacaatctgaattgtgatttgggggactacaaccaaaccaccaaccttagttgccatgaagagccaaaatcatttgtattaatattagtcacagtatcatttcatcagattttcttataattaattaattatttattttgaaccggatgctaatccgtgtttagtacggatataatcaagaaaagtgaaaccctataattaattaattattgatattttgtttaacagctaagcatatgtatgtgccttcttaatatatttatatatataattaaagctagaaaagaagatttctttgtggagggtttcttgttctattactttctgttatttatttatt

SEQ ID NO: 196419 - DNA, 1465 bp, Cannabis indica
ttaaaggattaaggtttgttatcgcaacctttagaagatattcacaactcatacgtatctagaagccggttacgttgtctagggagcatccctaccaaactaggaattatcctgttctcacccaagaggggtagctcatatggtcaggcatgtggtttgttcccacaagatctgaggtttgagtccctcctgggtacctatatggcaattgctgtaggttagggaaggagtctaatttaactttgaatcaacttatgatggcttgaataacatatctttccagattgtgcaaaacatagcctgtttgtatcaacatattccacctcacatagtgtagtatggaaattgctaggaacataagtaactaaatgcagccttaatattttctatattgttgttttaagctttgaaacacacatttgaagcactctatgaattcgatcttcagatgtgctgtaagtggttctggaaaaattgcattgcatgttctggagaagcttattgcttatggtgctcttccaatctcagtgtcaggtatgcaatcattcattcatttttcatcagagtcgggtctaaagtgacatcagtctttactttgtaggtatttaaataggctaagatacaaatttgtatttgtggatctgattattttctttttttcttctatattatctttcaattattttcaataagtgcaagttatgcatgattttgaatattgttccaactcaatacttctttttggaaaaaaaaaaccactaattattcagaaaactcgaatttccatatcttgtgaagcttttattatcagtttaaagctagatacatttggtgatgaaaatcttttctgcagattcgaaaggatatttggtggatgaagatggatttgattacatgaaaatatctttcttgagagatattaaagcacaacagagaagcttgaggtgtgtgtgtaacccattttataccaaatcgctgcattaacttttcggccccattatattgtgtgtggcatttgcagagactattccaagacttatgctagatccaagtattatgatgaagcaaaaccttggaatgagagatgtgatgtagcattcccatgtgcttcacagaatgaaatcgatcaagctgatgccattaatttggtaaattcaggttgtcgtatagtagtagaaggtgggtgggagttctcagacacatgtgcgtagtgttgttttgattcttttatttctgttaatggatgttcactattgcaagattaactgcagatatgaatttttttttgtttctgaatgtcgtaggttcaaacatgccgtgcactcctgaagctattgattgtttgagaaaagccaatgttctcattgctcctgcaatggctgctggtgctggaggggtgcgacttgcatttcaattattttattttcgtaatcagaactgtgcaatttgtgcgtaaatttagtaa

SEQ ID NO: 196420 - DNA, 576 bp, Cannabis indica
atttttcatcaatatttgaaatgcattatatatatcagtattttttaaaatatatattttatataccaacatgatactcaagtaaaccgcacttacaattctaattaaagaatttcaaatttttaattagttgttcactattttattcattgatgtgattttaattctctcgtattaatacaaaagcacattctcaataataagtatgaagttttataatattcatgtaaattttcaattaataatttaacaattcaaatataatagtaataataactataaattattatatttatttatttaattaaaataataaatctctttacatgtttttagctaggacacactcctaacaatctctcgcttgtacttaaagcaagtgaggcatgtgctttaatcctatattacgtacatgactctcgaattgctttgctggaagcatcttcgtaaatagatctgtcaagttgtactctaatacaatttttcaaaatggacgcatctcctctatgtacaatttctttgaccatatggtatttgcgctctatgtatttttttctcttgtggcttcttggttct

SEQ ID NO: 196421 - DNA, 1233 bp, Cannabis indica
gcttaaaaagttgcgacatctttttgtttttcaatttgaatacaataaggatggctttccattttttgattcagcaaaaggagcaaaagtaaaggaaggaattggacagctaaaagctttgcaaaatttatattatattgaggtgaatgttgtgggatttaacatatttgaagagttgaaaaagttgacagagttgagaaggttatccatcaccaagttgagaagtgaagataataaggaattctgtgactgtgttgagaagttgagtcatcttgaaagcctttcagtaagttcaataactgaaaatgagataatagatttggaatctatttcttccccgcctcaatatcttcaacacctcttcttatatggacctttgaggaaattgcccaattggattacaaaacttaataatattgttgagatttggctacaatggtcgaaactggaagataattcactaaatgtgcttcaaagtctttacaatctcttggaattgagaatttcatatgatgcatattgtggagagaaacttcagtttgggcaaggagggtttccaaaccttaagatgctttctctcttgtcattgagtaaattgagtttgatagtaattgaagaagaagcattatgtaatcttgaaacgttggagatctgctattgcccacaactaaaggaggtgtcatgtggattccaacaattaacaaagcttaagaatgttcatttggaagaattgcccacaacttttatggtgttccaaaattttaagagccttcaaaatactggagcacacattcaacttgaatacagagtcgatggagaatggcggtcgtgtcgattggactggttgacacctatctttgattcgatacgaggtaagacacgtacggtgctattttaagatttttagtatgtttcatatatatttatttggtatctaataacttaatattaatattaaatctacttttatttcacacagcacttgaattggactgggactctattccttttgaaaatataatgagtaagattaatcatttttggttcatttactattttaataatttacggattaattatttaactttatgttattgctgccatttcatgatatatatacataggtgagatttcaaagtacaaatttgatgtaactttagtggttgctgagattagtaagtggttgcgtccaactctgcaggtaaatatgcattctaatttctaattattaaa

SEQ ID NO: 196422 - DNA, 2183 bp, Cannabis indica
ccagcttcctttcttattcttttgaataaataaggaaataatagctgtcagatctcaactaagcatcatatcagattaaatggtgaaacttcctgaaacgaatatcaactacttaattcacagtcaattgcccataatcaaagcacacggcattaaccaaattaagccgaattccatctgtctagttagcaaactctctccttcgtgggttgcacttcacgagacagctcaagtgttttatgtactgtaaactccccaatagaggggaaaaggaaactaaatctaattctcaaactactataaatacccatcggatcctatggattaagggttgaattctctagaaatacttgctcgggcaaacttaagaacatgtactcttggtattcctaaaagtttttcacgctaagagctaatgaataacacaaattcatggactaaggctaattaacgccccaacgacgtaaaaaactatttgtctctttttagtctttcttttttaattttttgtcttcttcagttcttattttttataattaatttctgaaaatctcagtaaatattttggtactttcattaaaagatgaaggatgcagtgagaccacttatagattgcaaccaagtaatcatggcactcacccgaacaaagtctgcttttattttactattcctagcaccaaagcaagggactctaatgatccacatgaggcaactagctgttaaaaaggtcaccaagacaaagatcagaatcgagacgatccgatcatcaaagatgcaaaatctggagaaagcagttctgaggatactgaagataacactcaggatacactcgaggatatgcattaagatgatcctcaggataaggctattgacgatgatgttggtgagaagaaccaacttcacaagtcaacccccgtggtcatcatggctaaaaaactttaaatggcagaaagcaaattaactcgacaaaataaattcaatgaggtactactcacaaagatgaccagaatggagagcgtaatgacttccctgactaagatagttcctgaagtaaaaacatctccaacaatagatgcccctgagaaagcatatccaaacgatcctggaacatcaagtgtttgtaaagtcaaaggcaaaagaatagccatcaaagaactgaaaaaagactccttccaccaagcagcataaaaagtctaaagctactgaccaacctcaacagaggaggaaaggaaaccatgctttagggcatggtgactagacaacctctagccgtagagtcacgtagaaaaataagactgatgttggagtctagaagctagagtcatggatggataagcatcctctcagtgattccagtaatcacaatgaggatgttgacgaagtacatccactatcgaatgacagtggaagaagcctttccacaaatgttcttcgaagaagattgagtgctatgaaagaaagagcaaaagtataaaaagctagaccctgtgggaacgatttgagaacttacatcaacgatcacgttcgtgaaagagaatcttcaagtgataagactcaacacctagatcgcaaagtagaggggttaaagaagatcagggagaaaatttctaaaaaacaaagtggcaatgtgttagcttttaagaaagaagatgttgagcctgtgtaaagagaatcatagaagtgccactgtcaaaatgctttagaatgccccaaatggagctgtatgaaggacgtacggactccagggaccacttgtccaaatgtaaccgcattatgtaagttgccaaggttagtgaagatgtgaagtgtttacgttcttcactaacattaagtaagtctgtggaggactggtggaagaggttgtctccatgatcgatccacaactggagagacctataagaaatgtttaggaagtagtttatagcagctaaagactatgtatgagaagcgagttccttgaccagcgtcaagcaacaactgagagaaagtctaaagaaattcattcagtgcatgatggatgtggttgctaaaactaaagttactgatgacatgaaaattgtggccttaacatcaggactaggaattggatctttattgtggggagatctccagcgtaagagagtagacactttagttgaattcttaacaagggcccaagaattcataaacctggaagaagttta

SEQ ID NO: 196423 - DNA, 2658 bp, Cannabis indica
aagccttgttttgtagtagtgaaattattagtaacgtgtttagatgtaaattaccataaaaacttaatacagtatacagtaattttttttaaaaaaatacaattattttgaaaaaaattccaccacacaattaaaaaaaaataaaaaaatagtcagtatgtgacatttaattatagtaccgctattaataaattcttaacacaagtaaaatttcttggctatcaaattatacttttacctaccgttacaatatttttcctcacgaaaaaacagtaacaacacaccattttttagagcagaaaactcacattaactacaagataattgctaagcaccattattagctgagtaaaacaattataaaaacaaatgcatgtttttataattttattacaaaaatatggtacatcacatgcaagcaatcaaaagtggcctactatatatgaaaaaaaaaataaaaaatgtaacttcttaaaataactctttttctatttatatatatatatatatatatatatatacattaaatttacttgtatagaagtaaaaaattacccttaagaatatttactccaattcaagtattcacaaaataatattttatcacataaaaactcatatatactcttagagacatttgagtttcaatcactttaaacatctaaatatgtctaaattcattgaaattgcactaaatcatttgtacttataattagaatctcaagtggtcggatgttttaaggttgaatttttcaaaatgaaaatgttgatcaatgaaaaaagaagatttagaattacacttacaaaagatgactaagaaattttatctaatcagcagtgttgatgatctaatcctcaaacaagcattccttgcatctatatcgaaactattaggagaaaaaacattcatgttcttttcgacaaataacaaaacgctgcaaaacataacatttggagagctctttcaaatgctattgagagccttagaaatgatgttctctcaaaacaagtttctacaagaatacatgaagcaaataaagtaacttgacaaagcatacaaccaaaacagtcttataatcaaatgttcaactcaagtatttttgtaattagtttaataattaatatttttgtaagtacccctataaagtatgctgtatttttatataaccaattagttgttagttggttattagtttgttactgttttgtttattttgttacttttttatgtaaacctatatgttagctgcttaatatttcaattaatcaaataatagagtatttcacttctatttcctacatatatagtttattctacttttgtcactaaaaaataagtgtaagttcataatactcctgtattttttgttattttgagggttttaaaaacaaataggtgagtccaaaaagaaaaataagtaaaaagatttttctttttttcagaaaaaaggtaataagaatttgatcaaagacatacccttaatttagaataataaaggctgtgaagtgaagcataaataataaatcagaggcaaggacactgaaaggttgccatcaaaggtgtcctcaacaaactgataaatgttcaaataaaggaccaccattttcacaaatttaggcttaaaaatccacaaacactatacaccacactccatttgatcccatgtggattttccttagctgccagttcttatccagctagctgactatactgttattttatttttcttttaaatccaattcaaaaattgaggtattataatccctagattcatacaaattactagctaagtgggttttccctaaaaatacaattgggatggtcgatcttgttgatataccaaataacatacaacttactttctcatttatacacattagcctaatgttacttactctctaatatatttatatatattaggctaatatctctctaatatatttatacatatcacgctaatgttacgtgtaatcacacgtacttagttatatttaattttattttaagttatgtattttgagttttgatagttatataataagaatattacatatataaaaaaatatttaatttaagttgtataaaattccttttagcttatcttccttgtaaataaaggattttaattaataaagtttgatctttaggaaaaaaaaaaattaataatcaagacgacaataaacactttaaaattaagagaaatgctaaagggtaccagtggtgcttagtaccttcctatgtgtcaatatcgctattggtccaactaagtattgggtcccatataatttaatataataacttttagggagtatcgctagccaatcgcaacacgacatgtcgagaaagtgctaagcaccactggtgcctaatagcaatgctctaaaattaatgacatgcacaaactgtctttttgtttgtactgaactaataatcacttattagaaagtttgcattaccattatgcataataataaaatattatatgtaaaagttatatggataacatcttaacataacaacacaccatattataaaacaaagcttaaaaaattggcacattagacaggccaagttaattcacagagaactaagccaagtcaagcaaattggcacaaatcaaaaccaaaagaataacacaagacaaagacaaataatag

SEQ ID NO: 196424 - DNA, 526 bp, Cannabis indica
aaaaaaatctgctaattaatttttttgacagtaagagactgatcaaacagttacagtgacagtaagataagtttactatgtacttacttttaaagtaatatcctctgtttcaatacaaatttggctacacaatttcattcatttccaattagacgtactcaattatcaacgaaagtacgtaataaatcgtaactgctaaattctaatttttgcatatattagagcaaatgaactaagtcacctaataaacaaagagctgattctcctaaagatatttaaacacagttatagaattcatgagaaaatgaaaaatcttattgaggggatatgaacaaaactgctcgtttttgttttcatctatgaacatagtggaaatatttctaattagctaccatgctataactattttgttcttgtttgtttgtttgttagtaaatatatatataaaattctttatcgtttaaaatagacatgtgatctaattaagtctgcaggtaaataatattaaacgacattgttctgttca

SEQ ID NO: 196425 - DNA, 1129 bp, Cannabis indica
tttattgaagctgagactagctttgtgctcgatgatttcggcgattttgttccgtcgcctaagctaagatctttgttggttccttctgttgattactctaatggattgtcttcttatcctctccttctagtgcaggtaatattaataaacttatttttcaatatggttatttatttatttaatgaactagctatggtcctaaatattatctaaaatttatgagaatttttttttgagcaattaatgtacgatagaatacacattttttgatagattaatcagtatcaaaaacccaatgtgttatccaaacctaattactaatatttattgtgttattaggttttggtagttgttaagtgtaatataattaaatataaaaaatatgagaaattaggttaaaaaaattaaagctaatttgtaaacatacatattaattattttttttttctggcatatacaaccgtacgtaaattctaattatgtatttatatattagtgctttgaatgttttgtgttttgataatagcatatattatgctaaaacataatttttaacaaatggcaaaataatttttgatatataaaagagaaaattttcttgtagggtttttatagtataagttttcaaaaatatataaaagagaaatttttgatatataaaataattttactcaaaaaattagttattttataggaaaatttaaaaaaaagttaaaaaataattaaaaaaaaaaagaaaaattttacaatgcacccccttaaaatggatatattaatgtacccttatctgttttagcacccaaaataattttttagtcaattttttttttcatggtcatgtatgttatagttatttaagacatcctacaaaattttaagaaatttgaaaaagtttaacacgccgaaaactacgttccaacagtgtattgcacgcgtgactattttattttatacgcgtgtaaaatagactgtttgaacattgttttctatattgtaaattattcaaaatttctcaaaattttgtagattatcttaaatagttataacgtacataaatatgaaaaaaaattagactaaattttttttctagataccaaaacaagtcaagggtgtatcagtacatcccttt

SEQ ID NO: 196426 - DNA, 558 bp, Cannabis indica
ttttttcaaaattgggttaatattttttcattacccgccaaaaacgagtgagtgagaaacttttcaaaaatgttctccgccaaaaccaacgcctcagcctccaagaagcgccgccctgaaccggagtccgatcagagaaaacgatcctccaaagatcttcgtctcgatctagatctcgacctcgacaggttctaattcatatatatgtatttttttttttgaaatttcaatgaagatcgatctgagattgagaataatctgtcgaaattgtgctttgattgtttttcattagcgatattaaaggaatcgtctcagcgcttcaacaaattagggagaaagctcataaggatggccagaagaagaacgaagaaaccatttccaggttaatttttttttcgatctttttagttaattcatggttttatggtttggttactaatttgattacggtgatagtgtggctgctgagatcaaatctatgatggatgaattgaagtccaaatttgataaggataggtaagaatttatctattgtattgaagatcgaatgagtttttt

SEQ ID NO: 196427 - DNA, 1018 bp, Cannabis indica
tttatcacagcatgtgaatctaattatgtttatagagatacactaaaagaagtatcaaaagtaaatatattgccttgattgtaagacataatctataatgataatacagtgaaaaaaactaaattaaaatgaacttttgtatacacttgaagcacatatgaaaatgtaatgtcattattacatctctcttcaagcaaaactaaaattttatccaataaaaagtaagattagaaaacccattcaaaatacattgaagtgattggcagattttcaacataaaaaacattacatgacagccagtatacctatatcaaaaaataatttcttgccacatcaaaagacattacaaatttcttcctttcatgcactacttgttcttgcattttgactctttgccttttgtttctccagtcttgcctttctcttaatagttgcttcacttgaattagtagatgttggacgaccaggtcttttcttgtttggttgctccacaaatcattacgtaatttacatctatcaattgaacgatttattaaaaaagaacaatagtatgttcaaacaattaaattgtatattatattattaagaacaaatatttattgcatacaaatctcacctcaaccaatttttgattattgcaagtttctatcctgtcacatttctgcttgcaattgctacaagtcttcacttatccatatctttttactttagttgtcccagttggtggttcatcaagttctctttttctggatttttaggtctggctagaagcttggtctcaggtgggggataaataggattgagtccaatgtttgaccagttatcagggatggcatgggaataacacttccctcataagcacgcattacaaactcctttttgtagtatgcatgtatatagtcagttacactcttccctatgaaccaaatgcatgcccacatggaatgccagaaagttggtaccttctacatgtgcaaattctcatctccaagtccactgataatgttctcccactaaa

SEQ ID NO: 196428 - DNA, 2249 bp, Cannabis indica
atcatcttgagtctcttcaagttgaacctattcactctttatggtctttgtcttcaactccttttctgtattaccccctttcataagcatttcactctcattgaaaaccacatctctgcttatgatgcactttttgaatccatcttctaaataccatagcttgtcttgtctaatgtgtgcatatgcagtgcactcaaaaactcttaagtgatcaattcctggtgcattacctgcccgctgttcttgaaatgttttttaaattcaatgctacagagggacacatgttgataagatagcatgcagtcttcaaggcttctccccaaaaatgttttccgaaaccagcagccgtcagcatgcatctagctctttcaattaaggtcctattctgctgtggtcttgataacagttttgtgctttgttattccaatttcttggcaatacatattgaactcatcaaaataaaaatcctagccattgtcagttcttagcatttaattttcttgtttgtttggttttctatcaagattttatagttaataaaagtgttaaatgaatcatttttattattgagtaagaaaactcaaacctttcttgtatagtgatcaactatacttagaaaatagcttgctccacctatagtttttgttctggaggcaccccagagatctgaatgaagataatccagtctccattttcgttgtgtgccttgctttagtgaattttaacctacaacttctaccataaacacaagtttcacaaaaatctagtttcttaccaagtttacctttaagtatgccttgtttctcaagctcatagacgcctctctcgctgacatgtcctaaccacatatgctaacactttgtttgatcaataccttcattttcgattacagttgcaacccttcctattattgtccaaccagctagatagtaaatcccattattgagatttcctttcatcacaactatagagtcttttagaactctaagagaactgtgaatcttgatgctacaacctttaagtgctagtgtaccaatagataacaaattttttttgaggttggggacatacctcacatctctaatggttctttctgatccatcatgcattttgatcagcactggaccaattcttgtaatcttgcaggctttgttatctcctaacaagactgagccactgtcttgttccttaaagctgcaaaagaaatgtttgttaggagtcatatgaaaggaacaaacctgaatctaaaatccactcatcactagtggctcaacttgatgcaaccaaggcatcagtagacccatatccatcacgaacatagcctgcatctccagaatccttcttcttttccctgctaaactttgctttgagagccttgcactcatctttgagatgaccctccttcttacaatagtagcattattttcctacctttgactttatgctagaactcaatcttagtctttgaccgttgctaccacccttagaatggatacctttgttatttgatttgtgatttccattcttggtatctctttattctggtctgctccatgcaaacattcccacaccattattgtctagtctttcctatgatttcttttgaattcaaagcagctttaacctatgatattgtgaaggtttctttcccatacaatatggtatccacaaaatgttcataacattttggcagagcactcaacaataaattctcttgatcctcatccttaatattgagacttatgctgctaagatctaggataattctgtctcctgagatcttttgtatcatccatcttcaaggtatacaacttcttcttcaaatagagcttgttggacaaagacttcttcaaatagattgaagcaagtttctcccgtaaccctattgttgttcccaaaaacctccctaagtacttcatctcccaagctcaaaagtatgacactatgtgccttaattttatctcctttatcttctttttttcttcaccaagttctttcatttcttctctatctatagcttgatgtatgccttgatgaactaagagagccttcattttaatcctccataatctaaaattatatgtgcatgtgaacatgtttacctcaaaacgtgtggaagccattgttggctgaaaatcttgatcttgttaagattcttgaactattcttggtgaactcaaacctagtgttctgatgccaattgttgagaataactcgatcacatatggctcgcacaaagactcctaaat

SEQ ID NO: 196429 - DNA, 1578 bp, Cannabis indica
gtactcaatcatagtgagtaagaccgtggtaacctgcttgaaggagagaaagagatctaggctcaaatcttgataatactctatgacaaaaaggaacaagggttagagattgagcggaatgagtcattattccgttgcaaccaatgtaagattttttaaactcttatgtgtttaatttcattgtcttagagatatttatatttaagatattaatcaacatacttgttaagaaatctagatcttgctaaaatattccctacaataattaaaatatttgaatcttattcttaataggtatgtatataactcagttgttaaaaatgaaatatttccattcttttcactcattaatgtggacaacatatccaatattaaaattccatataatataaattcttttaaaagaaaattcccttaattaatttgtttaaagatttttttcccattttctctaatccatttttattgtcttatctagaaagaaaattgaacctcattctaatccacacacaccaaaaaaaaaaaacaaaaaaaaaacaaatacatattccaactactataaatacatcaaaaaccttaaaaaaatacatataacaaacaaaaacaactaacttctaaactacacaatatattcaaaatggattccaaaacactaaaaattccaacaacactttccctttcccttttatttttcttattcttattttcatcatcaacaaaagcacaaacatcatcaccatcaaatattttggttgacaaaatttgcaaaaaaaccctagacaacacaaaatgcttggcagctcttgaatccgatccaagatcaaaaaccgcaacaagtctcaaagctcttgccaagatatcggttcaattatcaatatcaaacgcgaaaggaagcctcaatttcatcaacgacgagatcaagaagggaagtggtagcggtcaacaagaagtacttgagcaatgtgcttcttcctataaagccatggtgctatcattctcgagtgcactcgaggaactcgatgaagatgttatgacggctaattatgacataaaggtggctggcgacgacgctgatttgtgtcaggctgagatggcttcgaaaaaggtcgaaattccttctttggctgataggaatgatcaagtgaaattgtatagtaatattggatttgttatcactgataaactttgatgttaatgaatatgatcattttgtgtaacaagtttctatcattttttttttcaaattattattgtctctaagaaaaatagaaaataataaggctagatttttggattttgtggatttggattttgacaacttgaaatatatgatcaattctttcctttatattttggatgcatgattcttactttttctttccctaaatgatagatattgattggctttttttttcattgaaagaaaatttaaatggaaaatcttttgaagtaattccctctaataattgtaaatattttttttttctttagatggaaaaatgggatacatataattattattatttctaaaaaccgtcagaacgcaatcgtaaattaatgttttatatttttttttat

SEQ ID NO: 196430 - DNA, 871 bp, Cannabis indica
ttacatgtagggcaatgactgtttgaaggaaggcagaaatgttggctgctgctttaatccaaacaggaccattaacgctgttaagcaagtaagtcgaggttgaagatccataggcccaatagccaataaaagtaacagcatacatgggaagaaccccagctgtaaattgaaagtatagagctttcatcatgttccctacaacaggcttcctcactgttgcctgttagaaccacataatgaaaacaagtaagtttgattgtattgatattgatagcaacaaaaacagttagcctctttttcctgtctttaagcgtacctgtatctctggaagcattcctgtattaaatgcaaaaacaagatttgcagctgctcctattgttgtaaatattttgctagttgttgtccctgggatgctataatccctctccggtgctttaatgcctaaaataccaaaatttcattttgagataagtgaaacactttccaagcaaagtgattctgatataatatgcttatactagtattagtattattgctaataccttccttgactaataaataccaagcacaaatctccaatcagatagaagccataattttaacttcataactagtacataagatcaaagaatgctcaccatctcggagagaaagcacaaatgctgcaacgatgtataccaggctgaaaaaggtagaaaatcccaaccaaatcctcagagctgacaagtgtgggatacctattgcaaacaatgcacatacaaacccagctatagcaatacagtatggtagtttcattaacccatcatctctgaaaagaacatatacagcctacacaacaaacgcatgggactaaaaatgttcagaacaaaaa

SEQ ID NO: 196431 - DNA, 603 bp, Cannabis indica
cgagaagttctgtcacaaacagcatggtgcataaggatgcctgcagcaactgagacattgaatgagtcaaccatcccattcattggaatgctacagtgcaaatctgataataccagggcctcatcacttattcccctgaatgatgatgatgatagttcagttcaaataaatcaaccccatgaacaaagaaaaacaaaacaaaaagctctctattatccaataaactaatttaatagattttctcccgactaattacggatttttgtctctcgaacttttcatcttgttaaaattctctctaaaatattgagtttggtagcattcaaggacttttctatcaaattttgtttaattttactaacgtaatgattgtccttgagccaaattgtaccctcgatctttgttatatactaaattgtacccctaaattttcatacacgtcagccttctgttcaacaatcttaatagttttagagaaatttttaacagtttgaaaagtttaaaagtataatttagtacaagaggcatgagactccaaaagattaagattatgctcacacctatattaaaattaaaagactgaaaacaagtttaacacctgaa

SEQ ID NO: 196432 - DNA, 926 bp, Cannabis indica
aaaacaaactaaaaatacttaaaaggacttgtgtgtttgcaattgcaggactatggagtaactttgttcctctaccgacaccatatctcgtggatcttgtgaaagaatccgtggggggtagtactgaggctagattccattgaggatggcaatgcttggaaaggaatggacgttctcatcttcaattcctggcattggtggctccacaaaggaaaatctcagccgtatgtttttttatttggatatatatatatataatatatatatatatatatatattatctatatgtaattttgtgtaattggttttggtttggcagatgggactatttgcgagaggggaccaaattgtacaaagatatggacaggcttaccgcattttttaaaggaatgagtacatgggcgagatgggttgacctcaatgttgacccttcaacaactaaagtattcttccaaggaatatctcccacccattatcagtaagcacagctaaaccttcacttcatttttgttataacaatttattgaattattgacctaaaaacaatgttgtattttactttttgttaaataagcacaagcagcataattgcatatgttaataagtattccacataaactgacaaaaagtccctaacgaaacagcttagtcaatagaacaatcagtataaaattgagaagcaaacattaacataaagcagtgtagataaacacgtgcaaacattactataatgtagaagtgctgtagtgtagatcagacttgtgcaaatggactagtaactagtttacgaataattttggccaataataataaataatatatattactaggcatgtcattaatttgaacgtttatgtactgataataattcaagaccattaatggctatatttgaccaataattcgctaaaaatgaatatacatg

SEQ ID NO: 196433 - DNA, 1074 bp, Cannabis indica
tattatatgtctaccttttaaggctcatcgacattgtcaacaatgaaattttctttcttacaaatagtgtaaccatatgctccccagtatttgattaccgtatgaggcacatctctcatggcaccttacatttacttgaaagtgatttataaaggaatcattgtttttatctggttaaaaacttgtgattgtgatggtaataatgcaagtagatcagacttgtatgcaatatgcatgaatgccgccaggatcgaagttgcaacaatggttgaagagttttgagtgaattccctggtgccaactggaaactttgttgtttcaaaattagagtacttacttgtgaaaataaattagagctcatagttaaatagatggatgctgtctccttttcaaaattgacgtgaagagagcctatcttagtttatgatttataagctgattctaaagtgaatcataacccatcacggagtttgcttatatatacttgatttactgcagggacatgattcgggctatacgtgcttgtaaaactgcagcagaggaacgggctgttgtacggaaagagtgtgctgctattcgtgcttcaatcaatgaaaatgataatgactatcggcatcgcaacctggctaagctcatgttcattcacatgcttggttacccaacacattttggtcaaatggagtgtttgaagttgatagcagctgctggttttcctgaaaagaggattggatatcttggcctcatgttgcttcttgatgaaagacaagaagttcttatgctggtcaccaattcattaaaacagtatcctgttctttgcctcactcaacttctcttgtctaaatttttattttaattgttctggtctttgttgagttttctttctttctttctacccctacctttctgtttttaatataattattaaccacagtttatatttgtttcttaaattctttttctcttgaaaaactttttttgttttgcaaatctcttggtgaaactttgaatataatgggcaaacctctgtactattcacaaaatatcacttggacaaaattctgttttttttttttt

SEQ ID NO: 196434 - DNA, 2656 bp, Cannabis indica
aacacagctgacagactagtctactgccaagagagtatgcagatgaaggattgggagagaatccacgaccaaaacaagttaaaataggtggggaagtagtattcacaccaccaaatcgaggaggaacagcatagagattccattgtcctcgaccactagaggaaggaatagacctattatcaattgcctaagaaaaatttaaggaggaattacctgtaccacgagaaccacgattagtagcaagattaatcaaagtaagatctttggtgttactatccatacgatgttcttgagacactagtagagagtcaatcttagaaacaatatcatttgtatttcttgaattaacaggaataataaaggtattgtaattagaggggagccttttgaagatcgctgccacatgttccttacaagaaacacaatgaccaatggaaccaaggcaatcaaccaaagctttaatacaaagaagatattcattaatggagagacctcctttcttgcaattttgaagttgattagtaaagaaattaatcttagcagaagtttgagtaacaaagtatactttcaatattttccatacctttgcaaaggtctccaatacatcaatctgagtaagaacactatcagacatggaagataacaactaggagtagagaagctaatcatgaaatttcccattccaagaattgtgaattgatttaaacttttgcacgatcatcatccatgataagtttaggaggaggctgaacagaattggagacatagttgagaattatacggtggcctttaatggcagagagaacttgaggccaccataacaagaaattgttatcatcaagcttgacagaaactttatgggagaaaacaatcagaggaaacacagaaccaggcatcgccaaagaattagctaaatcagtcgctatggataaaaactcaagaacagagaagataaacgatcaaggagattagactaaagtggaagtaaaaaaaaaagatcaatagcttgatatcatgttagatcaaacagagagaacgaggaatgagagttaatgtgaatctgtgttaatcattagagcaacggctctttaaatactatacaagtattgttgataaatatagttagctaaaatagaaaatacagttgtataataatataattaagctaactaataactaattaactacctaacaatcctaagtcctaacaagaaatcgaaaactttggaccacgacccaaagaaagttcaagttgttgcggcccaagttgattttaatttttttaaaatgtaattaactaaagggatttttacaagaatattaaattttagacaaaagtttacaattttactatcacacggaattttttacaaaaacactgtctttttataaaacaacccgaaaaacaacaaaacagaacaattaaaacaacagtggaacaactattaaacaatcgtgaaacaactgtaaaaatttaacacagtacacagtatttttgaaataaattctgagtaaaaaatttaaaatttcagtatgtggtgtaaaaaaaaccttaactaaaggggtcgaaaaagagaattgagatactttttagaatgggtatgactttcaatgatctctccaaagtaatcattaaaaactattttccaaagtaatcattaattataatataaattttatatgacaatgtcactttttgctattaaatgaatataattcatggacattttatattataattagtactcaaaattgaattatcagctaaaaaataagctaccgtattaacttttttatcagagtcggtcttaagatatatgagacctaaggtaaaattaaattttaagacttatagtttaattattatcaaaatgatcgttttagtgattagagtaatagtaaggctttcaaaactcataagagctctaagttcaatccttcatagctacgtatttaaaataaaaaatagaaagtagaggttatatattgatcccttacctcttagcttaaagtaatacccttaccactatactaaacaatatttgttatatttttttcttatttaatttttttttataattttggggccctgagcgttcataggcccgaagcgcatacatggctcgcttaccctaagggtcgatcctgctctctacaaataaatttcatatgattacaaccaagtgtatttttaagattcctattctcatggaggatgttatccaagacgctacagatggaattcaaaatttgattccagacaccctcacctctaactccaaatcctaacttcggaatccaaatccgaccctacattataataattaatgcaatataaattctattcaaatataatgttattcttatttataaaatattatttctaatacggcgtgccaaataaatcataaggctattggtatacccaaaaaaaagtgaagaatttattgttgactatacaatttgctattgttattacttatgggtgtttgatgggaatgaaatggatttgctgagaaataatttagtatactacgattaatttaatttaatttaaaaattattatgaattatcgttaactatttacaatgtgttacatttaggacctagaaataaattagtagaaatgtagaatgagcgctaaaaggtaccagc

SEQ ID NO: 196435 - DNA, 1437 bp, Cannabis indica
tttttttgtagattccattgtatttgtttttgtacgtataagcttgggtacttgaaggtttcaactggatattcaataaccgaaaagtaaaatgctgatgtttgaggttgacactactttacaaaagatgcacgaaattttctatgaaagttggatatagaccctttttgtgtatgaatggaaaatagaggtgtgttacatgaacatgaaatgtaatatgataatgttggaggttttagtgaagatagtcaagtaagattgttcttaagaatgaaggcaaaaatgagtgcagaactagctgccactatgtgtaactaaggttaagaggcatgcaaatttagggcctactctgccaattgtcgccccacaaagcgttgttgggggttttgtcctagaaataaatcatgcggtagagttgaatcagtacgcccctactaatataaatgagcacaaggttgataatgtatttgatctctttactgctccattttacaacaatgatcctatggtagatttgaacgaggatggtgatatggagtttcaagttgatgaagctatagagatacctaatttgaggttagaactacctcaaaggaaccatagtgcagagcaagaaagaagaacctatcgtagtgaaaatcaccaaacatcagacactagtagcagtaggccaggtcatccgtgtagtagtgtaccatcagattttgaagtttgtacaaaattcaaatctcttgtgtggacaaggaaagacaaagagaaaagtaatttttatacaacttctctaagtggtacacctttaggggaaatacacggtggcaagttgcacacaaacaagactaaattgaaaaatgtagtgggaaggtttgcattgaaaatgaattttgagttcattgtgaggatatttggcaccgatgtgtttaatgtaatttgcaaggatttaaatttcaaatggagattgaaaggcaggaagaatgcacgttgcaaaatttttgaggtcactctattccacaacgaagacacatcccggattttaaacatgttgataaccatcaagcagcactatgggttgttggccaccttattaaggagaagtacacatcagatagaactaagtgtaaggcaaaagaaatacatagagatttattttaaaaaaatatggaaataaaattaattagttatgagaaggcatggatcttacatatgttaggggtacgctagcaaaatcttatacgtagttatcttgttacttgtacatggtggaacagaagaatccaggtactattacatacattatcatagagaacaacaagttcaagtattgattctagtcactagatgttggaagaggagatttaagttttgttgtcatgtgattagtattgacaacacgttcttgaagagaaagtattgtgggacaatgttagttgttgtagcata

SEQ ID NO: 196436 - DNA, 1258 bp, Cannabis indica
aatattatttgtttagttttgcactaagataggatcttgtttaggccctataaccctagtagagctggctttgccccctcaacatggccaaaccccactaaatctcatggggtttcgagtaaacacctctttaatcttgtgttttagtttattagataggcagagaacaaagtaacttcttggattaagctctcaaggcttgatttcttaattgactaatcttttaattacacatgccacatgtgggggcctgtgcatgattcccttagctcagcttcatatttcaaggctctttgcattcaatcataacattaatttaatactagtgagggattaattaaagtgataaaactgagatctcaaaaatcaaaaaaaaaaatctactattatctatatgccctaatcttgaaaaatcctaaaccaatatgtgttgatcctaaggctaaggacattccaattcaacaccattacacctagtgaagcttccactaccattaaataggccagtttggaccctatattgaatgccatcaaactcaaaggcttatctacgccctagcccaccaataaaaagctcttcctcctactaattagtcttttttgctcacgtggcacccaatgatcattgagagagagtttccttaaatcaaatgaaaagtgcagagtttgagaacttttttattttcttccttaaaacatgaacttgatagaatctgatagtccaaattaattgctatataacaacaaatatcattcattcaatatagggtaaacactttttcacttcaaaacaaaaactgttttacactcgatttttatgaatctctacgtacatgacttactaaaaagaaaataaataacatttgtcacacccgggtgcatatatagaatcttactatagttgtattataattgagtagaagaacattggtacattataatagtttagaaaagctaaaatatgtatgaaaaccattcaacaatatactcatgtttgtttcttttattaaggtgtattggtgggaatcagaatcacctgtcctcatatacacatcacataaaaactggctctttgatttcacagcagactaaacatgatcacaaagcaggaaaatatttctattggtgaaagtgacattcctagcttctctttgtaaggtttttcataaacaaaaaataatacaccaatctgggtggcattaggtagggtcatggatttgaccaaatcacttttttttttttttttttttatttttac

SEQ ID NO: 196437 - DNA, 1452 bp, Cannabis indica
ttcgtagtgcaaagtctccaattaattccatcaaacttctcccatttgaatcttgccattgatgacataaactgtttcttcaagaattgtcgtagaaataatcttgattctacgttcttgatcgaataccaagctctaatttgtggaaaaattaagactaaagtgcataattaaatcaactaaaatttaattactaaacagttagcaatgataagaataacaaacacaaagcagtgaacggagaaaacaaggatattgaacagagtattaaaaatttagaaacgattaaagcagtaaaataataaaatcaacaccaagatatatactagttcaagtctgatagattgatgtgatctatggctctactccagttctggaacaccatcaaatcctctttattgatgagcaagaacaggtacaatatagtcgagaggattctatgttggatctctcaaagtgtttcaactctcacactcttgcccaagaaacttcatcatctacaaaagattctttatacaaaaactcaaatccaatctctctcttttctctgtacctctcaatctctttctctctcaaactcaaagtctcttcttgaaattcatcaatccatccttttatgaaatataagtgttggtggtatatataggcttaggataaagatcctaaggtcagtggatgtaactgataagttgttaagttagttatgtcataacaaactttacaaccttctcaaaataaaatctccacgtcagcacaagacgaggtgcttctggatgagacatacgcttcctggacaatagactgaagcgaatgctaaaggagcttctggataggaaaagagccagttagagtcgactatccagaaaactcttttaggaggaacaactagccatttgaaactccttttcaaagaaggactagctttcttgaaaactacatctggagtggacatgatagtcatccggaaacgcccttctggataacaactatcattccatgagactcaggagagacaagttaattagctatccgagaacatacttcctggagacaactaagtttccattacttaaaacagtcttatggagatctttttatttcgaggaactataatgtatcaatatagtgggtgcacgaatccctacttttttgatgctttttcgaaaattccatttaccgttaggtaggatggtgggataagccactgtagacacatgcatcagggggtgttcgaaattctctttgtgtggttttactataaatgtttcttttggcatccactgatccctccgacctcaatacctttcaaaaatgacccacaatcaggcctaatggggcttttatttactggagccatagactctgttgattataacttttttagggaggtttccaaatttaaagaacttgaacgtggctcgtgaaaagtgtgggtgtaacccaatctgccac

SEQ ID NO: 196438 - DNA, 1445 bp, Cannabis indica
gtaatgatatgactcagttgaataagtccattataaccttgataccgaaagtggctaacccttcggctgtgcatgattatcgtcctataagtttgtgtaatgttatatacaaacttatctcgaagacgattgtcctcagatttcagaaagtccttccttttgtgatctctgaaacacaatctgcctttctctctaacagactcattacggataatatcttagttgcttttgagcttattcatcacattaggcataagactcaaggcagactaggatattcggcgcttaaattggatatgagtaaggcatttgacagggtggaatggcaatatttagaagcggttatgctaaagatgggttttgcttcatggtgggtgactttgattatgaactgtattaccactagttctttctctttttcactcaatggagatgtggttggtcatgtccaaccttcccgaggattacgtcaaggagatcctttatctccatatctgtttcttatttgttctgagggtctttcacgtatactgcaatttgaagaatcccaaaggaatttgagaggtttgagtataacacgaaatgcaccatcaatttcacatcttctctttgcagatgatagtctattgttttgtcaagcctcggatcaatctgcattagccataaaacaagttctgcacacgtatcatcaagcctcgggacaagttctcaacaatgataagtcggtaatgtctttttctccaaatacatctgtggcaacccaaaacttttttgcacaaacacttcaaatgccaatcacggattgccatgagaagtacttgggattaccttcttattcaggaagggacaagcaggagttgttcagtagtatcaaagaaaaggtttggaaactccttcactcttggaatgaaaaaattttctccattggagggaaagaagtccttcttaaagcagtggtgcaatcaattccaacctatgctatgagttgcttcaagctcactaaaaagttttgcaaccaattggagagtatgatggctaacttttggtggggtactaatcaaaatggtacaaaaatacattggaaacgatggaactcattatgtaagtctaaacatgaaggaggcatgggtttccgttctttcgtccattttaatcaagcgctcttggctaagcaagcttggcggatttttgatatgcccgactctttgttgagccgcttacttaaacatcgatatttttctgccacttcttttttggatgctaacattggtcattctccatcctacacttggcaaagtatatgttggggaagagaattgctcattaagggattgaggtttaaagtgggtaatggttttaatgtggctgctggatttgatccttggatacccggccaaacaaacttcaaaccagtcagtttctgtggcccttccagcatgatggtt

SEQ ID NO: 196439 - DNA, 4171 bp, Cannabis indica
gccttgcaagacatgaagtcaccgtcacagataaaatgatgaatgcgagtaagcacggattgttgcacttagcacgttcatctccaagtcaataggcaagtgtgttcccttctttaatttatttaaaggaagaaacaaggggtttgaatgaaatgatgaatgcgagtaagccgttcaagctctcaaacatcatctagccaagcctcccatcctatccaagccaatagatggtgaagaactatacatctacttggaaatcatcgagcatgcaactagttttgctttggtgcgtgaggaaggagtcaacaccctgtctactacatcagcaagcgtctcattgggaccaagtcaaggtatctcccattgagaagctagcctactgcttggtcctggcctctagaaagctaaggccatagttacaagctcacacagtgaaggtgttaactgaccaactacttaggcaagttctgatgaagccagaagcatcagggcacctactcagttgggttgttaaactatgtcagtttgagatcacctactagcctcgaacaacaattagaggacatgcattagcagacttcattgttgaatgcactggcctcaacagagacaatcccatgatatgtgaagaccagatccacacgcctgagactacaactcaggaagacactagaccttactggaagttatatatagatggctcctccaacgagcatggttctggtgcttgcctcatcttagttactcaagagggattttgaattcacagggctttgcagtttgagttcaccgcaaccaataacaaagtggagtacgaggcactcctagcaggactgcgattggcactagcaatcaaagttaaatcactagagatctacagtgattcacagctagttgttaatcagattcttagcgagtatcatgctcgagggtcaaacatgatcgcatacttaagcaaagctaaagacctattagcccaactcaagcactactccatccaacaagtgttgcgtgaacagaacgccaatgtagactcactagccaaactagctagcactataaattttgacactcttagtgtagttcctgatgaataccttgccaaatggagcattaatgaagactcatagcctatcctgatgattgacaacactccatcatggatgaccctaattgcatagtacttagaacaaggtattcttccaactcaccagaacaaagctaagagattgattaggaaagcagcttacttcatcatcatggacagattaatgtatagaagaagcttctcaatgccacttttgaggtgtgtcacgaaggaagaagctaaactactcatgtcgaggtacatgagggcttttatggcaatcatgctaggggaaagcctttcaaagaagatcttgagacaagggtacttttgaccgacaatgatagaagactcgatggattatgttagaaaatgtgaaaaaatgccaaaggttctccaagatacccagagctacccccaaatgaactaaaaagtatgcaaacaccctgtccatttattgtgtggggaaacctcataggctcactgcctaaggggaaaggtagagttcagtatgtagtgctggcggtcaaaaacttcagcaaatgggttgaagtagatcccttagccaccatcacaccaaagaaggttcttgatttcgtggtcaagaacatcatctgttagtttggactcccacagaagatagtgttagacaacggagaataatttaatagcaacctctttacgaatttttacatcaaacatggaatcattaagagtttccaagcattttcctatccacaagcaaatgacaagtggaagcagtcaaccaaactcttaatgatacattaaagaaatgtctagagtaagctaaagggaattagcctgaacaactacccaaagtactatgggcctattgtacaactaaaaaaatagcaacaagtcacacttcctttgcttacctacgggtacgaagccatgacacatgtagagctcacacctccatcccatcgaagacttacatacgatcagcaaaccaaccatcaactacttgttgaatccctagatggaattgaagagatcagagaaaggtttaagcttagaaaggtggtgtatcagaaaaaggtcacaaaacattacgaatccaaggttaaagatatgaatttaagcctggacacatgatgttatgacgggtattcctgaaaacaaaagttgtactagcatgagtacttgagcctaattgggaagggccataagtcgtgggtgaagcgcttgaacccaaaacttacaagttgacacgctatgactataacttgaatccagtgccggtaccaaggcattggaacgaggtgcatctacaatggtactaccaataaaagcagctgtctccaaaatagctcacttcatagtgatattcaccttacttcaagtaagtgaattgatcgccttttaactaatgagatgtgacaaagctatccctaggttaataggtccatcgctaaggtatgactcctatgttaaaattcaaataaggcattagcttagcgaggatcacttcagctaagcttggatgaagaagaaattatgcagctactacttcaaagtgtgcttttttttctttcaacttagttcacggtaatgtaattgtatttaatttgttgagaaaaagcgttgagtaaattttttttgtacttcatttaaattaaacaattacagctcacagacctggcaacactctttaagtgctgagtaaagcttgtgagttggtcttgagataacttcaattgtttattaagtgagttaaacattgccacccacaaatcctcgaataagtggagagtactcacacgtgtaacaatactcaagagtcatgatcacgaaggcccagggggatgtggtatggcaagtgaccaatgatgacatttctttgatcacttggggggcacatatattatgttatggtatataagagtcatatgttacataagcattcaaaaaaataaaatttttgcacatctgcgtaagtactctcatggcaaagataactttaagaagtagtgacattaatcccaataattgagtttcttaagacatgggtgtattgtgaaattgttaaacagtcaggcggtaatagataaagtaaaacaaaaaaataagcattggaattgaaattttattaagttggaaataaattatgatttaactaaaataaaattctaataacattttactaaggcttatccacattgagaggctgaccgggaacgaccaactaacacactaaagctaaatgctataaataaaaaagaagaatgggcttaaagaaggtcctggaagcatgttatgtcaacaatagcttcctccctaccttcactctctctaggaggcacacaccagtagaaggagggaagtcaagatgctcagggttgtagccttcaactcctgtagtctttctgacaactggctcaccaccattcacagtgaaatcgatttccttgagagtttttgcatcaaaacgctactcacactgcctgttgaagtttggtacatgtgtgttaaggaagcctttccaactaaatgacttggtccaccattagcagcccaagtcgtctagatggcattgaagcacatgccattgtagaaggtaacatcaaggaggacccgttcttcaagagtagttactttcttctccaagaccttgacttggtctctcagatcatcagccatagcagtctgcttatccaggacatcatgagaggaatctgtaagatcaaaagttttctttcaagcagctaccaagctcttcttcaaagtactttcctaagtgttggtaccattagccacttcttgaagttaggccatctcactctcaagagaatcaaccttctccttcagagcaatcacttggttttcagcagcaacagcacgatctttagcgaccccaagcttcttagcaagctccaccacattcttgtgtttgttatccatggtgtaggcataaccaacacaagcttgaagataagaaaacgctgtcaggtgatgataaaacaaaaaaatttaagctagaaggagacaagacaaagaaatgaccctaaagatgtcagagaagtatctttgagaaatcacatgcagaggcttggtgctaac

SEQ ID NO: 196440 - DNA, 1410 bp, Cannabis indica
aaaagaaaaaggcattagggtgtgtgctcaagacgagcatgcgcgacttttttactttttattttctttagcaaggagagacttttaccttcttcctaaatactcaatgatatcagtagttagagttgatctttttttgacattaaatgcatgtgaagcagctttcctcaacaaagtggatgcagcaatgcatcctaacattgtgggattccttggactgcagcgttacataaaacacaaacacgtaatgatgttaagcgatgatttgtcgggaaagattagcataagacaaagattggagcagaacttgaacaaattaaccttatgcttgtgttcctatctgaagatgagactaattgtcgagcccaggatgtgaatacagccacactgaaacgagcgggagaggagaatgaccatcactcgtgttagaggaaatagtaatgtattccttagaaagacgacctaaaaattaaaaacaatcacttgccttccagaaagtatatcaccctgccccccacagcgtcgaggagaaccatagatactaactgatgtaactgcataaagagtttatatcagaaggtgctcagataggacaagcatgggaaattagtgatgctgaaaaaccaatactagttattgttaaactcttttaaaacaaatgataatacggacatggccatcttaattcttaatccatgaatgaaataaattttatacaaacaagatcttattagggtcatgtaatcaataataggaacaaaaagatacagcgttacaaaacctgtttcgccatcagaaataaggtcacattttcccttcctgaggatagttacaccaccaatcctgatcaagaatggcctcaaactttagtaagttctaaacaacaactagcatgcaaccaaaactgttaatttgaagagtagtatacgacatattataagagtgatatttagtgcctaaagaagtattgcaagaacatttctcaaaagtaacgaccgaagtccgaaatactctaatataagtactattgaagtgttcagctgtgcgacaacccagagagaagcttgaagaagaaacttactgttgcgccagagatagtaattgcccaatagcatcatcatcatttacttcagatcttagtactttctgtacaagacgcttatattcatttacatttggggtcaagacagccaagggataaccactaacaagatccaaacaatttgtaacaagaaaaagtccatcctgtgaaagaccttgcatcagtatacgaatccaaaggtatatgccatagtaaaatccactcacagaaactacatatctgaaatcatgtacatttatttggttacataccccatctaccacaattgggacattagattgtcttgcatgcttcatgatttcgctgac

SEQ ID NO: 196441 - DNA, 736 bp, Cannabis indica
tgacattggtttgatatttcggtatggttctactttagtcagttagtgtggcaaaattttgattttttctttcattttcgtttcaaattatttattaaggtttttgtgagtgtaaattggatatgaaattgtgaaatatagttttatttctttatcgagtttattcaatttgtttttttttttgtgtagcgtttttgagttttgaaaatttagtttggaatgctctttcggcaattgtgattcaacagtcgcgagtgacccatattgttattccaatgaagcaccataaatgagaatgttcaatggctgaggtgttccatacagtgattagggacaaaaaagtcaccactctcatgtcaccgagctctttggtcttaattccaacctttttggtctcatgttaattacctagcctgtagagattttttttttatagagtacaattaataatggcttatttacatgaaaaaaatcaaaatagaaaataatcctctttcaatttataatggcttatttacgtgaaaaaaaaatcagaatagaaaatgattctctttgttgactgagattctctttgctgttatcagattcaaatgattcaaacgaacggttcagcaactctgaatgcagagtagaccaagaagttttaatggcagaggtagaccaagattctcttcaatttttcatttattctatttaaaatgcattatactcattttttttttgcttatttatttat

SEQ ID NO: 196442 - DNA, 704 bp, Cannabis indica
aattctacagcaaaacagtttaccgtttcacgattactcgtttggggtgatttttgggtaccctaatagtcatgtttttttagatatttagggtattgccatgctatttatcgatagagaaactttagattatgagttgaagtccccgaatgtgttttagcgaaacacttacaagatttatgttaatgtgacttagtgccttcgatcgtcgagtagtttttccactcaagttaactggcacacctgataacgtgattgaggtaagattagtataatagatacacatatgcaaatgtttagcatgcatgttttagtttctattagattaacatatcagggtatcggtattgtataccaagggttttagaaatcgatttactatatgtgaaagctaaagaaattgatcaaagataaacaaaatgacaatgaggattttaacgtggttggggtgttaacaagtcttagtccacgagtcaatattattaatttaaagctagaaagccttaaggtttacaagagtatatgaacactatattttgcttgtgcaattgaggattgagtttttaacccgtttgcatgaagggttctctgtatatttatagtaagggttcttcttcgttaatcttttctcaatgatgtggtaattacaagtaacatattgacttgggcttatctaatgaagcccaaccatgaggcgcttggtg

SEQ ID NO: 196443 - DNA, 2264 bp, Cannabis indica
aatggggattggaatattcccctacttcaagctcattttcagcaggacaccattaatgacattttgtccctccctcctcctgatccttcccatccagacgcctacttctggcaacattccaattcaggacactattcggtcaaaactggttaccatgtcgcaaaacaagccaccaacttgactcaaccttcctcctcaaacatggaaaccctcacccgatggtggaaatccctctggagtctcccaataccccctaaaattagacactttgtttataggttggctcaaaactccattcctactgctgaaaagctttatcataggcactgcattagttcccctatttgtcctagatgtactctctgttatgagtcggtgcagcatgctttgtttgagtgcagggttacgaagaaggcttggtcaggtacggtttttaattttgccattaaagacaccaaacacttgaacatattagacatcatcttatacatacaacttaatttttccaaagatgcttttaacctattcctttgtatgttatggaagtgttggaatgcaagaaatgcagctgttttcaggaaccaagactcaagaccaatgtccattgaacaagaagctcaagactatttggatttttatcaagcagctcaagacaagcggggggtgcagacccagtctaccacagacataaacctcttggcttgggaaccaccaccggtgggaacactcaagctcaatacggatgctgcagtatcttctcaccagaatagaacaggaggtggggctctagttcgtgatcacacaggaaaagttctagcagcaacagccttcaatcgaattggacaaatgcaacctcaagtagcagaaggctgggttttgttggaaggtcttaaatagtgccgtgataacggattcaacattcaccatgtagaagtggattgtaaaaacctcctcacggatttgcaatcaacttttggaaacataatcaaagctattcgacggctgttatcttcgttccccactgtaacccttcaccacactcgacggcaagggaatacagcagctcataatttggcacaaatgtccatagggttagataacacttggagttggaatagccaagacccctaccccttccttttgtaacttttaggtctttactttcaaaaaaaaatattatttactctataattttgtcttttatattatttgtcattgagttgtattttgttggtttgatatttatattggaccacaacaattttctagtctagcatatatacccctactttacatgagtgtatactcacccttggataccataaatttatttcctccgtaaatccaatggctcacatgcttttcaggtgttaaataatacctccgagttacataatttaataataataataataataagaagaagtgttctattactatttagcctgtttctcgtcaatttttcatttttttttttgtttttccctttctcggggaaattggaaaattttctttactgttcaaaacttgtacttctgactctgtagttgaagccgttcgcaccggtccttttaggtatggcctttgagctgcgatttttgtttattgttctgttacaatttgattctgaaatgaatgaggttgtttgtgtgttagttgtttagctacgtagaaaccctaaatttctctttctccgtgggttttcgggttttgctagtttaaatatcttttggattgtattgtggatcttggattctgttcttggataaaggttgcggtaaaatttattgtgctgacccagtcaccttggtgagttataattaagagccttgattctcttcttgcgatctgcggttcaattggtttttcacatagcctaagtatcttagttatatgcaaaacatgcgatgcgaatcatatctaaaacatgtgatctagatgaagaaagaggtgtaccaaatccatctcacaattcatgattttatttcttgtgtgccttttcggggaaacactgaattggatttccgtcaactggctaagtataaattcattttatattgctgtttggttacgaggatcatttgagaaaagagtatgccaatattggctcaaactcaattgcttatatttgcgttctttaaacttctacactgtacacttcgattcacagttcaactttgtgtttgcaattgcatgcggactttttgtgtgttgtctggaactcatactaagtgaatttagttttgggtatctttttattgatg

SEQ ID NO: 196444 - DNA, 819 bp, Cannabis indica
tatattacttgatgatgagatgaaacctaagatatcagatttcggtatggctagaattttcactaaagatgtacaagaagcaaacacaggccggattgttggaacatagtaagtagtatgctgcctacattaactttattttaatgctactttcaagagtttaacaccaatgagttgtgtcatgaaatgcagtggttacatttctcctgagtatgttaaggaaggtttatattccacaaaaactgatgtttatagctttggagttcttgttctacagataataagtggcaagagaaatgcttattattacggctcaaatgagaatatgaacttcctagaatatgtaagtgatgcatttataatgaacccttttgtttttgttttgttatttttttattttgtcttgagattaatgaataacatacatgaaacaatgttaggcatatgaattgtggaaagaagggaaacaaatggagttcatggatccttcacttgatgatacacactcatcattcaaggtgatgaaatgtatgcaaatagctttgttatgtgtccaagaagaggcgaacgacaggccgtccatgttggaagtttcctcgatgctaaggtgcgaaactgctgcagtggcagttcccaaaatgcctgctttttcaagaataattgaagatcatcatggaaattatgctttatcacgtccaaatactttttctgccaataatgcaacagtcactgagctggtaccccggtgatagccacagaagcatgtaaacagggccgaccctgagttgaaataagatataggcaaaaaaaatttttttt

SEQ ID NO: 196445 - DNA, 885 bp, Cannabis indica
ttatttattttacctacccaattacattcatcatacgtacatccaactttatttataaaatagcttctattttaaagtcaaaagacattaaataaatattaaaaaatttagctactacattgaactaaatatataaagatagtagcgtatatttagttcaatgcttaatgcatgcatatttttgactttttgagttaaattataccttagagttattttacatactgcgatgggagtgctctaatcggtgatattattaaatgctatcttacttttattaaatttctattcacaaaaaataatgacaatgaaaaatatgtactagtagtatttaatattttctaaaatattttattattattaatagaattaaatattatataccatcctaattacaagaagtttatcaaattttaaatatatacatatttttaagtaggaataaatactactacaaatattaaaattcgtgacgctcttaaaaaacaaatatttttgggaattgtcgctaaaaaatttaagtaactatttaaaactgtcgagaaaaatttagtatttctgacgattttaaatcgtagtaaacaaaatagacgatatttttaaataaaatgagatttttttaatggacttttatacccgacggtttaaaatcgttgggtataagggttcattaaaaaatcatcacctacttttcgtcacatttcctacgtgcccacctactttttctatttcccacatgcccacctattttttctcacctatttcttttctatttttcacaccctaaaacgaaaatcttaactctccaaaaccccacccacgctttcgcaccatcgccctcctctctccccttcttcctcgctctccctttcttctcgtctctct

SEQ ID NO: 196446 - DNA, 1555 bp, Cannabis indica
aaacagtttcgtccctatactattttctttgccaagtcttagtactaatttattatttagtattcaattttgtcagactgaaagtgaacacttcccccagttagtaatcatcagaattcagaacaaattgactatgtaggccagtagggatcgtaagaggaggaaaacgggcgtgtgtcgactgcaagtcatataaacatattttaagagtcttcctagcatttatacaaatggtgttaaaacgacacaccaattaagttttccatattgatcagtatagttgtaaattacgaaattagatccctaaatttattgagtaccagtcaattggtgtcggtggatatataagcagaggaatatttatgtgagtggtagagggagtatatggagaaaggagcaaagttaagttaacacagcttgttgttacttgttattagagcaatttaataaaaagtatggacaacacttgtatgaatatcaattttcatcataatattatttgtcaaggatgatgtttagtgtaattagttagttagttaactatggtcaactaattaacttaattagttagtgttgttaggagtggttgttagaagttagttagaggtagttgttagcttaatgcggtatataaagctttgtaatctctaactaatcaatcactctttctctctcaaagactaagctcccacatggtattagagctctagtcgttcttcaatggatattctaacttcttcaattggtgaagcattaagattgaacaatacttagctacacaacaatcaacaagtttcactacctaaattgtaccatgtttctttcaatcattccctatcaattaaacacgatgagtacaattttcttccctgaaaacatcaagttcttgcctcgagcaaaggcagtcagtttcaaaaatttcttgatcctactcgagttcctgcaaagttcttgacagttacaaatgagcgatccaacaatttcaactctgagtttgaagattgggaacaataaaaaaaatctacttgtctcttggctactctcatctatgttcgaaaagagtatcaatagaataattagttatgacactactgcacaaatctacaggaaatcacaaagtactacataacttagcttcgaaacattaagatgacaaggtcactcagtgattatatgctcaagatcaaaggtatcattgatctcctagctactattggccaccctcaaacgtctcaagatcatatagaagtcatattcaatgggttgtcgtcgaagtatgatgtgtttgtcacgtccgtcaccacttgaaaagatgcatacatattgcagagattgaaaccttgttgatggctaaatttattcaaatagagaaaaaagccaagaatctctcgcaacaaaccctgggtccaattttcgtgggcgatcatcttactcaacactacttgtacctcttagatcaattttggctcaggtcgtggtcctatcagtccatttttcaacaatagtggaagctctcactataatcccatggcatgtggtggtccctcctatggtc

SEQ ID NO: 196447 - DNA, 970 bp, Cannabis indica
agcacacacagaaaaagtaataatagagaatgaaatattacataatttacgcgtaattgtacgcgaaactttcaacaaagtacatgccttgttcatatactgaaagtaacactaacactggagctacatagatgaaaacgagagatatatacaaacaagaagcaagaaaattcgaggctataccccttatcagaaaacagctcacacttgattcgtttaatttgctttacatcttgatccattgacccaagaagaagaagataccctgaaaaagcagccgaaagtaagttggcttgcttgccccactaatgtgcaagatcacgtaaaagatacatagatggttttagaaagaaaacagttcatccataaagtcaacatggaatttgcccctcaacggtatgaagctgttcaataattgaaatgaagtaatctagactaatgggagaataaaaagtattgactataaacattgagaatcatttcattttcatcctttttgtatggtccttattgttccaagccaacccaaattacttggctcacggtgtttctcgaggaaacttattttgcatcatttttttacccaatataggaagcggattccatcacaacaaaactggtatggtatctaatttgagcctcggtagaccacaaaacaaggccattcctttgttcttagagttgccagagctctcagagactagtactacatggcctaaaaatccaagaggtacaagagtatccaaaaccaaaatagaataagactgtattctacttatctcctagccctaccaacaattctaggtagcgtttagttgagaggattaaataggaatgagaaaaggaatagaaataaaataaaatttaagtacataaaaaaaattgataagaaaatcattaaatttttctcatgttatattggaatagtcattctttccattttaaattagagtagtcattctactaaaat

SEQ ID NO: 196448 - DNA, 2359 bp, Cannabis indica
actaaagcggtcattacactaaatctcttctttaaattagtgtaaaaaaattattaaatcatactttataattatatttctcatattgttttatataattttacttttctcttgtacattgatgttgtgtacgattttagtcaacttacattgagttacaaatagtatgtaaacgttgataggaaacagaatacactaatgatgacattaggtttgttataggtgttcgattctaattttagtggtaatagcctactcccattttagttatatttttggtatattgaagtcaagatcacaaggtagcctaggtgagtttcttgagaatagagtgattataaatatatttcagaattgtttctacgtacaaaggttctaatcttttttttagttgatggaagtctaagaattatagagaaaaggaaatctatcagcattcactatacatgatctacaccccaattaatattaattgcattaatatgcaccctaatcagcttccttggttagtgggggttgggtgagcttgaatcttgagtgttggagggtgtgcttctatctgggtcttcacctccaggaggtagcacatgtgttcaaccccctatgggcaatttaataatttcgtaggatctctgtaggactcaaaattaattaaaatattttaattaattattcttaaataaactcagttattatagacaatcttaaaacccttaaattaaataaaaaaatttattaacctgttcttaagtaaatattttatttaagacaatataattattactattatttttttaattatttataattgaataataaaacccttttatcatttgattaaactttaagatgataatagtcttaaacaattaaagtggttatagatttgaatttgaatttcaaatctaaaacctaaaaaatatttatttaacaataaaattaatttaaaaataaatatccgataaaataatataattactaaaataattattataatttatagtgtatatatatattatatatacaccatatatatactataaattatatacattatattatagatgcgtaatatttatataaatacatatatattgcatatagagggtctaccactgtggtcggcagctttgtgagccaccatggccacggtggccatggtgaagcagttcgagtagaccagcactcataggcggacaagaaaaaaataggcgggtcaaaaagacccaataacccaagtgggtcttttctctctttatcacgacaagggactaccatctttttttcattcattcgacaataatgggtttagggatttgaattccttactgtgctccatgaggatctgcgacacccaaaactctagggaaggatcgagagctcctactgaccccaggttagaaatcgaacctcttagcccaaacaacccgttcatgatcgcaatatttgagatgtccaacttccatcactctcacatgcctccatgtgaacatacaaacatgtgggcacgaaactcgagaccactatggatggtggttgacatcttcatgcatggccgaagtccaatggactcgagctccatgtaatgatggttatggtgtgcatagtcgggtttcaaaataaaatcaagctcacatgcaataaacattacatcataaacacttttatgtaaaataaatttacataaaaattattatgccctttaaaggcttgcaatattttttagaaaataaataatgaaacctacacccaatttttaccaaaaagttaacgattaacatctcacacatattcacaatatcataaccatccattcacaatatatatcatacatatataaatgcataaaacttacacaatatataatatatctaaataatgaaatcactctaaaactatttattagttttatagtactaaattaggtacgtagcagaatcaaagtttttgattatcatcataccatatcatcagaattgccatatgtatatatagtatatctgaaagtaaactgacgactaatccatgatctgaacgagtcccacatccaccatagtacatgttcctcatcactgaagacattgataatttatctcttgaagcctactagggtatcctcgagtccttttgtatgttgtatccttagttgatcttgatatactcacaccgtagtcttctagatcttccaccacacacaaggactagtgtgggctagtgagattaagtgtatacaaagttgttgttaaattctcaacgcatgagcaagaactattctgtagtgatgatatagagaaaagattgattagattaatccttttagacttacaaaaaaaaatactttatcaacttttggtctata

SEQ ID NO: 196449 - DNA, 2715 bp, Cannabis indica
aaaaaacgataatacttttttattaagcttatagtgatgatgtattatggaaactcatatttgttgtagtgatatttctcgtcaacaagctaccataacaaaaaatgagactttaactaattggtttgcagagaaaaataaaattataataatttagtgtttgataaaaatttatgtattgaagagtgagatatcgtattgtaataaattttggttaactaataataataataataataatattattattattattattaaatcaagaaatatctaattttattaattttaattgtaagtcctctatctcgtaattttaaggctcgatttgacttagaaaactttcgaattgtgatataactatttttataaaatttatagatctttgaattatctttctaacaccactaaaatcacctcaatcgaaattataaaactccagatatggtagttttgctacgacattttttaaatttgcgaatttcttaacattaattccataataatgttatttgataccacttatacaattaattaaagggattatacacaaaatttataaaaaaaattacaaaaatacggttgtacagaattttgtatatttttacgatttttatgattttatttacagaaaatacagttttttgaagtatttttatgttgtactcttgttcgtttgttgctcattttttgttgttgttttaatattattttcatgttacttttatgtaattttcttactattttggtgctgttatataaataaatctttgaacgtaaaaatttacaaaaagtgtattatattattctttaattaaacccactaaataaattataaaactctaataaattttcatattgggctttaattaaatgattgtctatcttgtacaaaaataccattatattttacctcgcagtaattaccactttaactatctttaaaaaattgccacaactactctaaacaatattctcaactcactaacaatataaataaataaattaattaaaaacaatataaataaataagataattatcttcgcataattaatatttaaaaaaaattaaatattattttaatttaaatattataatttttcatttataaataattgcacactaagcgcaatatattcatataccttcctcatctcacacttttcataaattaataaacagaatatgtactcttgtcgttcttaatgttcgtatttggttatagtactgatgagagctatatttattatgtcttgtgcatatattgttatttcacgacctagtctctgtgcaatcataggtagatcagctgtgcactcatttgtaggtgtaagacctaaaatctgtacaagaagtgagctgaatatgagccctaacattttgatggttcgcgactatctagtttaggattggtattgagagctaagtgtgtctagttgacatgtgtgatgatatgcatttgaagcttgattttgtgattatttgcgatctctctattttgtttatacattttgataatggtgatgagttatttattattatttttttaaagctaaccgtagagaaatttttatttaaacaagggtcttctaatatattaattattttccaaatgggctttataagctcactctctattttctctcgttctaggaattcagtttgattttagtggatgaagatagtatcgttgaggaagaaagtcgttagtagtttagtcttatctatggttaatgcttaccctcaaaccaagttgttacaacattaataatgttcaagaatgcacaaacaaaactaaaaccaatcacaaatcaaaactagaacttaattgaaattagacaagaaaacttagctcgataacgaatgaatgatgaatcttcattgagaaggaataacaagtagtacacaataggaatgagcccaagattacaactcagcacagtaaagtattacaaagaaatgtctcacattgagggaaatcacttcaagagtaatactttcattacatccatccacacaccctcactatgatcttggactctctctctctctctaaacttgaatctaaaactaaagtatgagcttggagattagagattaattagagctcagaactccctttgagaatagagtaacacttatttatagttgttatgactaacaacaactttcttcatatttctctgataagcatatagatggacctactaacttgacaattaagtgagtttaatccaaacattatcctatttatcaaattttccattgaaaaaacttattttgtacctatttaagcttgaatggatggtctgaatgacttaaaatagctatgtactagtcagagaaaaggagtgacagatgctaaatatttttgtggtgtttattaactttattaaatctatctacaaggatcaaaatgtaacatttgaccaccgctagagtcgtgacatcttctatgcaggcgtttgggttattctcacattagcgtgtttatctcgcaagtttctaatgagtatgttcttaatgatagttttcacgtttgaaagtcactagtatttctatttctcattataagcgacttaataatactctatagtacattttttagctaaattggctctctcaatagagaattctcgtctctaggggttgggtttgcctaatttattttaattcatcatgcttgttgattgtttgatctctttcaatgaaat

SEQ ID NO: 196450 - DNA, 2382 bp, Cannabis indica
aagttgtataacaattcaagcttggactttgcttggaaagatcaaggggttgaagagtcactgggagtagagcaaactttaagcggtccttgccttctaggaaagatggttgaagacatgcaacactcccaatgatcttccacacgtggggagcaagttggcgcgtgtctcccgagcctggggaaggtttaggtggtgcatggttacatccccagaatctcccgggcagtctgtctcctccggcgaagcgcggggcatttgaggaactctgaaggaaaaactttcaacgagataaccatgtcacaagggctcccctaattggtttataatgtcttgagttgcttccttccaatgtaactcgtggtttgcagttacaccaggcgacaagaacggtatggagcgaacttttccaaaagttgcctacttctaccaacagtaccataaccgggcctcactggtaacccagcagccgccgacgatactgatggtctcctctcagcagccgccatcgcaggatctatttttgagcaactttaccacctattgaaaaggcaggggaagtagtcgtcgggagacagatccagtcctcgcactagtcccgacactagagtttttagctggttagagtcgttgcatctgacgatactttctgagttggtcactgtaactacatcgggtcatagcttcttcgtctgcccctgatacctcttgcactactctgtttgcgcatagtgatacgatgggggatttgagccggaggatctcggcagttgatcttgcccctagagagttggttggccagatctgagcttttaaggacggatatctgtgcagcaggtgtactaagactgtgtacatttgttttcgccatcttccttggtcaaacttcgccatcaagtctttttctgggcaacacctcagatctgcacatatctgacctttggccggaccttggtaagtggtcagggtgtcttcctttttttcttgcacggaccttcttccaaatgggcttgtactggtagccgccgtgcatatctctttcttcaactctcaatgaaagtactaaaatatttaacgagttttttgaaaactgaataattttagatcctaagaaagtaatgaaggtatgagtaatacaataataggtaaaagatttttacgtggttcaggtgttaattgttcttagtccatgagtctattttattaggcacttcgggcggagattgtttatacaaacacaaaatgatggacttttttcctaattctctatattcctcttgaagaataagaagcttagtatgaatattctggagttatcagtagggttacagtatgatgtgtttccttttgtgaagaagaggtctcaaatttttcagtgagaatacgaaggatgggtctggatcccttctcttgtgccctagttggaatatttataggccaattccacgacgcggatcgtcttgaatggatcttcatagggatgaacccccaccgttggattggtaggtggcacattttccaatgtcagatcgtactggctacaccggcggggctttggacgcgtgtcatctcagggttattctcatttgaatttctcccatccctacatgttggatcgcttagcacggtacgcaaggacaagtgtgctttgcatggtagtatggcgtgggagacaaactctgacatcgtacttggagaaaaggcgtgggcagtgggcccgtagcctggcatgtacggactgaactttcgcgagttgaaagcgtatcctgaattgacgcatcctggtggtaggcttgtaccctcgctagagcaaaaggttctgtcttttgaaatggagaacgtcagtggctcgcagacatctctatcgtggccttttcctgggaagacttctctcgtgggaacttgttccgcgagttttatgttgcttccttcccagagtgcaaagcagggcacttaggtggcttaatgactcctcgtccttcattaattagtgttcgcatgtcgttccgatgaaaatgcagataacagttctaatttccttccgcataactttgaagaatccaaaactatacccaataggatcaggaattttaaccgatggaatgctaaacctaacctttttaacatctccccccatagtagatccttaatcgtaccacattgttgatctaaatcaattttattgccaaggtcaatacatcctggattaatatttgttgttatcgaactttgactacccatacaacttttgaagtgatttagatagcgtgcaataatctctttgtaagagtcaacaaatctcccctgtttatcaatagaagaagtaacttttttctccactctcctctttttaagactagctagcaagaatataagaagtgt

SEQ ID NO: 196451 - DNA, 989 bp, Cannabis indica
tcatttgaattgtatttcaatttggcatgattttagtctgatcaacaagccatagtttacttgagatgggtgtagaatttagtaattaggtagttatagtaagaatttaacttggtaatcttaaatattctagttccattaccttacatgagttttgttttgacttagataagttgattatcatgaatttagacttcaaattggtcttttaccaagcaattttaaatgttaatgataaggcccgattcctctcgtacaagaactattagagttagtcctacattgataatgtgtgaaaattaatcgtcatatataagatgaatgagttactcttcccattgctaattagttttgagatggaacctcattcatcttatcccaaattctaatatggtatcaaagccacttgtaatctgttgtgagcccaaatgccattggtcttttcgtgaggcacttgtgtctctgtttgttatacccactttccaggcccaatagcagaaaaatagagagaacttgtgtatagattgctactagaatagagaatatgtagaaaaatgactctcaagtcttgcataaactctcccactctctatactcacttctttatactattctattctcaatcaaaaactatccttcactgcaatgactaactactctttcattcaatcctgggtttaacgatctgtatttgtttctttctatagagactcatacctctgcttaagtgaggttttaggtgtgtgtgatgaatgggatgatatgcctcttataagctctatttatatttggtttatgggaaaaattgatatgctatgttgatcatttgaatgtagcacaaccttatacagttgttagttcaacaagatcttaatatgcaataaatcattgaagtgaaccattttacaatcatatctgcttaaatttttttctaacagaaaaaaagatagtggtattaatgcggataataggattccatgctacgttct

SEQ ID NO: 196452 - DNA, 611 bp, Cannabis indica
ttttttttaaaaaaagtaacataatatttatagctcaataaaaatacttttctatatgtagctataaacactatgaactaaatctttgagctataatagttcatttgatggaacattattttttaccacttacctaaaactttttaactattttacctttatattgtgggtgctataaaaggagtatttgtgaaaaaattgtgaccaatataaaatacatttttttttatatttattattatataggaatttttaggttattttaaaaaaattgtgattatttttgtttttaattactatactaattgtgattaaaaaaattaatgaatttatatttgaatattactttttagtcataagtaacttttggtgtgactaacatttattcataaaagaatcactaaaaggctgatttcttttagggttattacttgtaataacaataattattggtataactttaagtacatatatacttgtatacagaaaagacaaaaagattaattaatatagatgatatgaataaaataataaacatgggtatcaactacatatactcgtgatcatagattcatagacaaataaggtcaaattaatcaactaactttttt

SEQ ID NO: 196453 - DNA, 1717 bp, Cannabis indica
gttgttttattttttttttatttttttacttaaaaatttcacatttaattttttattttaattttttttatcataataatttaaaatactacttttatttttgtttgataggtattatttttaagaatatgaatttaaagaaaaaagtttaaaaaattagtacaattaaaaatataaattttatataaaataaaaattatcaaaatggggtgcctttagaacgtttttggggtagtaaataaaaattttccatttttatagtgggaggaaaatgacagaaaaaccattgtgagtgtccacacgtaggaattttgctttctctttaaatgcttcatcaacgtttctcattttaccgttcctcatattcaggtactttctctcactctatcactctacctattccttttcattcttctgggttttcactctcatctttttctcacattaatcccctatctccattttccttgtttgtttcccgagaatatgatgtgcgttaaacgaaatactgttattttctgattatctcctgctgtttttttttcttagaggtactgagtgtccatgtaccatgctgtttggttagtgagaaaatgaaggaaaggagaaaggttttttcagtgtttttgagtttgagttggtttcaattaattaataaataggactgagacaacattgatatgttgtcctttttgtgtcctttttcttaaaattacactagtcaaaatcttcgttttcttttttggtgtgtggctaagttgtggatctcgatatgtagaatctggagatgggtctgcatttcgtagtttcattttttttttaatttactgttctcacattggttcttgggactttttttttcttgttatccaaacagatttttgttgggttttcctttcagatttttagcaacttgagttcacttcggtgttgtcaactagatccttgaaggattactcttgagaaatgtcttctctgtcgatttactttcactttcgattttctccttgctttttagtgttatatacttatttttttttttaaaaaagaattgatattatttaaagctgcctttatggctgtagttggaatactttgatacccttttgtgagaaattgtgctttttgtgggtttagtcatgagtagttctgctcaaattatttagatctgtatgggttttccttcctctgaaagtggattggttttcttggaaagattttatttttattttggatttcttgtaggctgatgccatattagtattactatgctctttctgggaatgaatctatgattagatccttgattgcgattttggaatctttttgggtcttagttgagtaagtagctgtatagtaaatattgtatttttaatcattgtgatttttagtggttggggaacaaacacatgaacacatacatatatgtatgtgtatggaaattcttcacctgtcaatggccttacgtattatgtatttttttttctgtgttggacggatctagttgcctcaaggcatatgggaactctacatggatatcatgcattctatgcaaatgtattttgtattgatgatattgatctgttgaaatctctgttaaaaagtgttgtttttcttactagaattttgctaattcacttggtaaaattcttttcttggtttgaggtttgcagttgctaaaaggaaaactggcattctatgcaaatgtatttttgta

SEQ ID NO: 196454 - DNA, 1888 bp, Cannabis indica
gaagtgaaatgggaagaagaggccaagaattaccacaagggtttttctttctttattacgtaattgcccctaaacttataactattttatttaggctaattacgattttttccacgttaaaaattgctctgaattatcgagattattggatttagtaactaatatctaatttcattcaatttttgctcttatggcaattgtctatatactaaaattgtacctccgaactttgatatttacaaaactatacccctgaactttatacatgtactaaattgtgctcttaaattttcatccacatcatactttcttcaataaaattaggtaaaagtctttaaatttaacaatttcaataatttgaggggaatttttaatgaacagaaaatttcaagggcatgatttcgtacatgtcaaagtgcagagagcaaaaatttaaattagacttttatacttttctaaaaatgttgcatgattttatttgtttgggaaatttgagtaactcatactcgtgactttctttattaataaatcatgcaattgtattaataacaattaattaaaataatagtttgcaatgtaatcgggacatctctcctgttacgatgcgactcccaaattgtttggcaaaaaatcaaaaaataaaactaaagaaaaagattgcagcatcatagttaaccttaagaacacatatcttcagcttcatctaccactcagaagatacaacagtagaaattgttacagcagacctcgtagcttgagcactcaagtattgtgcaatgtacgcatctgcactactaacaatcccttcagtcgtaaagaacttataatttccaaccactaatagtgattttgtggcgagctatcgaagaatgaagaagacccaacaatgaaacaaaacaaaatcatttcatatagacaagactaaaacactcaaaatcatattacagagacaagactaatcacaatagtaaaaattaaatcgcaatagcagaacacaacccagaccaagccgcacttataccctgggtaagttggctggctagagaaaaagaaaacctcttgtagctataaatttagaaacaagaaacccgatagaaatataattttaggttatttagagttcatactcacgattttttattttacacaaaaaaaaaaactttaagtctcaactttcctaggttttaggaaaattcaacaccattgagcataagagcactcataaccgtactaaaaacacgctatatgagatgctctaaactctttattattcatgctatgcatttatggaatattatttattgctctaaatatattttattaattattttagattttaataattatttttgtacgaagatatatgtatatattaatattatatatttgaaatgaataaaatataataatttttgtttttaaaaaaagtgagatgtattttaaagaagttgatgtatagtacaatgtaagagtgtgattttaagtaaagaaaatagaattttagtaatatattttaaagaatggagtaagttttggtaatatatataataaattttttaaaaaaatgaagctttgttaatatattttaatggatactcttttggtacttgtaaatttaatatttattataggttattttgatgcaatgcattgatatacatttttttttataagtgaatagttataatttaaatttttttaatgtaatgacatatattgtagttattaatatatattgaatttttttgagaatttcagaataatttataataaaaaaataagataaaataatttattccacatgtttataaaataaaaataacatttgcaacaatttaaactttgttttaaatgtaataaattattttgaattcaagatatcttaaac

SEQ ID NO: 196455 - DNA, 1879 bp, Cannabis indica
aagaacaacacctatgagttggtcaaacttctaaaaggtaggaaggccttgaggaataaatgggttattagattaaaagatgatgggaatggaaacctggtcaagtacaaaacccaattagttgtcaagatttttggtcaaaagaaagggatcgatttcgataaaaaaaatttccattggtgaaaatgtcatcaatcagaataatctttagactagcaacgactctagatcttgagattgagcagatggttgtaaaaactatatttcttcaaggaatattagaagaaaaaatttatatgcagcaacctgatggttttgaggttaaaggaaaagagcatcttgtttgtagactgcataagagtttgtattgtctaaaacagactccataatagtggtaccaggagtttgattcattcatggtggatcgaagctataagagattagctgtgaatttgtgtgtcgacatcaagaaatttcataatgagaaataaattagctgaagacatgttaatagtcagcctggatggtaagataataaatcagttgaagaaagaacaatcaagagtctttgatatgaaagacttggggcagtcaaataaatcctaggaatggaaatcatttgtgacaaaccttctcaaagattatggttgtcacaggagaactatgttgaacgaatacttgagaggttcaacatgaaggatgcaaagtcagtttctttgacacatggtagccagttcaaactcactaagaagtcatgtccttctttagaagaataaaagaggaagatgatggcttttccttactcttcagcggttggaagcttaatgtatgcaatggtttggacgagaccggatattgctcatgcagtaggagtcgtaagtcgtctccttgtaaatcgagggaagtagcattgggaagctgtaaaatagatcttcaaaaatcttagagggacatcaaaaatgtgcttaagctttagcaaaggacgaacctaagtttttgaagggtatgcagatgctgatagtggctggtgatcttgagtggtaaaaagtttacgtctaggtatatgttaacttttgcgaaggggagatgtgtcatgacagtccaagttagtaaaaatgtgttgctttatctaccatagaaggacatcatattgcccttgtagaagttgagagagaaatgctatagataatgaattttctacaagaattgggtttgaagcaggaaagttagatgattcattacgatagtcaaagtgcgattgatctgagcatgaatgctacttatcaatatagaacgaaacacaatgatcttagatatcattatactcatgacgcactaaaaaagaagttattccaagtgcagaaaattcatacaaacaagaatgtagcagatatcccaacaaaggtgattcctcggcataagcttgatttgtgttccaagttttgacttgaggcatatgcacatattcaactatgcatttaatagagattaatttttgtgtcttgttcatgcatccaaggaggcctatcaatagaactccatctctttcatttgtttatcgcaccacaactatcacaagctattccaaaagtgaagagtgaggctcttaaggaaaaaataagtgagaatactgcttagtaagagaaatctaagagagtgagaaaaagagagttcctacaaaattgtgagaaatattttgtagagagattgtgagattactacactagtgaatgtgagacttttgagtgtattgctcaaatatttgtcaaaacatgagagtgtaatatagtgtacccattattattgttatagtggaaggtttatcgtggttttatttgacacgagataatttcttggcgtgtctttagtgttcggaagg

SEQ ID NO: 196456 - DNA, 1069 bp, Cannabis indica
tgatatttcactttttctcttaattttcaacaaaattgtatattgcatggagcacaataataaatactgtagcaaatataacatttacttttctttttgggtataaatttagcaattttgtttttgataagtgtataaaatttagcataatattgacatttgtagacaattttcaatggaatgtgtaaattttatgctaaatttggcttaaaaaatgatgaaaccttgtagccaaaggctacatgcgccaattatgatgaaactttctctcttgttgcgatgtttaaatccattcatattcttttgttcatagttgctacttatgattattagataaggcaaatggacgtcaagactacttttctaaatgaaaatcttgacgagatatttatatgaaacaacttgaagagtacaactaggggaaaatcgaaagatatacaaattgcttaaatatatttatggataagcaaacctttagatcatgaaatatcacctttaataagattattaaagaatatgacttcaaacaaaatgaagatgaaacttatataaacaaatacattaaaagtaattaatgtagtggtattcctaattctttatgataaaattctacttattgtaaacaatgtagaaaagttataagaagtaaagaagtggtgagccgaacaattccaacctcatgtagtgttatattgtttactattaatacaatcaacttgaatgtcatatacaatgtagaagtattattagatgtcaaattagcaggaatatcacttccactaataacacaatcaacttgaaaagaagatgctctaacaagagagtatgagcaaccttataccatatccgtagatcatttaataaaaactaaataaaatgtttccacactggtatgatataggcctcgcaaatttatttatgaacatattttcctaattcatactaatggaaatattatcatccttatatatcaattaggactgttcatataaatcgaaaaatcgcagtttaaatccagaccactataatccgaaccactgtaaactgtaaccggaaaaccgtttttggt

SEQ ID NO: 196457 - DNA, 575 bp, Cannabis indica
gaatttcttgattcagttagtttaattttatttttttgtaaagtagtttttatatactgtctaaagaactatttttgtaaaattaagaaaagaattgttttgcataataacataaattattatgttatattcaccaactattattcaatgaagtaatattgtagcacacatactctctatacctatatatatgtaaagctagcatagttattataatgtaatatgtagttaaaatatactattgcatgctaagtacatgaatagtgataatcggtcttaaaacatatatatatatatattgatatagatacacctaactagtattggtatagagcttgagtcactgtttggaactatatttgtcattatcatattcatttggtccctcttgtaaatagatttttgacaccctgaccagaaataaatatgaacaaaattattattattattattaaaaaattgaaagtacaatcataaagaaaagtgacaagaaaattgaaagtgaaatcagtactgtttaattagaaagcaaaatatattctatactatattgggtccctttttgtttttttagt

SEQ ID NO: 196458 - DNA, 801 bp, Cannabis indica
ctaaaatactttttaaagttgttcgggagaacgatttatcttttaaagttgatgcatctctattatattataatttatactaataatgacttaactggctaatttacatatattaaaaaggaaaacctgccacccatgtggttagtttttggtttgttaagaaagaatgtcagtatgaagacaaataaaaatcagactgtgctatgtagcttagcacattatatatcagtataccaactaccaagtactgaggccacagctaaaaaaagagataaaaaccaaacctgtttgcatcaactcttgatcttttgccagagctatttggttcatccaaattcccttgttcccttagtccctcatgtacagattcattagaatggccaaataatgcaaccattttttgcacccaatacctcgggggtggtttgtcactatcagcccattcataatccccaccaggattgcgaaaacagtgaatgaaattgcatgctgttcctcgcgaacatgtctgtaacagcataggaatgattatcaaaacaaataccgaacatgtctgtaacagtataggaatgattataaaaagaagaaaaggtatcatctgaaattacaagaataagaagaaattcctaagatcttaaaacaaactgcccttaaagttttcagaattatccccaaatagaaacgcaattgtaaccctgtgccaaattgaaagtaagtccccctccaaatgaacctaagttttttaaatactcaatacaaagttaaagtgtagctgagcacaggaatgatgatcaaaacaac

SEQ ID NO: 196459 - DNA, 2043 bp, Cannabis indica
gctattttatcagtaatagcattagatggacaactagaccagccttctttgataacttgtgcacacattggttcacggagccaacaattctcaaatctaaatctctttttaggggttgtagtatcaaaagaattaggaaccagtaagatgggagtgtggtcagagcttgaagcatcgatattaaacaacttcgctgagttgaagtggtctaaccaatcctgggtaaccaaagctctgtctagtcgtgcttcaatccaattagtcgttcctctactcttttcccaagtgaagggataaccgatcaactccatgtctctcaaattgcagtccacaagagcttgattgaagtcatcaagtaaccagattgggtatgcatttccgcctctcttatcctcaggaaaacacacattgtttaagtcacctataacacaccaaggcaggttatatctagcagataaggttcttaacatatcccaggttcttgatcgaaggtttctattaggttcgccatagcatcctgttaatctccacaccatgttatgattacaatgaacactaacatcaatgtaagaattagagtatccaagcactttgacatcatcttcagttttccaaagtcaaaccgattccaccacttctaccaacaacatcaatagccaagagaccatcgaacccaaggctgacacgaagcctttcaagaacatcttttttacttagagtttcacatagaaaaatgaatttgggcctcttttggatcacaatatcctttaagaattgtaaagcccgtgggttcccaagcccacgacaattccaactaaggatactcatgaccctaggtgggcctggaccccagaacccaccttttgcccattttttgacagcccactagaattatccacaatcatatcttcatcattctcacttgaattttcaattccatcagcattagtcctccttcttttagaatctgagataattaatgtgcgatctcctatgtagccttcaatttcgttagattgaccatgacagagcatattagtattattgttactgtcattcagcattacttgctgatttactccatgatttcctcttctgcccacgatctcagcattgacagctctgacattacaagtgttgatactgttatcttgagaattaactgcattaactgattctgtgttcacatcttggacagttgtagcatcggaaaactgggcatctgcttccgttccagtacgcagccaccgtgagccagcatgattatgtcttctccttggctctgctttcatccaaatgccatatggtttctctatttcttcaagtggtttatcgaataagcgcgaacagaacctctcagtatgtcctattaaaccacatatgaaacaaaaagtggggagaaactcatacttgaaattacaccatatccattctccatttgtcttcttcaatttcatccttctttttagaggcttctcaatattaatggtgactctaacacgtagatagtcacgccagatgcccatgaaattcttaggatctgacttgacaaaggtacctatgtaattagccacattcttcaccacaacatctgtcatgaaaccagttctgagattatgcagctgaacccacaaatccattcgagtaagtatgatacttctcggattttcacctttcttgagtctttcaaatatcaattggtttctattgaaagtccagggactgccatcaattactcgctgaatatcgatttcgtgatagaattggaagatatatagattgggctctaattctttgatgaatacacctttgcctggttgccatagagaggctagcgtatgtttcattgcatcaacatctacagatctccttgttaaaaatttccccaccaaacaccacctatcatctataggctgacccacatcttcaatggaatcacacagtagttctccctcatcttcttcttccagatgtatagaatcatagttatcgtttagtgaatccacttgttgactagaagaagccataagacaaagacaaaac

SEQ ID NO: 196460 - DNA, 883 bp, Cannabis indica
tatactacaacgacattgttgtcataaaacaaacattttaactaaataaaacaaacaaaaaagaacacgtaaacgacaatttgaataactaaatgtcactttagagccgacagagatatccactgccacgtcagctgtgcacgaacgtaattaacaacatcaaacaaggacaaaaatggtaattcaagtagtctccacaacaagttccatatatagcttggagggcaagattgaagagggtgtaatgtccccaccattaatttaccattatgccactctgtttccgaagtttctctgaacaaaaatttaaggttcggagtcaggtttggtcaacggtttggactaatgttttcacttgttaatgtcctcgtttctttgaagattcttttatccgaagcttaggttaggtttccaagcctatcaaacggcctcctaagcctaattttcccgcttacacacacacatatagtacatacgttgtcacttcacttgggtttaacttaatcaagaggagaaacggaaacagtgagagtagagagtgtgctcaacacaaatatattcataaataaaaccaaagctgagctgagctaaaagccagacaaatattctctgtgtttgacttggtgttctggggttttaagataaacatatccttttgtcttgttgttgttgaagaaaatggaaaggtaagatttttgatgatgggtaatgaaaatgatgatgatactcatcaatggattggattggaagaccaaagtttctttctttttgtatggttttgaatctgggttttaggttttcgattgattttcatggggtttttcttaatccctggttggattttcttttgggtgaaaccaacttttggtgggttttttttttt

SEQ ID NO: 196461 - DNA, 1577 bp, Cannabis indica
atggaggtcacaagaatcaagaattaaagagagaatacatagacctatttgaactaatttcagactgtcacgtcactgtctcattcttttcttttatatatatatactaggcgacaactacatgcaaggcaccttatacatatatattttttggtttgcttaattattttatttaaaatatttgatttaataatagaaatattatttctaaattttattatatattttataagatgagatgtttaatcatttaaaaatattacataggataatgttgttattctaatttttataaaattagttacatgttatttataatctaagatgaagatttaacaacttcttcttgttttacttattcaatagagtttacattgaaatttttgtcttttgagtctttatcttctcttgattagtataaatttatagtatccaacactctgttgacaattcattagaaatactttcaatatatttagtctttttttaagaaatatattataaaagttagtattaattagtccttgcaaaaccaaagaacttatctatgcaaatctacagggacacaattagagattgaatcacaagacttttcaaaagttaccaagtcttgaatggagctttactatttatagagagatgattacagagttagttacaaggctttgatcaagaaaagaaataacaaaaaaagatgacagctaatacaagtggcacaactaactgtttcaactaactcaatatactgtttatcatcccccctcaagtgaattagtgagggacacactttgagcttgtctttgaggtagtgaaaacaatcagttgagagacacttggtaaggatgtcagctatttggtcaatagatggaacataacgaacctttaatgtcttggccaacagttgatctctaataaaatgttgatcgatttctatatgtttagaccgtacgtgctgaaacacaggattagctgcaagtcatgttgtactttggttctcaacccaaatgattgggcatgctagaagagaaacctgaatttctttgagtatttgtcaaagcacgaaattcactctcagtgcttgatcgagcaactacttattgcttcttagctgaccaggagattaaattttcaccaagaaatatagcataaccaccagttgattttatgtcccagtcagcatctgagtaagcttggagatccattcttgcagttggttgtatgaacattccctcatgaattatacccttcaaatacctaaataaccttttacaggcatcccgatgtgtggttttagaagtatggatgaattgacttagcttattaaagacaatttgtgagttgaacttgtggggctaggacttagttttgctccatccattttgattttgctgagtagttcagctatgtatttggattgggataagtgcatatattccaggtttgtttctctgaatttccacgcccaaaatgtagtgaaggggccccagatctttgacatcaaactcattgttgagatttcgaatgagacttgatattaaggacttattaggacctgtaaccaatatgtcatcaacata

SEQ ID NO: 196462 - DNA, 631 bp, Cannabis indica
cttcaagacactacattgacaaaacataatatttattgagctgtaataataattgtaatattattggtttggacagactgtatgtatatgacagattgagaaaatagactaatgaattttggtccataaatatataacatgtgcttatataaatatatatatatatatatattaaaaaaagttaagaaaattaaccacacgaaattgatagattcttatccaaatatatctaactattatcgataattttccctatataataccatcaatttttcccatagtttcttcatcatcaccaccacccaccacaactatttattcatttattttgtagtcttctcagttttatatatatatatattttcagttaattgcttattggtccttgaagagttgataaatatgtttattgggaaagtggtggatgcattgagtggtggaaatgatgataagaagatgataaatgggaaagttgttttgtcgaaaaagaatgtgttggagttcaatccattggctacttcagttaatgcaggctctgctattttggatcgagttgtcgagttcttaggtggtggagtttctctacagcttgttagtggtcacaatggtacgtatatcaatatatatatat

SEQ ID NO: 196463 - DNA, 2750 bp, Cannabis indica
gatcataaatagatattttttcccattttctttggattaaacttaagattttaattggtttttaaaacaaaaaggaggccaagctctctttgatagggtttcttctatcctcctcattgtttcttctagggtttttgaatctcccatgggcgtcgttgaccagatatgggttggcacctggaagccttgtctctggctctatccgagcaaaggcaaaggttctcgcaggtgggttttggtgatgattggcttgcgtaagtgttgggcctcgttcctcggggtcagctccatcgtaactagcttttcaagcgagtggttatggatcttggtggctaagcgtctctggtgagatctctcacaccttttgctgggggttgcggttggagttgtccttttaggctgggagacaaaaacgacactgggcttcttgtggctctacttctttcatttttgggatggtgtttgcgaaggcccttttcaggcgtgagttgggttgtggagtagttgcggttggaattgtcctcttgggtcgcgagacaacaacaacattaggcttcttgtggctctccttctctcatttttggggatggtgttttacgaaggcccttttcaggcgtgagttggactgtggagtggttgctcttccattttcggcgtgtgcccttgggttttacccaaatatgtttcccttttttttttaataaccaaacatgtttcccttgtctcatcacattcaccgttcaaaaccacaatgagaggttgagtgtgaacttttctcatcagaagatggtagcgcttttctgcttttggtttgcttgttttgggcttacgtattgcctcctttgcgttaggggatgacctttgaagttgttctattttatgtttttatttagttagtttttttaaaaaaatttagtattatgcaccttatgtccttagtggcgttggcattatgcttttttgggggaggttgttcctctagatgctcttgaatgagcttggagcttattgttcttttctttatcggtgtagttggccgacaatttatttattttctagtgagattgtgtgagtttttttgctagacatgtagcgctctcgtcttttatttgactttgaataagtttttctgcacaaaaactaaaattcaatttgtagctcattgtagtgttagagtcttgattttttaagaggctaattgtattttcaaaaataaatagcatattaatatcttacaaaaaaatatagtaatattatttttaaaacttttgaaaatttaaactgaaaaatatattttttatataaaataaaatttgcagcgaaagttttcatttttattaatatatttttttgttgaagataatttgaagggaaatctaataagtagttttgattgcatttagatcactaagcaatatttcttttcttttttttcttttttttttttacagcaaaagtcaataaataaataatttgaaaatttaaaaaagaaaaacatatttaaaaactttctaccaattacaaatattttttaatttattaactagcttggaattcttttaaataatttattctatttggtcaaatttagctatgagtatctctatattaagtacttaatagtaataattaattccggctcaatcaataataacttttcaaaattttattttttcactataagaaataagaagtagagaaactatttcctaccaattagcaaatggtatctacttaaagagtataaaaagttcatttaaaatttagacaatgagtcacaaaataaacttaagccagttagtttgtaaacaataaatagtatcaatcattgtgataattggaattgtaatttgattgatatggtgttttctattgaaaaagcgaaccaaatcttgtgtattccttgttcgatgtattttgaggataaattcatttggcattacaatgcttctagtacttatataattaaaagtggctattaaaatactattttcttataagaaatggggcgatttgcttcctcaaaatgatccttgtcttcgtgaagattatttaggctcttaaaataatttctaaaatcaatatatttatgtggaaagcgcatttgaattggattcatattgtgcctaatttgacctcacgtaaagttcctacgggtcaagggtatttgatatgtggcttgggtgaagaaacaattttcatggcctttaaggctgttttagtattaaatctatcatatcttgtgtttcttttatatatctactgaagtatcgatctgatacgaattttatattttcatttgcaagaaacattttgcataaggatgagttgtgtttgttgttgatttttctttggagttttgaggtatcgtcagaattaatgggttcatggccaggagttgttggatgatgagggagtcattggctggacttgtgacttccatgtttggtacacggaagttgatttcatggtgggaaagttgaaggtccgatcagggtctcttccttcgacgatgaaggtagataagggacttcctgcaactactagctacaaattgaacgtggacactggtttgagtggggtcgagaggatttatgggtgttgtcagtgagtattgtatcttctgcctctcattttgttagttctccttcaccgccaattgtagaagccttagctatgcttcaaagattaatgttctactttgagcttgaatttttgaatgctttagtggaatctgactcaattagtaa

SEQ ID NO: 196464 - DNA, 2197 bp, Cannabis indica
cctttccatctttggagtcactaacacttgaagatttaagaagcttggaaagcattatatgtcatggtggtaataataaactcccaagagggtccttcaatgaattgagaaaggtggaagtgagggattgtggaagatttaagaatttgttccctttgtctgttgccaaactacttcatgagattaaggtaagaggatgcgagatgatggaagagatcatagtgatgagagaagatgatgatgatgatcactcttgttcgcaattacgctccttgcatttaaactctttaccaaagttggtccaattctgttgctccaaccacacggcacctggggagtcggatcattcaaagcctttattcagtgaaacggtacaccattaatctctttatatatatatttggtactacacttgtttttatagtactaatttatcaatgccatattgaacattatttttcttgtcatgaaaatatacaaacaaagctataccagtttaatggaatcaataatagattaatatattattttgtataatacagtttttgttgatatgtaattgatgggtagatttattgtcatcttatatatactctttttgttcaattattacaaattaaataatatatttccatacaggtttgttttcctaacttggaatatttgactataaagagaatgaacatagaaatgttatggccagatcaaacttgtggtattatcatcaagctcttacatgcaaaacttaacaagcttgggtgtggaagggtgccataatgtaaagtatctattctctttctctcttgcccaaaagtttgtaagcttaaagagtatagaagtcaaagattgtgaggcaatggaagacataataaaagtagtgaatcaacctggagaagaagaaagtactcatgatgatcatgatcagatgaaaatgattgatttgctccctaaattacaatctcttgagctttatggcctttcagctctccaaagaatttgtggatcagattcatcatcatgtattgcattttccactcatatcaaaacatactcatagaagattgtccaaaactgaagacattagttaagtctcccactgctactataccaacacaacctctcttcaatgaaaaggtaactatatttataaaataaaatgaataactcttcttttgtcattatgatttatcattttatattcctatactcctatatcaatttatatcattataatgtgaaccagcaggaagataattatcaaaaccagcaagaagattattaaagaaaaataacatgaaaacacaacaacaatgtgaatcaataaatttatatatacagtttttgttgatatgtaattgatgggtagatttattggcatcttatatataactcttttttttctttcaccacttgaggctagctcaagtggccataggtgggtgtgtgtcttggaggtcctgtgttcgagtcctaggtaaaacatggttttaatatataaacgcttaaataaaaaaaaatatataactctttttattaaattattaaaataattaatatatttgcaggtttcttttcctaagttggaggatttgactatgaatggaatgaacatagaaaagttatggccagaccaacttatggtatcatcaagttcttgcttgcaaaacttgacaagcttaaatgtgggaatgtgcaataatttaaggtatctattctcatcctctcttgctcaagagtttgtaaacctcaagaatataaaagtcaaaaagtgtgaggcaattgaagaaataataggagtagtggaacttggagaagaagaaagtactcgtgatcagatggaaagggctgatttgttccctaaattagaatctcttgagcttgatgacctttcatccctccgaaggttttgtagtgctgaaaaggtaataaacctaatttatatgtatatataagtgtatattatttcttttgtaatagttttaactgaagcattatatagaaaaatgacgatggaaaagatattttagagctgattaatggcaatggaaaactttacatagtgaactggaataatacaaatacacgagtgatgttattatattagtgtatacatatgacagtattattgtttttttatggtgtttaaatctaggagcccaatcatcatatagaagattatttatatataatccactaa

SEQ ID NO: 196465 - DNA, 1101 bp, Cannabis indica
caggagagagaaaattgtgtacagattttgtttatatatgattaaaaatagtaaattttatttatttaaaattagtttctgtttttaacttattatattagggtttttttaaaaaaaaaacatatttgtagtttgcttccttagttaatgccatattttgtggcattttagttttgttgccatatttatcataagatggcttatttttcccatatttttgaaaatatcccagctttaacccttcgttagttttttttttaactttctaccaaacagagcccttgtctaaaaaaatatttgctgcatatttgaggcgtcaaatctaaaagtgggataaaaagtctttatatatcttttatcccattttttattttgttaactagaaaagtgggataaaaggtcccctttcttgtagtgtgaatttaaacttcatgtgtacttttagatctaattcttagaagggtatcatgagcattgattaggattattagggttgatcatattgattgtaattattaatttttatttttattacacattatttttttttttttaaaaaaaagctaatattatttctatggtttttgatttatattttgtatcttttcattcatcatagttatatatgactgttgtatggtatgattaagattaagaaataagacatatatatacatttgtgaaatatgtttcaattttcttaatcgttcattttcggtatgagaagatatgtttatgtgcttcaagtcttatggttgatttctttatagaatcctattattaacattgtgttgaaagagcttctttgaattggtttttatgttcttttatttttggaacgtgtgaaataaccgaaggcaaaaatggtttggattaatgtgttttcggattatatcatatgcatatgagatatgtaaagcaattataacaaagccaaaacatgatttttaaaataaaattatactaaaattgattttatttaggacagtaactatcctctctatctcttctactctctatcctctctaacctctttatccttcttaccaaacataaccttaataatgatcttatgttatttatgcatgttgatattcagct

SEQ ID NO: 196466 - DNA, 3925 bp, Cannabis indica
ttttttttttttattctttgtataaaaaatataagtatataagtttaactttttacatcacatttttttttaaaagtctcatcaatagataaaataaacttagatctgttagtcattacaaataatatcagccggtatagtataaattagaggtgttcgcggtgcgggtacactacaaaaaatcttacttttagtataacaaaacttgtgattaaaagtaaaaaaatcgtgactaataattataaattattatttttatgttgtgacttaaaggtccatgactaacggtattaatcacaaaaattacaatttgttgtgacaaaatatatttttagttacaatacttgttgagactaaaattaaattagtgacaacttataactaaatattacattttagtcacaagtaatatgttattgtgactaaaagtcacatttagtcgcaaaaaaattgtattgtgactaaaatgttgtcactaaaagtagtaattttttgtagtagtagtgcgatttttgacctttttttctaaaccaacccgcacatatatacgatttttttttaattttccaaactgcactcgcaccgtgaaactaaaaaacgccaccacattttttttgcggtgcgggcggtttgatgaacacccttagtaaaaatctctaccataccagataaattatgagcaaatacccacttagcgacattatgagccgcaaaattacaaagtcttgaaataaaagagaaattacaacccataaataaagtagagagtctattacattggttaacatagtaatcaattccctagttagttgaaattcccttcagagaattgataaccatctcagaatagctctccaccatcacaaaatgatgcttcaaaaggttcgcaatcttcaggtaagtaagcaagctgcaactttaccaataagggcatcaatatagtccagcctttctgtagcagttcacaaaattgtaccaaaataatctatagccaaagccaccatacacatagtcccactcccaactctgacatcacaattaatctttaaccagtcctccggggggagaccaagcgagagtggccttagtagtctgggcagggaataaaaaatcgagccataatctacataacaatgattaatagtgtcaagatgagtaatgctatataggttatttttgtgaactttatcgttatgggcccgctatatagtatccaccacaatcgaggcatagagaaacacctccacctcattaatacccttaacttttagaccccatagaaaattaatctaatcccacacactaccaccagattcaatcactggccaaatcccccacgaagaggatctccacaaatggtaggcaaaattacaatgaagaaataagtgttccatagattcctctcccaacccacagataggacaagagggatcatcgttatgcattctcttcgccaaaagagtacgaataggaagcgcatcaaagagaatgttccaccaaaaaaccttgtgacgttccagcaccctgctattccacaatctattccaaaaggatggggccaccaccacaggcggcgcacgctccaggtattggatcaggtaagcagacttacttgtgaactttctagaattttctttggtccagatccatcgatcattcccctggccactcagtctacctcctttcaaaatgtagaaaggtattaggcctgcatcacacctacatcggacttggcataaaaaccaattttctgcccaaaacacattagagacgtagatccaatgtaggctcgatgtaggttcaatagtggcttgatgctatccatttttttatgttgaaatgggaagcatcagactattatcggactaacatcgggtcactatcgaacctacatcgggcctacatcggacatatgtctttaacctttactcatttcaacaatagaaaggcatcaggtctgcatcggacttggcgtataaaaagtagttttgtaccataaacacagatatgaacaaacccaaccataaatctaacagaaactcacaaataacatagattcatcatacattttaatcctaaatcaataaacctatcaatataatcataaattttaaccctaaatcacccaaaaatacaatgaaatgaaatgaaaagagagggctcgaaatcttaccttcgacattgcaatggtctggaccttcgacattgcaatggtctggtcgcggtggtcatgggttggaaagagagtctgatatgccgtaatgggcgtgaatgggtgagagagtccgagatgtttgatgttaggggttgggtcggtggtagttcttcggttcgagaagacagcgagagagaatagaggaagagagaggcaggagtgtgttgaaaaatgggagggataatttaggaaatagataaaagttggccaagttggccaatattagttagctttagtttaggggaaaaaaattaaacctaatggatggatattttatcaaactagtggagtctcacgtgcttcgcacgtgtggctcctaaaaatatttaagcacaattatttaaaaaaaaaaaaataagcattatttatttgaaaatatacttattgatagcaactaaaaaaaacataagacaaaatgattattttcacaaatattcacaaaagataaaatgttaattagaggggaagcttagtttagaaaaaagaagaagtaagtagtgtacatgtttcaattgcctactttaaatttttataattaaatatatagtgaaggctaattgtgtaattcaattattgaaagctcaaaaagctattctcacttttatataggttatagaagatttatcattttagatctccaataggggatctttctcaaaataaaaaaaaaaaaaaaaaaaaaggaggtgcttttggtttggagaattagcaatttagcattttattgaggtgtatctttttcactattttttcttttaaggaaaacccaaatttgtaaatgtaaaggggtgtgtttataaaaaaaaaatgtttgaataaatggattagggcttatttaaattaagggtatatttataatactagattaatattatgtgaaatgcatatataattagttttttttttaattaagtttaattatgtgatattttctttttaattaagttcaattaagtgtaatacatgtatgttcaacttttcttaattatgtgatgtattttttttaaaaaaatattgggggttgagattttaatctttgagaattttttttggttatttctaaaataaaattaaaaatatggttaaaatatctacaatattttatgtattttatataatttttaacaacttaattaaattattaatattgccaattatataactaattacacaatatttttatttaccaaaataggacacacattatgtaatattattaattttagttttgtttttgtgttgtcgtaatattatatacaaattctaatttagatcaatgtgtatatataattattaattaattagttgaaaaattatatacgctatttagtataattaattttatggccttatttcaaaaaagaatacttttattttaaatataaaataatattataaaattaataaaaaatattatgttaagtaatggtatattctgttaaagttaacgtaaaaaataaaaaaatattgttaacaagaattctgttatatagctacattttatatagaatagattttgggtgtaaatatacgttcccattaccaaaactctattgggttaattttacttgtttgctcttaaaaaaatgcgaagtagaatatttttcgagtttatgggctttttaagtttgtctgtacaacattaacaggcccaccttaagtccttacaatcactggaaatagaatgaatgaggaaattacactttatat

SEQ ID NO: 196467 - DNA, 7162 bp, Cannabis indica
tcaccaaccaaaccaaaggaagtccaggtcttgacaggaagaatggcggcacttaacagattcatttcgaagtcaactgataagtgtctaccgtttgtcaatgtattgagaggcaacaagaaatttgaatggacagaggatttcaaggaggcctttaagagcataaaatggcatttgtcgacacctttagttttggcgaaacctgtaaccagagagacactactcctctacttggctgtctcagaaaatgcgattagtgcggtaatagtgtgagaagagggaaatcactaacaaccttattactatgttagtaggaggttactgggggcagagtcgaggtatccccctcttgaaaaacttgccttatgcctaatccacgcatctcgcaagttatgaccttacttccaagcacatctgattaaggtgttaactaatcaacccctgagacaggttttatcaaaactagatgcttctggaagattgataaaatggtcaatggaactgggacagtttcacataacttatcacccacaaacatccataaagggccaagccttggtagatttcctgatagaaggaataactatagaggaaaatccgcttattcagctagacatggatacttagaaattatacgtggatggtgcatccaatgagcagggctcgggtgcaagggtgacattgattttgccagagggctttaaatttcattataccttaagatttcaattcgacgcactaaacaacgaggctaagtatgaagtcttgattgctggtttaaggacaaccgaagcattgaaagttaaaaatctcataggtcatagtgattcacaactgatagtaaatcaggttcttggggaatacaaggccaatggcttaaatattgcaaagtatctagagaaagtttgtaagaacatggaaatgtttgattatttcaaaatcgagcaagtaacaagagaatataagtctattgcgaaagccttagccaaactggcctcgcaaaatggtttggacgaattaaacttggttccggtggagatgctaaatgaaccaagtatatgcgaaaaagaagatgttgagatgatagacagctcccctacgtggatgactcccataataacctatctactcaacagataactttcgactgacaaaaatgaggcacgaaaaatcttgtatttagtgcctcgctacacgatagtagaaggtaaattgtatagaaggggctattcaatgcctctcctatggtgtgttctttttgtagaagcaaacgagatcatcaaggaaatccgtgaaggcttttgtggggatcatgcaggttggaaaagtttatcaaaaaagattattagacaagtatattactggctaaccataaacaaggacatccatgaaattgtcaagaagtgtgataagtgtcagagatttttgcatatacctcgcgtcccaccaacgaaactgagaatgatgaccttgccctacccatttgcaatatggggattgatctgattggcgcagctcccacaggacgaggaggagccaagtatggagtggtggctgtcgataactttaccaaatggacagaggctgaacctctagtttccataacttgcaagaaagtcctcgactttgttgtcaaaaacattgtctacaagtttggaattccaatgatgatagtatccgataacggaactcagttcgatggcaatttgttcattaagttctccgagaggaacaaaattatcaaaagcttctagttagtatctagacctcaggcgaatggacaagtggaagctgttaacaagaccttaaaggatactatcaagaagaaactagacgtcgccaagggtagatgagtcgacaaaatacatcaagtactttgggctcatacgacaattgagaagatagcaataggacatactccattctcgttagcatttgaatgggaggcaatactgcaagttgaagtaaatatctcgacacacagacgagagttttgtaatcaagaagaaaacaacttttaaaattatccttgtatctacttgatgaaaaacatactaagtcgcaaattactaatgcaacataccaacaccgagtaacaagatacttcaacaaaagggtgaaaaagtggcttcaacgttggagacttggtgcttaggtgagtatttgcaaatataagagatgcatttgcaggagtattcaacttttccttatatgattgaagcaatagtaggaaccgggatttacaaagtggctcggttgaatggctcgcggataaagaactactagaacgtggaacatttgcgaccctactaccagtaaactgatgctgtaactcatattctcaatgtaatattttgaactttatttattaataaagttaatcagctttcaagtaattacaaagtgttattatttaaaattacttgaggggcatacatgtatgattcaccagaataattatggaaatacatgatatattgcaagcctaccactttaaaaaatttcaaattttttaatgtttttgattaaagatcctttctgacgagaaaggaaaataaaaaattgtgaatgaccttttaattaaagaacctttttaatgagaaaggaaaatcaaaagttgtgaatgagatataactcataagctacgtgtaaagctgaatactaagggctcacatttcgtaggaaagtattaaacgaaacaccaagatgttttgaaaaaatacttaaacctaatatatgaatagacgacgtaactattcatataagcaatcaaaaatatacaaagtgataaatcattaaaagtatattcaagtttgcttaaaatagattataactgtttatgcaaagaaaaattgataactgcttgcacacatagtagatcactaaatacttaattaatatcaaaggaaaataggagcaatggaaatgcctgaagtattttaaatttgatcaaaatataattgttcaagttgtgaatgaaaagtatgaagcattcaataaagataagataaaagcaaagttggccatccaaccttgtaaatttgtctttacaaaaagtgccacaaggggcaaatcattgtctcggccttaaggacatttacctagataaaataaaaataaataaaagccaaggctacatagcaagagacttggacagtgctacttttttttctgcctcgacatcttattcttccttttaagtgttctcacaaaggggaaggatttcctcctcagaatctcccaagaaactcgtgtccatctttggattttccatccaagcttagtaaatggtacgaaggccagcaacgttgcatcggtcaatggttttcgcttcttttccatctagtgtgaccttggcagcatcaagttccccttggagtttctggcatgcattgaccttgtcctttgcctccttttgagtagcttcaagctcggcctcaaggttcctcttcaccttctcggcatctttggtgatgcgagtattctccggtatggcatcattccattggacgacaaaggaactgaaagatatttggaaaccaacaaacaaaaatacgtaagtatttcgaaggataaaaaagggagacgagtagataaggataaagaagattaccgagaggctgtgagatatactccttgtgagcatctcccccagatccccattattaattaaatcccattcatgggggaggaaagccttaaaatgacgccagcatgcggcactgaagtctctagtgtattctgggctagctttccctgcctcgacaggcaaggtttcaagggcttggctcgaagagggagaagcttgagtggctttggggataggtttgacggtacttgcggaggttggaggagggattggatgctgaatcttagtctcaggaacctcgaggttagaagtctgggaggctcgcttcttgttagctgtagtcttcttgggccattttgggggctccacctcgatgtctgatggggcctacaagatggtcaacctcttctttcccttcctgtggacgagaccttcgaaattcatttctgtgacacaagatcaagtgttaagcatttattgaaagacatgtaaaaggggagattagggcataatttcctgcctaaggaatttaccataatcactagaagacgtggtagaaggactataaaatccactaaaatccttacagcccatgatcctgaatatatcatagggattaatcagttctaaatcccagctcgcgtctaaatgacttgccctatccgtcatggtcccgtactgctcggctatgccatagtacaactcagtacagttaagttggacgtggaaccagggataccaactatcaaacctatgtgtaatatgatatgtgataaggggattccaggagtaaaagttatagcggctatcttgaaattaaactaaaatattatgctcggccctaagcactgtgggtgaccaatcacattgattacctcgggatgctccttctttggcttcccgagggacagtgttctgaaggtgttgtgcctgagccacgcgatcttgagctttctcctcatttttgataggaacctacgaccaagaagaatacttggaatatttataatcacaagtaaactccttatcagttaggagacccacagacctaaggttaggcctcgttccaaagaaagtcgcatgaccgaagatcgtatgggagacctaacaggagcttgcggtgctcgactatctcaggagtaggggcaggtcttttttgagtaaactgtcaaaaactaaagcaaaactacaatcagctaaccagaaaataatcacttacgtattatgcagaaagtggttgtgccaatgggggatagaccagttgtctagaagaattcatctttaaagggagttttatatggaaaatccacaatgatcttacgatcacctgtgtgagtccccatattgtttcgcagggggattattgctccagccctaatgtgttcaaggctccaaggacctatcctggtccaaccacttgtacgggtctcgcaactagcccccttagatgtttcacgagtaagtcacactgatggatagcaactgaactcgccagacgccttgatctaactcgacagtcttgcttatattcaacgccacaagtcctcaaaatattatccacatagtctctgatggctcgcacctttgactctattaacttagccttaaaggtgaggttagggtccagaggagtctttgatttacgtgggttggaatacataatttcaaagtccaagtcaactagttcaaaagcaatcgtgaccttgggtaaaaacaaaagcttagccaaaggaatagaagaaaaactgggaggttcaggacaagcagcgtcccgcaagaaacggcatctaccttctgtaatttcttgcaagaggcgtatgtggtgactagcaatatattcttggtgggttttcactaattgttccctaatttttgcatcatttatttctaatttggatttaggttttgaaattctaggtttgtatgggaggaaaagttcagtaggacactttgtctaaatactatggacgataaacttctaaaccagattgggacattgctggaaggagaaagcaatcccaaattcttgaagaaatttatcaaaccagaagttggtaaattggagaatctcaaaaacctatgttctacctaaaccctaacatttacccagatataataaagccctaaaattgcaaaaccaaatgaggcaacaaaggtgttaactaggaaattagtaatcaaacccataaacacaacattaaaagcatgtaagaaagtaaggagaaaaatcacttactgtttggagttggtttttgggacgattagcgtctttgcaatctgcgaaacaacgaacagcgtgaagatccccctgaatgcttgaagttgaaaattaaatcagacgaaactcgcaagaaaaatctttatgacaacgatggcatgcaaggtttctggaaaatctgggtatggtattttctacagaaaagcttgaaaagtttttagagattctgaaatggcaaaagttgtgcaaaggtggttcctttttttcattttatactcttcggttaatctctgttagattagggagacaatcgatccaataggtagaatctgaaacagaagtggaaaggatggtcattaaatgctgatgttcattgaaactgcaaaactaccaaagtcataggacatgcattttttcaaaagggattatgacaaaaataccctctataatcatttataaagcacttttcattaaaaagaattttttaaggggcaattgttatacccaaaattcgactggtacttcagaggaggacatgtgtcaacttgaggaaaaatgaatcaacgaatataatgacaattatattagaagatattgaaatggaataactcattaaatgcaaagcttatagagtatatctataagtcgttgactgtaaagttttaagcgagacacggatgtacaaacttttaagttgcatattgacgagaaaccatttcgtacatgaagacacaatcataaagatgacatcagtaatataaagttatgcaccaaccttgctacgtatgaagagatgtagatgaggcatgttgactgttagaacacttagtatataatatacattatacaaactaagcataactgttgaatgaatctgaacaacgaatagcgacgcatccatctctctataagaagacatgcacatggtaccttcactattcagcttcagacatcttttaatgagatccactgctccgtggagtcatctctctcggatagaagctgacattcaaatgatgttaattgatgaagttcaccttctcatcaagagctgtgattgtcagataatgacggtgttttcattatcaacctcaaaaagacacgagaaaagctctagctcgctgccagggttattgttgctattcaagttcccagcgagatatcccaacgagatacattttccagtgtatctaaacccacctcagcattgacccggtaaaagaagataaatcatatctgtgtaattttcaaataataaccgtatttattttacatgggatgaaatcaaatcccacaatttcaagggattgttgttgtgaaatattaattctactgtaattaactgccttcctatg

SEQ ID NO: 196468 - DNA, 709 bp, Cannabis indica
tatatatatatatattaatgtatgataaagctacataataatgaatttaaaaatatttgttcaacatgctgatttatactaaaactttattttttatgagaataccaaaaccaaaacctaggtattactaatatatataatatattgagttttaagttccctctttacaaagatatccctcagttttaacctaattgaagtcttaaaatctaccactaacgacatattacagaaaaacaaaaaaacacattaattgtaatcacatacacataatataatggacataaggttattggaggcttctcgagcaggaagtaccatgttgttacaccaattgcttcaagagagccctctcattctccacacaaatgctcttttctcatcagacaatcccttacatgtcgcctcatcggcgggccacgtggactttgtcagggagattgtaaggctaaaaccagaatttgtgaagcaagtgaatgaggatggtttcagtccaattcacatagcttctgcaaatgggcatttggagattgtgagggagcttttgagggttgaccaaggactttgcagaatagaaggaagaaataagtggactcctttgcattttgcagccagcagaggatggccaaaccttgtcaaagaaatgctattagtttgtcctcagagtctccaagatgtaacagtgcataaagaaacttctctgcatctt

SEQ ID NO: 196469 - DNA, 856 bp, Cannabis indica
ttcacttttcattcaaattcataacatgcttaattaaaatgttgtcaattacaactaagccacatcatttatttttaacttttttagggtaacccaacatcatttcaggtgtgatttttggttcaaatttctttccttatatttttggagggttttgattcaaatcaaaggctaaagacaatcaaaacaaaagtatgacagagtttaaaaaatatatataaaaattgaaacctagccaaataaaggtgataagttgagatttcaaataaaagttaattagtaatacctataagagatgcctgtaaaagatgttgtgcttttagaacctcatcagtgggattaaccacacctgctgcatcagttgaacgtttttggatacccatgacaacatatatggttgaaataaatatcacaaccattgttcctcccacactcttcatcactaatggccctctcccttgcttcatctgatccatactcaaaatgaccagtttccttataggacttttgaacattagggtcaatattagtgccatttcccccattacaagcatgaaaagtaaatgaatcattctcaccagaacaaaataccctccttgtgtttttgcagattttgatctaacaaatgtgtgaaaatatatgggaagattttagagaatttgttgactatggaatgtttaggtttaagttaagatacttctatggaattaaaattaaagctttgcataataaagtaacttatgggccactttaagaataattcttcagatagctctaaaggcatgtaatacctctatcactaatgggggtaaagagtaaccacactcttgtcttgaaatatgaagtttacaaaacc

SEQ ID NO: 196470 - DNA, 2217 bp, Cannabis indica
attgagatgtatattcacctaggacaccacctacgactatctaagagtcgtggtgcatgtctaggtggttcactgcgcttcatgtgctagccttggggccagcatttggagcttcatgttcagcgtcctcattagaagctttaaaattgaccttgttgcctcgtgcattagttgtcccccatgtgccttggggaccatgcctacatcgagcaagtgatctatgcaccacttggattcatgctctcgcttcttctgtgactcctgattttcttttgaactctgagagatttaaggagatatacttctatgattagtcatgaagctggtgagagcttggcctttggtggccatgcctagttgtgaggtgcttttatgttgcttaagtctcaatggttaacttgagtaggcctgatgctccaggtttttgtagaacctgccgcaactgctgatcggtgtacacctttatagggtgtatctagaagtatgaccttagatttttagaagccaagagcaggttgtgggtcaacttttctatgagtgggaatcgacttagtgtcgatcagtctcttgttggtgcagtatatagggtgttgtacactgtcttcttctcttgtgaaggcagcactcacagcatgttctgtgactacttggtgcatgcctagctcttctttgtctagggatttgggcaacacaggtggctgagccaatctatcacttcagctcctggagtgacatttttgtccactcaaatttgttgttgcttctgcttcatgttaaagaatggtacacatttgtctgtatacttagacacaagtctgcttagtgcagcagtgcatcccgtttggctttgtacttccttgattgttgtgggcgacttcatgttcaaaagggcttggatctagtccaagtttgagcttcttcatgttgtagctgtggaggattttgaaattttttatcggtcctccatatgccccagcccttttggacttgacaagctcattgtccacgcacaccttcatgttgcggctgattggatcattgaacatttttttcataagcttctgatgtgtgacccctgcattcttcagccctagggggcgtgaatttatagcagcacagacctaagtttgtcatgaagcttgtatgcttatgatttggtgggtgcatcttctttttcttggctttggacaaggccaagctgtgacgggcagattgttgatctcctcttgacatccccctcatgccttgttgggaaattcaggcaaaaatggtagaggggtgctaccatcttaaagttgcatagggtcggtcagtctatcatggcgttgaaagccaagggaacgtcgattatgacgaactctgccattagagttttggtggttagatcttctccaatagagatgggtaatctgatatatccgatgagtgtgatgcttcggccatagaggccacacatcacttgattgaagggcatcaagtcagcgagttagagcctcatcttttcatgtgttgattttgaaaagaatgttgatggaggctccattgtccaccatgtatcttgctccgttgtgcgggaaattgtcttagaaaagatctttttaaaaaagagattgtgggctctccaagctttagttgcttagagcctcgttctttgcctgccagggagtcacttttgggctcgtgacaaagtgtctgagcatagcactctctagctttgttggtctcgcctgcaatataaggtcatcaatgatgacccctaagtgttctgccactgaaggtttgggcaaaattttatggtacctacctatacgcctagccaaagatggaggccaaccttcagagatggaggccagacttttgaggtggtggccagccttctgaccgcttgttactggcatgccctgttgggacgtctggtcatgctatgttttgggagttttgatggaagagcgaagcatacatatttctcctccttcttccttggacttcatggcataaaggaatcattgaatttccctcttttgccattatgttggtcagagtcatcattgttgcgcttacctccaccattctcattttttgagaattgatagagatcgtatgtgctggtcagcatgttaggcaatgtttggggcactatgaggccctgtgtttattcgtcattgtcctgccctcttgtctaggctttcctgacagctttttctaactttatgaagc

SEQ ID NO: 196471 - DNA, 1077 bp, Cannabis indica
atcagctcaagaaccagggacaatattacaatgctgtaagcaccattttgcatcagatcaaagaccagatggacgctttagagagtgtcaatattattcaatgtaaaaaagattcaataatgagtgtgctaatatgttagctaggaaaagtttagctgatagaaccactcaactctttgatcattcttttcccgattggttagctaatttttgtaaggctgacctccccttattgctataatcctggttttcttcaataaataaattttctttacaaaaaaaaaaaaattatctttcataactattttaatggtgtgacatcaaatgtaatttgtcaacaagggaaaataaaataatctatatatacagagatttttcaatgaggaaaaaaaattaaaatatacaacaataaagtattactattatattatttaataaattacttagctgttattttttcatgcaataatggtgcattagatatggttcattgtcaactttaccattattatttcatagaaaaatggtgaattattataaactaatttaatgctttttttttttatattgtgaattggaatttaatattatcctttagttgttgcatgaaaattattttcatgagacaaataatatttcatgaattatcactcattatattgaatagtattttaatgtgtatttataaagaaactgatagttgttactcaatactataaacaaataaagatcatataattccttaaagctatattattattataggagaaaagtaaataaaatcataaatatgagagattggagagaaaaaaagtccataaaagcagaaatacaagaaattttaaaatagagttaaagctatttaatcaaagtagtctttcacaattattttaatggtgtgccagcgaatgtcaacaaaagagaaataaaataatctttacggaaagggaaaaaaaatgaaaatatacaataatgaggtattattatgacattatttaataaattacttagctgttattttttcatacaataatagtgtattcgaaaacttcaactgttactattttatataataat

SEQ ID NO: 196472 - DNA, 1749 bp, Cannabis indica
tcaagaataacttcccgccgctgcctattgtattgcatctgggttggagtttcaatcttatctctcaaccagttacacttttcgcgatcagcaatgtgcatgtactcaaatccaatagtcccacagtaagcctgctcaaggcgggtcaaaattgatctaagtgtttgtactggacgattctcagacaaaaacccagccatcttccacacccctaaaaagaactccctatcaagatcagcttctgagaaaccataaagggcagggtccaaatcacttgggatttctcgttgttctagagccaaaggatccaacttggctttcatgtgcccatttacttgataagctctcacaagtaacagcaatcgcatactctcttgaattgtttggcctgaaattccaggggaggtagaagcctgacccacaaaatttttaaagaagttgtcccaagactcatcgacgctatttgggtcagcttcccaagccctttgaagctcttccaaatacacactgctagttccatctaagaagctatcggttaacctagacagcggaacaggacgaggcacgggtgcagcctgagccttagacttaaacactgtggtatgaaaataacgattctgggagggaacaactcgtgctcttgcgacatatgaaccaccctgcaatatagttcttctaatggcaagctttgccaaactagacccagctctaaaccacgccattatgtatatcgatgatcagctacaaaaacatctatgtaatattccttctgctagaaacatatcctattcaaaaatcaaacaaactaataaggagtcaaactcgaaagaaatatacacatacatagattagattagataagataaaagctagattaaaaatgttgtaaatgagactaaaaatgaaatacctaaaagcgagattagataagataaaggcttcaattatttgctgcgagatatagggtttgagatttggaatgagacatgggagggatgagagagtccattagcgggaggagagtggctggaattggaaggtcgggaaaggcttattactctcagattttgaagcaaagtgggttcgatcaaggggtcaacaatatcggacggtgcccagccaagttcaatgcggttagtatgttcgattgtggctttgttgggggtttagagttctgtagagtttgcaggtttgatcgtgggagagagatcgtgagacagagcctactattcatattcattaacggaagagttaacttccgttagcttttacaaagagcaaaataaaacgttaaagtatcaacgttaaaccaacaaaatgtgttagatataaagatattattatttttggtacgtaacagtggtctcttagcattagcaaaccataatccaatgttgtattttacatgtttcctattttggtagggtgtggatgaaacagaatccaatgatgtattttacatgtttcccattttgttttatcctttaaataatttattttgttttgaaaagaaattttattattttaatttagggacttacatggtgcttcaatttagttgcattttattgtaattggagttatcccccaataaatttgattttcattttttttgtttcttcgctatcgaataacttatattatagaaagatttgtagaaaatctttaaaatatcccataaaaaataggggcttcaaaacttatagtttaggggtgcgcatgtttggaaccctatacaagagcacgcaa

SEQ ID NO: 196473 - DNA, 1923 bp, Cannabis indica
ttaaataaatagtaagttttgggcaaggaagatatgattggttcttttgaagttgaacatgaaactcaccatttggcaaatctcttgtgtttcttttgcttattatgaacaaataacagtttgtagcatacaaaagctgtcaagaaataataagaaaaagctcaaactctcttctttttagaaagatctttgattattacttgtattgttgaaattaccatttgatgatcactttctgcacttccaataagtgtactcttaatttaattactcttcaattttgcagtatttgtgagggtgccgttagcattgcctctaaaagaatagtatgaaaattgccacatttatttgacatttgagttcacaatgagagccacattcttactataattctaaatctagaataaaggcaaaatgcaatatgtggtacaactaattagatgaatatggttagtgtgatcaatgctcccacatagattacatactaaaatagtagttaattaatgacttataaaacccaaatcttttgagtaaagaaatcatactattcttgaccttttaactaaacagaactacataatagtttgatattaaattagaaaagtaataattaatatgtaatcgttaaatttcatatatactttaggtgatgtttagttaatagttccattacggatatgtttggtttataggaatgggaattataatgacaatcaacatgtcaattactttgtttgctttctttttttaaattttgtaatcccattacattattgtaatggttaatacattgtatgaagtaatccaccattgtaatagccattacaatgacaatccattacaaaattaatataatattataataaaaatataataaaaaaaattcaaaagtctattttaccttttatttaaatattttataattatgacagggtgttgggagggacggttggatggggtgaagttgttgtgtttggcagctgatttgttaatgtttgtaaggtccagcctttggatcgtattgagaggcttgctgtgcttctttgggaagtttggagagctcgtaatgacttggtttggaataataaggctttgtcggtagagaaggtggtgaatgctgcaattacttaccttgattcttggaagaatgcttagctagaaagtagaattgtgtcgccaatttctaggccgattacttccgggtgtgagcaatgggctaaaccttatttttgtgaagttaaggttaattgtgatgttgctgtctttgagaatgacaatagtctcagtttggggtggattgctcgggatcataatggtttattcattgatgcgctggcggttaaaacttatggtcagcccgacctatttttggctgaagctatggcgttgaaggaggcgcttagttgggtgaagggaaggtgggttgagggggatgtgcctgctggtgtggttgtggagtcggactcgctgctgttggtgcaagtcgtgcaacagaagaagcgtttgttgtctccagtggggcttttaatttcagattgcgttgctcttatgcagtcctctcttttgtttcctattttaaataattttgttaaacggtccgggaaccaggcggctaactttttggctcgttcttttggttctattcctggctgtgtttcccgcggggttttgtccctgctggtttggaagctatcttggtagctgacatgatttaataaaatttaatttttttggctcaaaaaaatattttataattataaaaaataaaagtaatatggatattttggtcaatatacattttattccattacattcccataccaaaccaaacacaataattttaattacaatactcattaaaacaacaaactaaacattgtaattaattaacattacgaaggaatatattgaaagtgcaattat

SEQ ID NO: 196474 - DNA, 1660 bp, Cannabis indica
tgtcagcttttcctagttacaaggacaaggaagctgccatgtatgcagtaagaactctataaaagctgtgaaactattagcaatcttcaaacaaaagacagcaaaatgagtctttctaagtctctagcctcatcgcctacgcatacacacttttttcaggcaatagttctccgtcaatgcctacacccacacacttttttcaagcaatatcttccctgtcaatgccttattttagtttctgtaactatacttatttttatacaatgtgtgatgcccttggaatataagcaagccattctatattacatccgagccaatccccacggatcatatgtgagcgcttaagcaacaaatggttgcaatgaccttaatgcagttaagtgctgattgcatataatctaataatcacagtgaatgcaatctctaagatggcctaattttgagttttggaagatatagacaaatattctccaagtaaaagggaaagagacaagttttctcatttgttcatttaaatgaattctcaggctgctaaatctttggaggagaaactgaaagctgctggtgtcccacatgaggtacacatttatccaggcaatgcacatgctttcatgaataggtctccagaaggtgtgcagaggagaaagagcatgggaatggcagatgaagacgaagctgcagctcagctcgcttggtcccgtttccaatcatggatgacaaagtacttatcggcttaaatggtttgcaagttccatataataatttaatgtttgattgtggtttgtggcctaaaataagttgcttagaactctgatcagacgttttttaatgcaactattagaactctgtcctgcgtgtagtaggtagtttgttatttggtgaatatatgaagctgctgttatgattctaatctcacgtgtgctcctgagtttgaattttcgggtactgcgacaaaacaatggtttgagattgcgaattgtgagtggttgatttggtcataatttgatgattagctccaggtgattgagagtgattatctctaagtgattgagagtgtgagtggtttagttcaaattctacgagtatagaattcctagtttacgtagttagtggtgaaataatggggcattatattggtcccatcaaacgaagtgattttcgaggttgcctcgaagaagaaaattttggatgtaagattggtgagagcactcacaagtcacaatggatgaaattggtggatttaatgtaaaatagagatagctggtaaaaattatatcggtagatcatctcgctctagtagaagtgtcagctatttttttggtacattgaaaaattataattcaattaaacaatttgtttttaccgatagatttaggcactagttgtccaataccttttataggtagcgtctaataattagttagcgatattttttaaaagttattttcttaaattatataggaccgatacttaattatatcaataataatataataaagtggtagacattaataatattttttagcaattctcttaatttaatactaatattttatcactgtgttataatttagtagctttgagtgtaatataaatctcaaaaatcacacacatgagcaatgtagaataaaacatacaaattttatttatttattaaaaa

SEQ ID NO: 196475 - DNA, 1191 bp, Cannabis indica
aaacaaagcatttttcaaccttgaaatgctaaaacattttcttttattgacaaaaatagaaaacataatgtatgtaattataagttgtaagtcggaacccagtacattagaaaagggaaaagaaattgaattttttttaataaaaaaaatagcaaaggagaaaagggtatatactggcattgagtaacaaatgttacacttttggaaagtttggcaaaaattttttttttttttgtttcttcagcaaccaaaaactgtggagtggaagctgaagtgagaaaaagaggtgattaaaaaaagtctcatactttctgttgcagttcctttgctaccaaacagaggattaaggattaaatgaggctcacttgagcggttcttcttcccgagccttgtgaccttgtttcggatataacagtagtagctcaacgccaccagtagtgaagccactgctattgaagcaaacacaacaatggccgccagtacaactctctcttttcttctctcctcgtcatctgcctccattctttttttctgagctttgaattaataaaggaagaaagaaaaagaaaaaatatgctttgaagccaaccctaaccctaaatgggatggaaaataagttcagtgaagggaagagagtggaccagtaaaatctgagtttctctttttggacagtctctctctctctctctccctatctccctgtgagtcactgtcttgttttgtggcgcggagtacagtcttattggagagaaaaaatttgcaacaagtcctcatttatattataattaacatttcatccatggaattatcactatttcttatttgagataccctgtttttttaaaaaatgaaaaattaaaaaagtattctagaataattaattaattattatttctattgtctgaactcaaaacattgtttgtttttaagaataatttccatttcttatcctcccaacttacattatctgattatgcttttaaaatatgagaaatgttaaagtaagtgcttagcactatttaagatgtcatattactattaatatattaaatattagattttatattcagatgatttaatataataatttttataaagtattattaattatttgaaaaatatcaccataaatacttaaatatgattttaaatataatatattgtagtcatacagcataaataattaagttt

SEQ ID NO: 196476 - DNA, 3077 bp, Cannabis indica
ctccaaaagaaaagcaaatgcagaatgaatgttaataggttatgcttaaacgtttaaataacctgatcttgagcaaaatgtgaagttaaactaacagtattctgaaaatataaaattcaacaatctaatttatgttgatgaacttcgcaagcttgcttagtgtagcagatccaatggtgatatccagaggtacttaaaaaattaacctgtgaggcctctgggaaccaaacaattaaaccattctcttatattggtcttggtaagaatggatggagtacatacttttacaccaatcaacatacagggtacgctggcccatgtaaattgaaaagaaattaatattttactcaatataaagcaacatgtcaattttgtaagtactgtaatgcctagtaagatttatcatgtcaaagtaatacacgaatgattcaatcaagttttcagaatcaaaacaagggaaaagtgaaactaaacaaaaccttactctgtgatgaccagcctaaaagaatagaatgataatcaagcaattggactcacatgggctggtgaatgcccgaacctgccattcggcccatcccctattttagaatatattgcatactcttaccaatcaatcactttattaaataataacaaaaataaatcagaggactcatatcaaatttgtctaccagctttgtggactaatgagatgagctataaaattatcaaagttcaatacaagaagagcaatcagtatctaggcatcacatttctccccatacacatgacacatagacacatataatagccactcttctttaaaagatgctaaaaatttaaaaacagaacaggaataaagcatttttaaaaaagaaaggtcaaatttattggaaatcttcgtaataaaagaaaataaagtaagggtgcaagtagctgcacccctgcaccttcgtaagactaatacatttctatgtatgcaacagactaaattatgaatttcatgacatcaaccagttgtgcaccactattttttataaaaataaaataaaatgtcaaacatatcatgaaattaccgaaacatgtgattgttgtatcttcaccaaaatccaaggagaaaggttgagctatataattgtgctacttctaatatttaataccttcaacttctttatgtttgcaaagtgtgatgtcatgtagctactatgcttagaatcatgtatctaaataaccataagattaagaagaggaaaaaacaactacaaattttggtaagataacaaatgaactgaattatcagtcaagtattgaaaaatttaaaaagattttttgtaataaaagaaaagtaaaactcttaagcaaaatttggttttattaaagtgaggcatagaatatgtcttgacccccaaaaatcctttcttggtgcagccaagatatcatagaaatataaatgattaataattttcaataaaaataatatgactaattgcgttcttcacctactccaggtcagcatccaaagatgattattctgctattaaaactgtcaataaacaggtagacataaacaaatctttacgtatgcaaaacagttttttatttccggttgatcaccaacataataggaatgagggcgtcgccatccaccacaatgtatttgcaagacctgctccaatgtgaactacattcaggcactaataaaagtaaaagtaatttatgtttgttataatatttatatatatacatgtatatatacatataaatatatattatacgtgcctcgtgggttgcaattcactcttttttctaaggtcaaatgaaactgatagggagctgttttattaccttctcaatattttccatcataacacccttaactttagacactcgagccttaactttagagagtttgctgatctcttcaggatggtccacacaatactgcatatgctccttcagcttggacctgcataaccaaaattgattgaaaagttagcatttgggtagaacataatgctacattttcaagaagaaggatgaattttaatacccaaactcctagctaaggccatgagcaacaacagtggctgcttttcctccaccatatcttttgttaaaatcctcattaactctttccaggaaagcaataggaatttgtctactggcagatagctgcaactacacaataggctgcaaaaaccaacatggtaaaaaattagaaccgtcttataatataataggcatgaagattgtcaattaattgacagacactatagaaacaaatctgggaaacaaaatcaataaataatctaatgaaacaatcccacatttcttatgacatgtacagatacataggttcattgctagcacaatcaccaattgtcaaagctggctctaaaagaccctttcaaggtaagctattcctaagcttcacgttctcaagattaaacataattaacttatctaaaatggtccctcaaatcgttcattgctagcagatatgtttgttgtaatagatattttttttttaaaaaaaataacataaaaataataccccataatttgtctttacatttttgctgaaagaatcatacaatgtcattgattcaattcaaaagaatacaaaacaattgtttggtatgaaatccaatgaacctttcgtaattaaatttatatatatatatatatatttatatccaaatcaaagattatcaggcatggattgtaaagaaagaaagctaatcaaataaccaaatttgataataataacacaaacaaacattcagattcggataaaaagattcaattcagaaacacaaaattcacatatcaactcagatcatacatataacattatttgaactcactgaagccattttcgacgaggtaattgaaggtatgaccgtcacaattttaagtaaacttattattcgaagccggaagcttctgtagacattgagaagcgatgctggtaaaatttcctgtaaactctgtgtgctcagcgagaaccaccgtacctcgagcaacgaagctgtaatcaaagactgttgccccatctccaacaacaacaaaaatacaaacaaaccctaaccctataa

SEQ ID NO: 196477 - DNA, 2853 bp, Cannabis indica
aaaaaaataggaatacaacacaccaaaaaatagtaattcttaaaataatctttaaaaaacgacaaaaactaactaaagattaaacgacattaaacccaaagaaacgacacaaaactttgctcttcatatttcatattcataacaataaaaaaaaaaacctactttctcagaagactagatcatcaatggccgccaccaccaccaccagacgatttcgttcattcaagcggtggttaaagtccaaaggtatcaactttatcgatgccctccaaatttgcgactgccctcttcaaggaatctcagtcagaacactctgcgacctcaccttaggtgacgtggtcgccaccatacccaagcaggcttgcctcaccgtagagactagtggtgctagagacctcattgaagcttattctttgaatgatggtgatactctgggtctcgctgtggccatcatgtacgagaggagcctcggccactcatccccttgggctccttattttagtgtcacgccttaccaagaggagtctttgcctttggtttggactccagaagaagttgataggttgctctgtggtactcagattcacaaggtgtgttttttagtataattatatctgtatatttgtgtatacataatacatatatgtgtgcttttcttttacagttgtattgtatatgtgtatatatttgtgtatatgtattttcacaaggtgtacaaatgtacatatatatgtatgtatatgtacatgtatatatgtatatttacaatatgtttgtgttttttagtacagttatatatatatgtttgtatatatttgtgtttttagtacaattgtatatgtatattcacaaggtgtacaaaagtatatctatgtttatttgtatgtgtatatatgtatattcacaatgtgtgtgtttcagtacaattatatatgtatatttgtgtgtgcatacatatattatgtgttttggatgattatctgtgaactgtgatgggttgatgttggcttaggtaataatgtataaagctctgttatgttattttacttaatacacattgcaacatgcaattgaatacacattgtgtgtgtaaaaattgtgtgcaatttaagtgtgcataatctatttttttaaggaatgttaattgcaatttcctaacctcctatttcaaagtctttctcaacctctattctaaatctacatgcatggcagtatttgttatagctgcacctttatccctgtaaattttttaaacttctgaatagtttataatcccgaaaacagatttcaatgattcgtgttaaactagaatatcactgttttcagtacaggatcatgttgtaactataattagattgatggtcatttatattaatatatacaattatatctacttgtgtattatctaatttttacacacatatcttttggctattagtgatgattttctgtgaagggttgatgttgggttatgaaaacatacattctttgttgtgtgagtgaatatactaaccaaagatcatatttttcaatgagttgatgatggtgttttaggaaaaaggaaaaactttgaaatgtagagtatatgtcatcttgaacaatgagctttaacatgtagatagatgtaggtaggcagtgaaggatgatcaagctctaatacgcgaggactgggaagagagaattcagcctctattgaaaatggaatcttcaaagctcgatcccagcttctttcgcgttgaagactatttcgctgctaaaactatcattcattctcgctctttttgggctggtgacttccatggttatggaatgattcctttggttgacttgtaagtttattattattgttcatgtcaaatttgaataatacccttttgttaatatatgtaagttgtatcaatccttaacttccacatgttttgttatattcaaggtttaatcataaaactgcagctgaggatgtacacctcgtaggtgtttcttattcttcttctgattctgattctaattctgattctgatagtgaagttgatagtaaccaagtgaaagattttacctatgcttacaataagaattcagataattcaaagatggagattactcctgaattagatgatgagtttggagatatgaagatgattatggtcaaacatgtcaaagctggatccgaggttagttttctcctatgattcatttgggatttgtataatgatggttggtttaatactgtaatgaacactggaatcgaatttttctgttttgtttgttatatttcgatgaaggaagggtattgaggtgaaatttgttgaactaacaatgtaaataaaattgctaaaaataaccacgctcaatttactatacagtataaatctatggttacaaaaacaacttatgtgaccataaatggttattttgttaataaaatttttcaaaactcgagtatatgagtcattttgcttcttattttattgttcttttagtaatggaaaagtaatgatgtaatggtgattgcattacaaaggttttccaaagcgaaatgaacaatgggatcgaaattttgattccattacaatttctgttcatgacaaccgaacactcattagccttgttttgtcaggtgtataacacttatggttatataggtaatggaagactgcttcacaagtttggatttacagagcctaataacccatatgacatagtgaacatcgacatggaaatagtactcgaatggagctcgtggttattctctagccgacacactagagcaagggtatcactatggaaaaaactcggtttctcagggtgtgagtgtgacactctagtaggttctgattattttgagatctcgtt

SEQ ID NO: 196478 - DNA, 2279 bp, Cannabis indica
ccagtgttgatcttttcacggatgagaagacagtctatttcgacgtgcttggtgcgctcgtgatagacgggattctctgatatgcggagtgcagctttgttgtcacaaaacagagtggagggaagttgtatgttgatgccgagttctttgatgatggagtggagccaggttagttcacaagcggtgttagccatagctctgtatttggcttcagcggatgatcgagacactgtttgttgctttttggatttcaaggatatgagggaatttcctaggaaaatgcaatatcctgaaatggaccttcttgtatctaagcatgctccccaatccgcatctgcaaaggcttgaagtctgagaggtgaatgtgatgttgtatggaagaaaagtccttgacctggggtgccttttaagtattggatgatgatgttggctgcttgtaaatgaggttcctgtggggcttgaagatattggctaagtttgttcactgcaaaagaaatgtcaggtcttgttatagtgaggtagattagcttccctatgagacttctgtattaagtaggatttgtgagtagcattccagtgtcattgttgagtttggtatttggttacattggtgtggaaaccagttttgtaccaagtttgccactatcttgtaatagctgcaaggtgaagggtctttgacttatagagatgccatttttgcaacgagcgatttcaaggcctaaaaagaattgaaggggcccaaggtcttttaatttgaattgattgtttagagtggagataaaggattgaagagctgtggtgttgttggttgccacgataatgtcgtcgatatatattagtaagccaaggaatgtgtcatgtgatcgttttatgaacagggagttgtcattttttgattgagtgaagccttggttgagtaaggtggtactaagcttggcataccattgccgagacgattctttgagcccatatatgcttttttgcaacttgcaaactgcatttggagggattgggccttttggtttgtaaccttgtggtaacttcatatagatttcttcttggagatcaccatgaagaaatgcgttgtttatgtccatatggtgaaggtgtcattggtttatggcagcaagtgagaggagtaatttgagagtgttgaatttggctacgggagcataagtttcaaaatagtcaacaccttgttgttgagtgtagcctttggctacgagacgtgctttgcatcgttcaaccaacccattaggattaagtttaattcgataaacccattttttactgattgtgtgttgtccagagggaagaggaaccacaatccatgtttcatttgcttcaagggcatcgatttctgtgtccatagctgcattccaaactttttctttgcaggcttgtgcaaaggaagtaggttcagtaatgcaagagatggcaagagcagcagccctgaactgaggagagaattttttgtatgacaaatagtttgtgatagggtgtgttgtgctggatggggcacagttgtaatcttgtaaataagcaggggttttgactgttctccttgattttgatgttgttggcagattggcgaaagactgaggaggagtgattgaggttggttgagatgtctcattgaagggttgttgatcattgttactggtatgagatgaaaagaaattatcaatgtgagaattatgagtggttccttgtaagggatatatagactcataaaaaattacacctcgtgagtggaagatgtgtttggtctcaatatcaaagagggtatatgctttcatatgttcgggatagcctatgaatataaaagctttagcccgaagggcaaatttgtggggaatttggatgttggaggcatatgcaaggcatccaaactttcttaagtgtgcatattctggtggctttttgtgaagcaattcaaaggaagttttatccttgagaagaactgatggtgttatattgagtaagtagatggttgttttgaccatatagctccaatagggtaggggtaagttggattggaaagctaaagctcgagcaacatttaaaatgtgttgatgctttctttcaactatagcattctgttgtggtctgccaacacaagagttgaagttggttgttccctgttgtgcataaaaggtgttgagagttaattctttggcattgtttgttcgaacagacttgctttttcttttgtaatggacgtgtacaaaagtgaaaaaaaatttaatgacaattggagcatcagattttgctcgaag

SEQ ID NO: 196479 - DNA, 1161 bp, Cannabis indica
caacttttttacgttttttttttttttttttttagatctaaagtttgtgtgagattgaaacttaaagaattaatagttggaggaatttcgatctctttcgtaatttgcatatatgttcgatatgcttatattattacacacttcatttatgatcatatatacttcatgttttacatataattattctaattaagaagcacaaaagaaaaaaaaaacaaattaaactggtgatagattaggagggaaaaatcctttttaaatttatatgttaaaaaaatatatttttctgaaaaatagcaaaattaatcttgttgacaaggtagcttgcagctaccacacatatattctctgcttaaaatggtatgaattaatgtactttttcacatgagtgatcatggttatcgaaaataaaaaagagagtggtcatgaaaagactcgtttaactatataataataattaacacattaaagcccactttaaagtatattgaagaattagagatgatgttgtatatttaggggtattaatagaaaaaatcattaggtttaaagcttcagaaatcttgtttagatttacaaatatagagaggcatgtagggaccccattgaactgcatgcatgtttggtttagtcatttctgcattataattgcacctataaaaaataatagtttttcttttaactaagaaaagaaaacattgaaatatatgactccttcaaaaaaagaagttagaaactgtgtatatatagcagtatacattctaccaataataaaactctctctctcctacaatttaggagagtgatgttgaaagacatttctgcacgagtacgttatggggccaaggagctattaatctgtcctagctctctagtacaatacgagtttctatttttttattttttttttcacgggctcaatagagaattgattcttcggatgaaaaaaaaaaatatgattcatgtgagatctagtataacaaaatatctcgaacgccattgcaagctatttgcaccgacactacgtacaaactaggctttaaattctaccttttaattagggtattagagtaaatatattttagaatataccaaattactgattaaactttctttttaaataacaagtttagatactatatttttttaaaattttacaaa

SEQ ID NO: 196480 - DNA, 556 bp, Cannabis indica
tttggggtttggcgtttgagttccatggtccgattctagggtccgggtatgtgagctaaaatgtaaaatataatatgttagacaaaaaatgttttaaaaattgaaaactacatttttatgttttatgttttctagtattttaaaactctatttttaaaaaatttagccaaacgaaccctatttgtttttagcattaaaccccaacccataacctttgctgtcgaacatagatccacaaccccagtcataagcccctgccatcgtcttctcccatgatctctctcgttttccacaattttttgtgatatttagcgatgtatttgcaatgatagacaaaatctgaggctagagttaaagtttaccgatgtttagcaatgttttgcgtatttagtaatgttttgcatatttagcgatgtttagaaatgtatttgcaatatgagactaaaaattgcaaatcacatcgctaaaaattgctaatcatcacgaaaacttgagtgtgatgtagcgaaatttagcaatttagcgacatttattgatatttagcgacatcgtgaaa

SEQ ID NO: 196481 - DNA, 1396 bp, Cannabis indica
gatctattcataaatgcttatatacatataataagaaaggagatatggatttttaatttttttaccactatatagtaaagtaccgcgaatatttatgaatttatacttttagatcaataaaaaagggacacaagagcattcatttcaagaaaaaaaaaagaaaggcgtatgtatatttctaagaaataaaacctaaatcgactaattctacatacatatggtttagaattttttcttcgcaacaattgtgtttttaataaaaaaatttcaaatgttcacttcacatactataaaataatctcatatatttgcaatgaaacaaaaactgaagtcattccaagtttgaattatactatacaaagatgtaaactttgatattttaaaacaaaatctaacatacgtaatctgtactctacaaaagcctagctccattttcaaaagtattattaaactagacatttggtagtgaaacttataaacaatattgcaatgacagctaccccaaacatcatccaaaataatattgataattacttgtgtcagctcagtaataatattgaatagctacaaaggaaggcctgaataagaaggatatgatgatgagataaccaacctggttcaaatgtgttgcaatgcaaggaagaaccaacaaacccgactcaccaaatgcacctccaagcttctcctcaacagccaccattacagaaagttttctatacaacacaaatctcagtgcattattaatcttatcttactaattttcttaaaccagacatatgttaaataaaggaaccttaaacatttaagatgacaacgattaatgtatcgcacacctagcttgcaacaagtacaaaagcaatggaattttcttccttggcaaaaactgattgaccacccccagagagtgttaaaaggctctttataaccataatattaattgctaataggatgaaatgcaacaccctgaaatacaagaaataagtcactttactgtaggtgaccacttatttgagattataacattactactaagagtgatcaaactatccaaacagaccatgaaacattcactggtcgagagctattaaaacctcagctcaagactgtttatatacactgtaataagggagcaattgggtatgtgtcaacataaagataaatcttataggagactacggttaattgatttcaatagtaaaaattctccttaattcatttctagtacaacctatgcaattcatcattagtacattattcattaatacacacatatatttatgtagcagaggaagaaaaagaaaaggatgggttttgaggattgaggaatatcatacagaagaggtagtactagtaggtgctgctgcatacaaattgccaagttttgcaacaaagacaa

SEQ ID NO: 196482 - DNA, 653 bp, Cannabis indica
gaaagagagaggaggttggtggttacttctcaaagcaaagaaatagagttttaaatcttgaatttagaaataaagctttaatatatcattttactatattttagtcaaatgaccattttgccctcaaggctaaatactcacgtaattaaataccaagggatattcatcatttccaatcatgcacactcccaaataaatacatatatcacatattattgccataatctcataattcataaattttgaactcgaactcggtctgagcaaaaatacccaattaagactatagtgcgctaatttgtcaaaattcacctgtaacacaataaaacgaacatactacataaaaatatggtccatcatcaaaataaacatcaaaattataattttacccctctcgagttaaaattaaaaaaatatccctaactcataaatgggatcttaaatgcaatacttctcaaataatttttacataactaattgtataataatacaattactcaattatcattaatctattttaattaggattacttatctatttactaatctggagatattacaacttgacatctactattcacccagcagcgtacgcccagctgtcaccatcacgtggtaaattactatatggacgacaattatctccttgttgg

SEQ ID NO: 196483 - DNA, 1112 bp, Cannabis indica
atttaatacttcacattgtttgtagttataatccacaatataccaaattacaattttatctgtataattatatatctgtcatcttcctaataatactttttattataatataacatctatataaatgttttgatttcatgaataaaattaatatgctatattatcttattttataaatatagtttttaagaatgtagaaaaagaagaaatttaaaaagaaaaaaaaaataatataaattaaaaatattttttatataaaaaataatataattgaacgtctttataaaatttaagtacaaataaaattccaattaagtaattgtattaaagtgaaatataactctattttaatattataagtaattaagtattattgaaccataatataatttaaaatagcacaataaatagatgattgatagatgagaatgaaattaatgcagaaaacacagataccaaaaaaaaaaatatgaagattaaaaataaaaaaatcatacatatttgtgtcatagcatcttgccaatggatttacaaaatgaaacatttcaaaataattagaggaaattacactttataccatttttatattgtactcttttatttttaccctcttttttaaagtctatcatttttacttctttttttaaatattgtaccaattttatccttgttacttcaagatactctctatgtgactcttttatgtcaggatattttgggtacaatacatataaaaagaggtatgtataaaattagagacaaatttggttaattgattaataaaagaggcatttttcaacttatcccaaataattattataagaagtatgaagaagtaaaattgatgttgtacttaaaaaaaatgacacaaaagagaacgatttataatctactatttttaagtaacataatagagttgtttttcttcttttatatataacttcaatctacttagaattgaaaggtcttttttttattatttttatttttatattttgagagtattattataattaattgctacgttaatggagatttggtaccatcttgagttcaataaaatgtgttttatttgaatatcaatattaatattactattttttttttttttg

SEQ ID NO: 196484 - DNA, 539 bp, Cannabis indica
aaatatgaatccaataaaatatataagccccgcgccaaattcaggtacggtcgttaaacacgtcgcctcatactcagccaccacacgatgagccatgaacccccatagtatcacacactcttctactcctccattctcaactccaatttacatggcgatgatttcttcttctgttcattccactctccacaaaccctttatatccccaaaacactctcaacttaatcgaattccccttttggcttctcgtctccgctactcctcctccaccaggaccaccaccattcgtgctacctccgccgttactgttaaaccggtattgcctttacgtacttttctttcactgtaattttggggagattgaacgcaatacaagtaaccctttttgtattttcaggtgtcaaacgtcgataaaagtggaaattccgaatctcctgaggtttttgcttgccctgtgtgctatgagcctctaataagaaaaggtcctccgggtattaatttgtatgttttgaatcgaattcttatatggtttttttttt

SEQ ID NO: 196485 - DNA, 1341 bp, Cannabis indica
agggaatatggtcagatcgaaacaaggtctttcatggtggacaggcacgactgagatcttcaatcattgcatatgtaactggttttcatcaggactatacccatgccaaaacttactctacaccagctgctacaacacaacatttggccattcaaccagccaccaatatcaggctgcagtaggcagttccatggtctccacctagaattaatggtttcaagttgaatgttgatgcaacaacgaatttagaagacaaaaaaaaaaaaaaaaaaaaaactggaagtagggctattcttcgagatcatgatggtatggttattgctgctctttccaaaattgtgcaaggaagctttcgatcagatgaaatggaagcaaagtctcttttccatgctctcaattgggcatcacaattacaactttctataatgcatattgaaacggatgcattaattctacttcagttgatttatcttgcttctctaatcttatatttgatgttcgttgtctcttactctttttccctggtgttttagtatcccatattaaaagaattgctaatcaaatagctcatgggttagctaaatttgctttagggttggatgaagacatgtgttggataggagaaattacctattctattttctctgttgttataaataatttcaatttataatagtagtgaattttctaaaaaaaaaaaatatacgaatttctatataatttgacataataattattataaaatatcactaatgatcgcaatgcaccacctctaaaagtactaacatcacaagtgccttataaaactattttcttacagaattttaataactttcttattagtctaatgaatgaatcagatacaaaagacattataatatttacactatcaaaatttgttggaagatattttttaccatgcagatgaaaaagtccttctaaccctcttaatattaatccttacaaaaaaaaaatgtatattttaaactttgacctaaattatacaatatagtataatagaaataccttagaaaataaaatggaatggataattcaactttaccaactttggttaacaataaaaaaaattaaaaaggtaatatgttaattattaataataggctgatcagactaaaagaaatatttattttgttataaaaattttatttttattgtagcctagtgtattataaatacattttgttataaaaatataattatagaatatatatttaataatgtaatttattaaaaaaaaattaaattattatttctacttctgaaaaaaaaaaatttagcaatgcgcttattgtctagtaaacttacaaaataataatatct

SEQ ID NO: 196486 - DNA, 1029 bp, Cannabis indica
tgtaggtgacaaatccatgattagaaaacgttacatgcatttaactgaggagattctcaaagaaaatccaaatctttgtgcttatgaggcaccatcattggatgcaagacaagatatggttgttgttgaagtacctaaattgggtaaagaggctgctacaaaggccatcaaagaatggggccagcccaaatcaaagataacccatttggtattttgtaccactagtggtgtggacatgcctggtgctgattaccagctcactaagttattgggccttagaccatcagtcaaacgtttgatgatgtatcaacaaggttgttttgctggtggaactgttcttcgtttagccaaagatttggctgaaaataacaaaggtgctcgtgtattggttgtttgttctgaaattactgctgttacttttcgtgggcctaatgatacccatctcgatagtcttgtgggccaggccctatttggtgatggttcggctgctttgattgttgggtctgacccaattcctgaagttgaaaagcccatttttgaattggtctctgcggcccaaactatacttcctgatagtgatggtgctattgatggtcatttacgtgaagttgggcttacttttcatttgcttaaagatgttcctgggcttatttctaagaatattgagaagagtttaaatgaggcttttaagcctttgggtatttctgattggaactcacttttttggattgctcatcctggtggcccagctattttggaccaagttgagtccaaattggctcttaagactgagaaattacgtgccactagacatgtgcttagtgagtatggtaatatgtcaagtgcttgtgttttgttcattttggatgagatgagaaggaagtgtgttgaagatgggcttaacaccactggtgaaggacttgaatggggtgtcttgtttggatttgggcctggcctcactgttgaaactgtggtccttcacagtgtggctatttagattatatattactttaatgggcttttagtggg

SEQ ID NO: 196487 - DNA, 830 bp, Cannabis indica
agcgttccaacttaagatattcatgatggttgcaaccccgctgaatcgtcaaaagaatcatctgaatccaacataaaggaggaaacattttgattgaaaccaactccttgtgacgaggaaggagcagctggggtgtcaatttgattgcgacaatgcttcaataattgtctcatagacaactgatcagtctgcctctttagcaccttgttggggtataagttttctttgttagcagtcacagcaagggtaaagggtggagtagcagacgtgtaaaggccatggtgaaggggggctaagttattaccagcatatggaggtggtatagggcgtgttaatggagggtaagtagcaacaggtatacggtttggaggggaatggccaatgtcaggggtgtatatgtgtgataaaagtacagtattggatgacattggttgttttaattttgaattggtatgtgtaggggcagagggcacagtcgtggcattacttagaggggcatggttacaaggaatgactgatgatgggagtattgaaggagagggagaggtatggacagggtgatctggtgtagaatgcatagtgatatgggactggctaacagaaggagcaactgcagtggttggcaaagtcaggccgtgggggattgtagacccaggattaatcgaaatagttgtggacgattcaccagcagtcaatgcatttggagtaggaggtggtaatttattcagttgtggcaaagtagaagaaatagtgttacgggtgagacgtgtcaagaaaggccatgcattgccttttgaaaagtcttgtctgtatttgtcatatccagaagt

SEQ ID NO: 196488 - DNA, 2231 bp, Cannabis indica
atagggaaggaggtcctattaaagtaatattaaacttttcaaaaaatatgaaaaaaatacatttagactatttttgaccattgatgataatctaacagtgaaattgactacggaggtcggtcgtcagtttctggttatgcgggacccactttagtaagttgtagcttaaatttgtaactctcttgaggacaaaatttggagttgataacttcagaattgcaattggagtatgagacatgacttgatagagcattaaaatatcttcgaaatataagttgaatcgcgtcaatcagatcaatattgagtgtgctatggtcgttttaccgaaagctgttctactcccagtacccaagttgacatccaacatccagattgacatgtgatgtcaacctggacacttggccaaggaaaaatagtgtctgggatttactttttgaagcctaagtaatatttttacatcacttagccagtttatgtgttctgatgaaggtggccaccgattcttggagatgttgctatttcgctaaaacagaagactcgaaactacccgatttccgaataagtcactttgccaaaaaagtgaaaatatgaaattatgaatttgactcttctagcttcataactctcagtcactatgaaaaactagacgaatgatcgagacagaatcagaatcggataagcagaaccaacacaccaggtcatatgtaaacctgggcaatgagtgctcttttcggagcttccggagttcttgttttgatacttccaaagttatttaaatagaggacgaggtctcctaccctattttttactattttggagagaatgcttagaacaaaattttcatttgagtgatcgaaactagcatactaggttgattgtcaatctgggcgctgggctcagctttgatgcccctgaaattgttatttttccttgagtttacttgtatctttgttattttttatgacaacaaaaatacccgtaacacttttttggaaaactaattggaaacctgggtgctaggtctagttttaggcctttagaaagttctgtttgctccccaaaaagacttgaatcttaatatttgatgaaaaacagagaatgtgcccgaaagactttttgaaaaaactcatcgaaatcggcccaggttgacaaaatatctacatgggcgctgggccagcaccaggtgtcaactgggcgctggtccctcactttggcctcctttcttcattgaaagtacttgtttttccattttttatgaagacgaagaaaatgcccgagatagatttttgatttaatgattagaagtgttgtcaacctgggcgttgggtgcctgaggcactcggtgcttagaaatgaaagttctctgaatctgactctgatgccttaaatatgttcgtgacatgtcatgtcctagtacaaagtttgtccgatttgcactaagacgatcccgaaaatcaaaaccttggttgggctgtcaacttgggcgctgggtgaaaccctaggcgcccaggttgatttctgtggtgttattttgtgtattttcagctcccgggccttggatttggatgattcatgcctttatagtacataacactgaaagatagtgaattgaaaataacttggcgaaatccaaacacctattccggagttcttgaagtcaacctggacgcaaggctaaggacccctcccaggtcgactgctatgactcggaactactcaatttcgaaattcttaccacgtgtcaaatattaatatccacgtcaccaaaaattaatttttagattaacaattgtcaatatatatatatatttatataaactcataataccataatatacatatataaggatctcacgtataatagctcagtaaatatatacatgtcaaaattttagggggacaaagaggtaacatagttccgccacttaatgtttatagtcacaattaggacggacttagcttcaagctagggtgtgcaaatgcccctcctcactttatattaatttattttaatgtatacaatttgttaaaaacttcaataaattataaatataattttgctcattctaaaatataaattaatatttttatatttatatatgttattctcccacctcactagctaatatttctaattcggtccaatatcaaaggttaaataattaaagaagtctaattacaatttcctattcaaattttatagtcaatttttcacgtccgaaattatatgt

SEQ ID NO: 196489 - DNA, 598 bp, Cannabis indica
cggtggcggcggacgatcttgttagtctcgatctgggcagcggacggtggcttcatcattgagatactccttgctagatgaagttgatggagacagagacaatggaagagaccgagaccaacaaggtcgagatgcattggagtggctaagagaacaacggagatagcgtgagaggggttcacagcatggagaaagagagagaagggagccagcgatgaagctcccagtctccgtttgggtccacgaccggcgtatctcacctccgtcggaagagaaaccaacacgaagggaggagactgtgatttttaaggttggcgacgagattcgtggttttcgtttcgagcttgctctagtccgatctatcattatgagatagttttttttttaacctgtgaagagattgttttttagaggagcgactggttatgaagaatattagggtttgtagcttttaaatgagagagaatattagcaaaaagaaaataaataaatagaaattaagatgtgtagctgtaatgtgcaaattctaaggactcaattttatttatttatttaaaaatgggttaagtctagtcaaattggacattatatatttttt

SEQ ID NO: 196490 - DNA, 1613 bp, Cannabis indica
ttggggagacacaatttatcccaagacttcaggtggattccatggtttcctttcttaaagccccacaagaagtcctggacgaagccgtcaacctggaaatatgatggttagagagcttatttgtttgcatggcgtacagaggcatcgaaagccccaccgattttatcaaagtagctctccctgctttcgaaagcaccttcgctttccacccttacaactttgaagtgaggtcatctaatataaaatggaaatctccatctttttgtctagatcggaacaaggggagccccagatatttcacatttccttcaggtcccccaatccccaactcatctcgaattccctacttcaggcctttctgatgtattgttgctgaagaagattgatgtttttagcttgttgacctgctgcccagaccagtcacaaaatttcttaagccaaagccagaaacctttagcctcttccagagaagctcgagaaagatgaattcctcagatacttccattgtattgggcctcatggataagtcgggacaagatctcagctgcccaaataaagaggtacggagagagtggatccccttggcgcagaccacgtgattgatgaattatgccaacctgacccccatttaggcacacatttagtgaagtagtggatatacattgagaaacccactttctgaacgcgacatgcacgccaaagcaagaaaaaacacgatcaatgaattgctatctaatcttatcataagcttttaccatatcaattttgatagcaaaaaatccttctttccccttcttcctattgaaagagtgaatgatctcttgaacaatgatgtttttatcttggatgtttcttcctggaacaaaagcagcttgggtatggcagataattcttggaaaaaaggacttgattctgttggcaataattttcgatatcaccttataagacacattgcacagagaaatcggcctatagtgatgtacccgctgtgggttccaaatctttgggataagcacaatatctgtggcattcacccccttctgcatattacaagtggagaaaaaatttgagatggcctcacaaaaattcttccccaaagactcccagtaatgtttgaagaataaaactgacattccattcggcccaggagccttatggtttcccatggcgaataaggtttttcgaatctcgtcaaaattagggattctgatcagctctcctgctcttccaaggacagtccctcctgaataggattcgagcagttaagatccatcctagaacttgaatctataaaaaaacccctcaagaaatcagtaaaagcctttccaatgtcatttattctggagatccaaatgtcattcttatccaggagaatctcaattgcattttgcctacctctaatagtggctgacaaaaagaaaaacttagagcatttatccccttccttcagccaagaaattcgagcacgttgtttccaatttatttctttcatgcctaaggtttcattaagggctctacgggccacacttttagctttcccgtctcttgagccagtaggaagcgtttgcaagtgattcaactgactttccaactgattacgcccaaacttgtct

SEQ ID NO: 196491 - DNA, 560 bp, Cannabis indica
caaaatatagacataacaattgctccctgaaaagtgtttttagaattaaaagaactttttaagaagaaaatgatagaagtataattttctcaagcataatgagtacactttattttggtggttaatcacccaagaaagttgacttcagcatttaaacctatcttttcctttgtcctcgtcttcttccatgaagccttgatttgcttggaggaagcctcgacgtctgaagcaactcctttcttgccccgctgcttggggataggaagacgaagatatgtttaagtttctcgagaagaaggcttagcttttattctattctttgccaagatttttgtttttttaaacaaggactataaggctgagagaatttaattttataagttttttatttacttattttgagacattgtcttgctggtcggccaactaattttaatagagcttaacatccatcattttttttaagttaaatgatttaaaataatatttatttttatttgtatacattatagaataatagaaaggaaaggaaataattgtacaaaaaaaacaaaaaaata

SEQ ID NO: 196492 - DNA, 1618 bp, Cannabis indica
cattgaagttagaatgggaagcaataacacgagtggctgctgaaagaccctcagaaactaaaaggaaaaggtaaggggagagagggtctccttgtctaattcctctggtaggagaaaaagaggggagaaggtgattgttaatagaaatggtgaaagtgacagtggatagacaacgaatgattaaggagatgaaagtaggtgggaaacctaaatgagtaagaatagactgtaagaacccccactcaacacggtcaaaagctttttccatatctaactttaaggcaacccatccaacctttccagatttacgattattgatggcagaaatgatctcattagcaatgaggacattgtcaaaaataattcggtcactgagaaaggcactttgattactagaaatgagatcactgagaacaagctttagccggttagcaatagccttggaaataattttatagattgtggtgcaaaggctaataggcctgaagtctttaagggaggaagcattctttttttttgggacgagaaccagagtagtgttgttgatggaggaaggatcagattgattatttaaaacatcaaggacagcctcagtgagcgagggaccaacagtggaccagtttttctgatagaaatgggcatttagaccatcgggacctggagctttgtctccaggaagttggaacaaggcatcatgaacttcatcaggggtgaaaggatgactgataattgaatattggctaggggtgagggtgcgagtggtgccagagagaatagaatgtacagcaggaaaatcaatgccctgggaagagaaaagggaaacatagaagcttctgaaatactggcagatttgattaaaatcatggatgacagtgccattatccagagtgatatgagatatattattgtgtctacgacgggaagaggcacggtgatggaagaatttggtattcttgtcgcctgccttaagccatgaagcacgggcccgctgtttccaatagatttcctctttatagaggacacagtcaagatcgttttgaagggccttggctcgatgaacatcagtgtcagtaagggtagtagaagagtagatattattaagagaatgctgaagttgttggatggtatgtttaaaatgttgcttgtttttaccccactgcttgagttggtcaatgcagtgagattgagtggcaaggaaggaagaaagacaagtactgttttgggtgggaggagatgagtgccaattggaaagaataacatggggaaaatctggttcggagaaccaagaattttcaaagcgaaaacccgagaaatggtacatggattgactgggatcagtaagtaagagcagaccaattcgcattgatcactgcccaatcgagtctcacaagagttttgccatgcttgtaagtgaatctgtttcctttgaagggcataggggagagagaatacttggagagaaaagtgttgaagtgaaccatagcattagaaggaggcattgtactagtggacttatcaacaagggcaagataatcattaaaatcacctaatattagccaaggggagaaggagcaacatcatataaacgattaagtaaagtataacaatctaatttacc

SEQ ID NO: 196493 - DNA, 1218 bp, Cannabis indica
gttgtgactaaaaatatattttttttttctgtaatgccacattgactagaaataaaattttgagtaataatatgtgcagacaattcaaacacgcttgacacataatatttatataataagtaatttcaatcaataatttttatttatgataggtttcacttaacaaaagtgacttttgtcatgtcatgtttgtgtgcaattattatttatttagaatttttctagttcaatggctatattataagctcactaaatttgtaaagaacacctaaaaaaaggaaaatcattgtttgttcttctctatattcctaacagtttcaagttttgtagggacaataccaaaatgatcttgcagggttgatgtttgacaaccaaaccccagatgagccgaagatttcgggcgaatttatcttggaaaacatcttccaaatcgacacgaacagatcgaaatgggtggatttgagtgtgttgttcagcatgattgtgatatacagggtgatattcttcttcatgattaagatcaatgaggatgtgactccttgggttagaggttatgtagcaagaagagtaatgcaacagaaaattggtaacagatctcctgagggcctcactcaatccccttcattgagaaattatgccaccaacaataggaatacatctgcaaattctaaaagataaatgagacacacacacaccaccaattcaaaatatcatctctaccccacttttatacttttaagttttcaaatctgaataggttattttgtatctaaatgctatgatatagaatcaagtgaaagtgtttttttttcttttctttttttttttactaattaaatttacaataccaattacctaatttctaaggatggaatggaaggatgtctttaaactttcaaaaggctgttttatttccttttgtctaatttcattatattggaaattaatatgagttatataatgtataatgtatggtttgtttcatatatataataagggtaaataccattttggatcctatcaattagattttctgttttgttaaacgataaataaaccttgtatattttaaaattgtacaataggactcagactaatttttattaaaataaaacttaataataatctgatatagagatgttatgacaaaaactggttatattttctgtatctgttcgtgttagtaaattgtcttaaaagttagttttatttaaaaaa

SEQ ID NO: 196494 - DNA, 2438 bp, Cannabis indica
aaagccaccatgtccataggtggcaggttggcccggacctccggtaagggctcgaaacctcgctccactgtagtactcgttgactattctccaaatgtccggcttgagtcactatgctcgtaacattagccatcccatatgggagtgtagggtcacgatcagggagggatgcacttgactttcttggtggacgtggcttatccatatatgcaaaagtgcaaaggaggttagaatgggatgcaatgcatttcattcctttgattcgacaggctagagccttgcgattcgacttaggctaggagggggcttcgtcctccgcctgatgaatgggtgattccacaactaacggtatgggagagcagtcaagggagggtggctcaggtggaacatgcactctaagtaagcaagataactcgctgtgtcagcgtaaagttgcttaagatgagacaaatgggcatgtgtgtgggcatgtgtaacactctaagattgaggagttggattagcaaaccctaactagttaaatgtgtattaatatggaattatattattatataatttaatatatatgaactatactgataaatgacatgttaagacctcgttggtgagctaagggcatttttcgtaattttaatatgagaagggtaaaaccataattttaatgttatagcatgcttatagtatacttgttttgtccttctgtaggtgtattctgacaagtaagcgtggtctagtcacaactgggtattttgggtttaacttggtttgggacccgaaatacatttttaggattttattttggcattttttaaataattgaataatttgaaatgaaaatttttcccttgttgtatgcatatgtattggccctaggggcattttggtcttttgaccatttgactctattttcaacaaaaggaatttttgtaaaatgaaaatcatattttctggatttttcccacatcccagccgacccctctctctcaacctttctcatctctttaatctttttattctctgagatttaaccttgaatcaaaacttggatttttggagtagtggtgctaggattgtgaagagcttaaggtagtttttcccgcctctttattttaagttttgatgctgaataataagttgatatttaggtatttttgatgttgttagttgttggtttcatggttgtttaaattgaagagtttgttgatgataaattgttgtttgagcttgtaatgttatgagagatgtatcttgagttggttagtgagtttttggagttatgatttagatttgaatatcattttttttatcaagaaggaatgatcttcattaaccacaagcaattacaaacctaaacacaacaagcagcaaggccaaaccaactaattattgtatatattctctataaatttcctctcatgagtatttagactccctttttttctacttgtaatctatagaacactatatctttaatatcctatacaatttttaaagttgtactcgagtaattgctgaagatgcaattatttttgttgctccataaattgttaatcaatgttgccataactgaagtgtaaattctatgcttcttatccttcctgttctgcaccagccagctttgccatccttgaaaatcagtaggccatctactcattccaagccacatacagatttgagtcataacctgctgagaaaggcagcaaacaaaaaacaagtggttgtttgtctcagctgcagcaccacaaaccggacaatgaacattgtcaagggtaattttaaactgagcaaatttgtccctggttaacaactagttattggtcgcttgccaaaaaataaatctatgattcaacatgttgaagctgcaccacacattgtcgctaatttcaaattgagtttgctgttagcttagtattgaagtgtcccatagcagcccctgcacttgctatatcattttgagtaaatttgtccctcaaatgaaaaagtttcctccaataccaacttgtatcattttttagaacataggtccaaatggaattgttcttgagataaatattattgacccatttaacccaaagtaagtcacttttggatgaaatggcccaaatatatttggcaaggacagcttgattccatttgaccacatctttgaatcctaaaccaccataattcttttgaagataaactttttcccacaaagccacatgaagtttacttctattaccattccaaccccaaagaaatcctctacaaagcttctcaatctcccttgtgatactatgaggcaaaatgaatatactcatccaatagttgcgaagccccagcaaccctgaatgaatgagttgggccctaccagcaaacgaaagatgtttagttgcccaactatggagtctttgtttgattttctttatcatcacaccacaatcttccgctttccattt

SEQ ID NO: 196495 - DNA, 937 bp, Cannabis indica
tactaaaaaattgcgcctctaaatgtcaattttaaattagacgggtattattatgttctttagtttctcattttataaaaaaaaattaaaaaaaaaaaaaaacaacctctaaaaatctacattaacgaatttgggtcaaactctaacgcaaccgcccctattaaaagaaacatataaattaaggagtgtatcttataggaaaatgtgcatctctgataagataataacatcatgatattcttattattactattattttcttaactgatattcttatttacttatttatctcttttagaaaagaaaaatgaaataacacaacattcttatcgtggggagacttatctattaatttgtttgctccataaaaattaaaatttataatatacctctaccaaaagaaaagaaaaaatcccactaacttgttatacctagtaaatattaaacacgtatatgatctatgcctaggccaagttacccaaaaatgcaagttataattcgagtgataaatcaaaagatattggagtcatatcacatgtttctcagtgccttggtttgcatgaaacatgaattggttgccaacttcgttacaacttgttgcacatggacaaatatcgttttcttttttttttttgggtatagatccactattaaaagattattgaaaaattaaagtggcatttaattggaaagaatgaaaatatataaaaatagaaataaaatatgcatacaaaaaattaataagaaaattattaaattttttctcttattatattgtaatggtctttctttcctttttaagatggaatagtcatttcaccaaaatagtagaaagaacattctattagaatgtacattaccactactttaaaatgtaaccaagtaaaggaatggaataaaattacttaccttctattccattccatttcatttctcc

SEQ ID NO: 196496 - DNA, 2262 bp, Cannabis indica
aaaattttgattcccaattaaaatattaatgaaagtaccttgagagatgacttcaatggtaaagtcatgaagcctgtgttggttttgaagcaatgagatataaaaaagacatttcagaaaaactacaatcaaggataaaatagttgagagctgaattggagaaatgcgaaaagaaatttgagatgtttgagaaggagacatatgagagcttaaatgaaaacacaaatgaatttattaaggaagctctataactattataaatagatgcttcacactgtctttttatacttaattgtgtgtttgtgtgtaataacagaagctcttccttcttctgataacattgaattatatatgtacaatatatatttgtagtgttaattaatgaaaagcatgaatataatcatgaaagtgaaagttcttgtaaacaaagtgattcagccattttgaggctgcaaagcaaagtattgagagtgagaccattgtggctctcaaagcaacagatgcagtggctagcttattggtcacacccagaagaccaatcaaaacaagagaggtgatactgagcacaactttaaccacattcagagctttgtatgctgcactgcaactggggcaattcaccacatgggaccagtacctattcaaaatcaaaacgtttgaatatagccaatatagcccgaatttcaacactcgatcggtcctactatactctatgagcttaaattgttacctgtccataagctgttctctggaaggagatggaggaagtgcaccactgaatttgcctctccaatcaacttgaccgccgccatacttgtttaaccaatttctgaaaccaaccacaagagcatctgattttgttggcacataacatgctcggctccattcacccgaagcatgctctaatatccttcgttcctgtatgtattaagcaattaaacacttgttgtgtatgtgaggcttaatcagtagcgaattgagacaaataaagtcacctcaacatggagaatgtataaatctgaatccaaaatcaagttctgtccaatatggaatatccatcttggaaaaatcttatctaaccaatgactgaaattccttgggatagcccatatcaatctacttttgcctggactaactggaacccccatgaaaactaatcccattttcctttcctaccaaaataaagaaactttagatcaatcaaacaatataagcacaacataccataatgtttatgtgattacctttttgggtgtagctttgttacttttatctggtaaaacagcagcatgaccataaaatatacatggtgctatgaattcactattaccagcccaatcttgctttgcaaaaaaaccatttttgtccaacttattcactctcatgtcaagaggtctgcctccctctctatccatcttctctgtcaaaaccaaagtatgaaacacgaaattaaagaaaaaaattacaacaaaacatttgatgttcttatttactttcgggctgtcgagttgcaagaattccatagtgtgcatatggaacatgtgaagggtccataaggttctccagcaagatttcatatctgaaaatgcaaagtagaaatcaatggaaaaggaagataattcttcaatcatagttgtaagagtgtttatttgcatacccgaaaggaaaatctctatttcccattgaggatatatatgatggatcattgagttctggaatatatgggggacttttctttacaagaatatctttgtattgaggatcagtgttaggccaaaaccagaggatatcattcatcactgtacttggataggcagctacacatgctttcttggatgtttgaatctgcataatagattccaacaatgctaattacagctatagagaaacacttcattccagctttaatagacaatttctctctcaattatcaacaaaggatttgtagtcatcagagggagaaaagttattaacttttggctttattcttgtttggaatttggttaattagctccaaattccaatacattaatggaacagaaatctaatgatttaaaaaggtaattcctatttgccagtgtcctaatcaggtaaatggtataacagtctctttcttatgattagaaatttcttgttttgaagagagaaacaacttgaaaaagtagacaaaatcattagcaaactcagcatatcaagaaatttgatcatgtaaagagttagtaccggagggccatctgggggtgcttgagggatgaacttgca

SEQ ID NO: 196497 - DNA, 587 bp, Cannabis indica
atactcatagatcagtcacaggctattgtatctttctaggagactctctcatatcctaaaaagcaaagaagcaacctactatatcgtgctcatctacaaaggcagaatactgggatatggctaacgctacttatgaggttacttggctcattgctcaacagaagaatttccttatttctcatcaagtacctgctgccctatactatgaatgcaagagccatccatatggacaacattgttcgcgagaaaattcaagatgggaaactcaagcttctccacatcgcatccatgctcaacctggctgatctctagccaaacttctattcccttctcagtttaaagatttattgtccaaaatgaaatgtaaaaaacaatttatatgtcatcttgagggggtggtattagaacccaatacttgtacttattgtttggttagttagtccattgcagggtaatagttttggttatttagttagttatgactaacttcactggctagtgagaatatgtatgtatataaacagggacggacccacaagtaacaatgtgggggttatagctccattaacaaaaatattgccttttaa

SEQ ID NO: 196498 - DNA, 531 bp, Cannabis indica
tttatatatatatatataactcaccaaatgtaacattttattttagaagagacaatatttcaaactatcaatcaaactcccaattgatcttcatttaaattaatttagtttgatttgtgtttttttttttgttgagataaaaggaaattcgatttggtttaattgtggaaatattataaactcttctggttggagaaatctgatccgatgaaactcatttatggtaagaaaatagcttcaataatattacttacttttttacagtatgaaatttactttccatgaacaaaaatttaagtatcaaaataaatatatcagatgcaaatataagtaacattaatgacaaaggctaaactaaccgaaaatatcactctgtaatctctatcacaacaattaagacacaccaaagattttcatctcgaaaaccctaaaattttaacctttataacaattttaattgtggaacaaacaacaaataattaaattgataattcagaagaaaatttactggggaaccgtacaaaggttttg

SEQ ID NO: 196499 - DNA, 534 bp, Cannabis indica
tttgtaaggccagctcatatctcaacaatattaactaatcaaagttacaaagatactatataaaaaacatagcattgatattggacacaggtgcgaaattattacgtgaaattacatgggatcaacaacaatatgacattacttacaattctgagaattgttgttggtggttagtgttttttttacgagcattgctataaataacaatggtgtctagtaccttctcgacatatcacgttgtgattggttagcgatattctctaaaaattattatattaaattatatgcgacccgatacttagttggactaatagcgatactgacacataggaacactggtgccatttagtatttttcttttttataggcaccactgtataattaataaatgatattctttaaaagttattttttaaatcatatgaaacttaatatatgatccaaaaaaaaatattaaatacaagtgacacttttaacaattcttggtatgacaatattagataacagtggtaccatttagcatatttttaaata

SEQ ID NO: 196500 - DNA, 999 bp, Cannabis indica
gttgttaaaaagtaaatttgttgtccatctgtagtatttttcccatattttttttgttgttttatttaccaaattttttctttgaaaaaacaaataaaatgaatgaaaaaaccgaattttgtaactttacgattttatcttttaaaagcaatattttgaaaagaaaaaataaattaataaacaaaaatgttcggtgtagtgagaatgaataaaataacataaaaaataaattgactaaaaaatatcaaaagaattttgcctcttacaatttctctcaatccacatatatttctcttgttggcaaacatgctgctatataagcagcagaaagtgataactcattgaaaagcatcaatacatcttttcactaattgaatctgaattcgagataaaaactgatacaagaataaaacaacaagcacattttcttttcttatgactcaatgaaagagaaatacagctcaaaggattactagagtatttcttatacgcatccgaaagttcccacattctaaaaacaaaataataaaatcattagcctcaacaaaagttcatgaaaggtcacggccacaactgcagaataagtgatttaatcaataccaaaatttgcaaattagacaacttggtaattctctgtcaacaactgcgttctttggccgaacttgggtggggctccacctttctggggcaagacgttcacaacctgcaaaacagatgttcattgtcaataaagctaccagcggtatacatatgcattttcaccaaacgtttacaatattattcactaatcgactgtagttatacagatgatacaatgggaaacaagggcataccttcaattcactaaaagtattagtagcagagaagttcacagaaatagggaaaaatacagatgagtctgctgggggaacaacaaactccatcgatccactgcaagcagttcatcatacaacataacgatcacttgcattgaaatcatgtatgataggtttcaaaagg

SEQ ID NO: 196501 - DNA, 1425 bp, Cannabis indica
ttctttctttctttttgctattgtgtttgttgttttatttgagttattgatgtattatcggatggtgtttttagagtaaatatggtatatgaattgtgttgtgagtgtaaattgttgtggtttgaacaatatttatgtatttcatttctacaggtttatttgatgaaaataggaagctttatggtttgttttgattcaaatatggaaaaaaggtgactgttgttgactgaaaaatatggactagacttctaagccacacctgcttgctagattggtgaaaagaaataagtagttaagtaattataagagagagtaaatttacactagttcactctttgtatcgcaacagtaaaagagctatgtctacttcgatatattatttttcacaacatggtaattacaaaaaaaaaaggctaagtttctgcagctctaatttctagagagagaagctctgagtttgtgagtagttttctgaacttgaaaaatgagcttatggagctctctttttatagatgaaggaggcccacaaaaataaggaaaaatacaaataagatatttttgactgttgatgatgatctaatggtgaaaattatctcttggtggtgatggccattttttagagcccagcgggttccgctgtgcgtaactcgatttttcattttttggtgttcggacggtcggtgtactcggtttggtcggtttcttgaattttttgctcacccctattggattcaagtcattaaagtctaaacttctatcccgaatatcccgaaatcaaccagggcgcaaggccaggatatgtattattttgcctcataaacttttcatctcgaaattcactggacctatgtatttttgtgatcttgaagaatcctctcgtaatgcactggacctatgtattattgtgatcttgaagaatcctctcgtaatgcactggacctatgtattagtgtgcctcataaacttttcagctcgttataaataatccctcaactattcacagtgttataaattagtcatttttttaattttgtcacacgtggcgaacaaaattatgacatggttgtttagctaatttccacgtcagcactacatgtataatataaaattaaaaatatatatatgtatatattttttaaaatatatatatattaaactaaaaatcaattaatgattaaacaaattacgtaaaattagaattaacaaatttattttttaaaaattaattacacacatggtgttaacatggctctgaagtgacaattgattaagtagttatgttatcattttatttgtcacgtgtaataaaatttaacagaaaaattaatttataatattgtgaatagttaagaaaatatttttgatgagctaaaaagttcatgagacacaataatcataggctataataggcaaaaaaaaaaaaaa

SEQ ID NO: 196502 - DNA, 1788 bp, Cannabis indica
ttctttatacaaaactcaaactcaatctctctcttttctctgtacctctctctctctacctctcaatctttctctatcaagatcacctctcgaaactcgtttgaacccaacgttggtggtatttataggctcaaagaaaaagatcctaagtcggtggctacaactgataagttgttaagttagttacgccataacaaagtgcttctggatgagacagagtgcttccggatgagacatacgttcccgggacaaaggaccgaagcgtatgctgaagggacttcccagataggaaaagagtcagctggtgtctactatctggaactcccttttagggggaagagctagcccttcggaacttcttccggggaggactaattttcctgaagactacacccagagtggacataatagttagccttctggatggcaactatcattcaacgagacttcttccagatggactagttagtagtccagaaacatactttcgagggacaactaactttctattactagaataacattttggaaatctttttatttcgaggaactataccacagaactcttggcaattaattaaagataacacgaaaatcatttaaaaaaaaatacgaaaaccaattttagtacatcaataattaatttgcctaaaggcaacaaaagagtaacacgatcaattaaagtgtgcgttgatagaaatctggagaaatgttggtgagattgtataattgtgagccacaatagttcgtttccctcttatgagcgcaactagtccagtaagaaaggatatgtgaccaaaaaccatacatgcaattaccaaaaatatgtacaaataacaagtcacagttatgaaatgtggtcaaactgtgacaacggagatttccaagctgagagattgaagtgttaatatgttagccacaattcaactatgtgagttacctctgggtaagaaagtaacagaacttcccttgaccatatagaaaaatcataactagtactttatatttagctgaaagatcaaactccaaggtttctaatctctttatctcaaaaaaaaaaaaaaaaaaaaaaaacggtttactaatctcaagatctctaaataatactattgtagttctacagcccaactcaaagcaatttgatcacaattaaatcagtaagaaaacaatttaaactagaaaaaacgaaataatgctaacactcagcaaccaaattagcatatacttcaattcctccttgaggtttcactataaaatcatgtatgttacaatcaaaggctcgagagtaattgagcaataaacactcaatacagagattcattcgagcaagaactcttctctctatcacttgctacaactcgagttcttgatcttcaagacaaactcacaacacttctctctctcacttgctatccttacagaatatctcaatgtgtttcctaaaacctaatcctaacttcaaatcttctaaaagcttctaagacttcacctcgaaaatgacttaagagctctaattaaatagggacagacagcccatataggtgtctaactacctagaaaataggccatattgtaacaaacgaagccggtgtctcaacaactagaaaccagttgttcgacataaaaaattaaccaagaatcagttattagttaaaacggttgaattggttatgtggaaagtacaactaccacaaatacgctatgccatcacgctaaaaagaaagtaactcaaatagtcaagtacatggtttactccaaaatcttaagttcgagtcccttttggatacc

SEQ ID NO: 196503 - DNA, 1948 bp, Cannabis indica
tgcacaacattgttctttaagttggggaaatttcttagtttttagatatgaagagaactctctattccatgtatcatattcgacaaaaccactacagagatagattattctcattttgagaagcataatgttgatattgatgaagatgaggattctattgaagtcttggacaacttttctccaataccatgttccagttctaggccccacaagaaaatgaaaactagtactgattatggtaattaaaactaatgaagcaatgttttcatgttaattgttaacatttattgatttgtgtaatgtgttgaatatgttttcagtcatgaagtgggatttgtctgataaagtacgtggagaatcttccctaccaaggtggatgaaacctgaaatctttttaagtaggcagatgttggatgcaaaagacagggctgaagctgtcaagagagctaaaggttttcaatctaaagacccctttttcatggtttacatgcaaccatcctttgttggagctaagtataatatggtaattagtgattatatatatatgcttcttacaagttcaatttaaatgtttctcatattgacttaatgtattcttcttgatcttttgttgtgaaggttataccaatgctctttgcaaaatattacctcctcagtagcagtagtaattgtcaagatgtgatccttaaggttcaggatgggagaacctggtccgctaagtactatgtcagactggatagaggatctcccaaagctagactcgagcatggttggaaggaattcgctatttataatgatttgaaagtaggtgatatttgtgcctttgttttgaggaagagtattggggtaatgttgcttgaagttgttactttttctggaaatggagtagtgaactctcctctgttaccaggtaaaaacataaatttgacttattctatcataatatttggtccttgtgttaggatcccacatcgactaagtgtgggatttgttggttgtttataactactaggaaacccaaaataatcgcttgtttttttaatgaggttgcagaacttaatgccatgacaaaaggaagtcggtcgattaaaatagaatctcataaaattatgaacactaaaaggccatcctttacagttactatgcgtgaagcctatgcaactggtcattgtaatttggtaagtttaaacatgaaaaactctcaattttctgttttactcaaaaacttagtatgcatctatttccataacatatagtgtttgactacaattttctaagtggtgtttgtttttcatttggatagttcttgccgtataagtttgtgaaggagtaccttaataggaaagaatatgaggtgagactttgggttgcggatggtagatgttggtttgtccaattgaaggtgaggcaggcaaatggattaccaagagctgaattatgccggggctggatagcatttgcccgagcaaataatctgcgaacgggtgatgtttgcaagtttgaattaagtgttaacaatggcaatgaagtttcatttctagtttccattgttaagggtgctaatgttgtggatgatgcatataacaagataggttagaaatgctgataagtgataaccaatatttataattgaaatggatttatggctttagtattaacttacttacaagtgttgttttcagctgcaattaagagaaaagcaactacaccttccaagctaaagagaaatcctcatgtgaaagttgaatcttcttttactcatcagaaactgaatataaagaaaggacatgagaaaactaaagttgaactttcaggtatatatctgatgtgtatgattcaagtattttactttcttgaccattcccaaaagactcacatttttgttattattttatttggttgcaaaacttaagccttgccaaaaggaagtggcctaaaacaaactaca

SEQ ID NO: 196504 - DNA, 1427 bp, Cannabis indica
gtacatattcaaattaattacatctacatataataagatttataataattattgtatgtaaaattaaaatttaggtacgtaccaaaaagttgggtttccattattgggccacaaaagagtagtcaaagtttcaagttttgtaaggatattggcctcatcgaatcccatgctctcgtacaaaggcaaagcatgagattggccaatatagccatgaaacggcatctttgaaacgtttcgttgtttcgtttgtaaaggaagttggaaaagctcttctaatgcatcaaataagccctttcgaatgtgtattggaattttatcacactgtgcctcgaaacaaccgaattcttccagtgcttggcggacttgggtccttacggtgttccactcgggtgtacctggtttcagtacctctccaactgaaaaatcaataataggaagcctaaaagcggtttcgatcgccattaattaattatgtgtaaaaatatatatatgatttagtatttctttatatatatatatatataattgttttggtttatgattcttggtactttaattttaatttcaccttcactagacccgtatttataaacttataataataataatagagaaatgcatgcacgcctcgcttgcggtgattaacttattaatattaattatattattattattattaattattggatgttatcatgtgtgtccttttttttatttttcttttcagagtgatgtactgaattattcatattacatataaaatattacattatttgtactcgaagaagatatcaattttattttatatattatattgcctctcataaggtacgtatatatcgtaaattaatcatgcaatgtatgtataatatatatgatcatcttacctaccaaaaagaaaaatgtttgatccagaatatgatatttttctgagtatatcaattttcagcattaattattatatacgtacgtacaataaggtccttaagagcaaattatatatactaaacatgtatatttttatacaatatataataattaagaggatggaataatatatagtgtgaatatataatgtcatattacagtagccttgaaacaaaggacagaatgctacggtttcgcatgatatcatcactcgagagtacacatattgaatattcgtacatttgctgctgtttcagtgttattacagtagcaaaattgtaaatgctataagatatatgaatggatttataaaatgatcaatactcattcattttgacgcctaaatggcaattgaaattgatgacaaaattggcaattttgttcagagaatatatattggtttattatatatgcaagaaaatctagcttgctttcccaaaaataaaaaaataaaaaataaatactacattaataagagcaacatgctggtattgttattt

SEQ ID NO: 196505 - DNA, 2103 bp, Cannabis indica
attgttaatttatctaacatgtgcccctaccaataaccgtagcctcggactcttgcctagcttttccatctcacgtgactcacgtgccttgcttctagtgattattatttatactttacctttatttttcttgactttacaacttggtaaatgaatttatattactagacttaccacatcaatatggattggcgacattatttttccctttcttaataaaagtttttgagattggattttatatggtgactagactttgtgtagacaatgtcatcaaacacacatgcaaatttttatgagtaaatactattttggaccttgtgttttacaaaagttgctaattagactatctgttttattaaatgacaaaatagactctatatttttttagaatggtataaataggaccctgaattgattttttattaaaataaaatttaattatcatccgatctaaaaatgatatgacaaaactatttatatttttttgtatctgttcgtattagaaattgtcttatatttaaaaaaaaaattatcaaaaattaagctcatcttatttttataattttaaaaaatatacgatccatttgttatttaataaaacacaaggtctaattggtaacttttacaaaacacatagtctaaaaatagtatttaccctatactcattgcttaatgatattgtttgacaatttttttttcgaaagaatttatctagtagatttattttaaaattttaactggccgttttttctagaaaagaaaacaaaaacatttttttttctttcctataattggttagcatgtaaattgtaaagtattttattcacatttatcattcaaattatagtagctactatttattatttccaaatccgtgaattcatatagattgaaaatttgaaaccccttttcaaaaaaaataaaataaataaataaaataaattgaaaccagttcagtttgaaaacagagtcgatttcgttgacaatagaaatacaatcgcaatcaccggtaaaattattatttttttaaaaaaaaattgtaatattttttaaaaaaatacttttatggttttattatttacataatgatttaattcataatgaccaattattattattaaaataaataaagcttggtaaaaggaggacgtggtctttttatctattttatttccaaaatttaagcttaaacttaattatttagtgtaattaataatgtttagtaaaatgtagtccgaatctacctctctaaatttttggtgtgagatccaattttaacgaaataatttaatgtcattaacttaaatatttattacaacttttctctaaaaaagttaattattactatttaaataataataataaaaatattaatgaaagaaaaaatggaattaagccgttgagtgctaaattaagctgtggattcctttcgacaagaagttaattaattgcgcaattaaattaaacaaccactttttttaaaaataaataaaaataaaataaaattttagcaaaaaaacaaaaaccaaaataataaataaaaataaaaataaaaagattcaataaaatagattccctaagaagcaagaaagtaccccgaaaaagtcattaaccgtgtatttattgcagagccacaaatagtgaccataaaatataacataaataaataaaaaaataaattaattaatgcctacaatttaacatattattgtaattttttttttttgtgagaaaagcatatattattgtatctactattgttttaataatttttactttataaaaaaaattaaaaaataatgaaaaattcatattggcatatatgtttcaacaaatttatttaggtgttttttttaactaatcgtatatacaataaaatgtttgaattaataaattatcaaattcctttaaaaatttagtagttatcttaaataattgagaaataaactctaatttattataaaacatatttttatatataaataattatattttaataaaatatatacatatagttttttttttttttttttttgtaactataatatatacatatagtttataaatttatttatgtaaaattaataattttatgtcaaa

SEQ ID NO: 196506 - DNA, 1592 bp, Cannabis indica
gatgtcaacttgcctggtccaagtcaatcggtcacctctgcttttcaatctttcagagccaaaggcctaaccctaaatgaaatggtcgttcttctcggtgcacacacagtggggtttgctaattgtaatttcttctcaagtcgactttcaaattttcaagggacaggaaaacctgatcctgccatggatcctgcgttggttaccaaactaacacaaatatgtgcaactggaagtaatccaaaagcctttttggatcaaaacactagtaatattttcgataatgaattttaccgtcaaatacgtttgaagagaggggttctaaagatagatcaagagcttgcttcagatactacttcctctgttcttgtatccaatttggcttcgaatccaattcgattctctcaaagtttcgcaagtgctatgattaagatgggaagaatcgaagttcttgtgggaagtgctggtgagattaggaaaagttgcggagcttttaattaattctcccaacaacacaaaatgagtaagtagtcttcaaaagaagactacctactcacaaaaaaaaatgttttacttgaagttggtaattaatatcatcaagtcaaatgatattaattactacttacactaaaaaccaattaaaggttaagaataatatgaattaataaaaatgagtgattctgttggcactttattatttataaatgatcttgtataactttttatttatatgttttattcatataaaataagtaacgagttctcttccagcataaatttactctttgagaaggtgttaattaatcttctattgaattaaaattctatttttcaatttcaaatccatttataattacataattacatatttataaggttttttagtttatgatgttcgtatttttctcttatctttaaataatgttgagttgtgttttgtcaaacgatctgcaaacaagctggctcatgttttaaacagggattcttgtttgtctccaggtcgtgtgcttcagtgaaaggattgttccaacgaagtatgttctattgctattaacgattgctaactagttaataaagttgctaaattttattaaaaaaataaataaattactaataataagcctttacgctattttcatagaataagaaagtacactttaaatgtctaataattcccttttcaaaaaaaaaatgtctaataattccaaatacttcacattaatatatatatttgaatagaaatagtactttattaccaaaataaaaatagtgtgatacaatatatatatagaataaacaatattttagataaaaaaaagttttttattacagtatagaacgcaatttagaagatatattttattttcaaattacacgatcagaagagtaacaagaactacacgcaatataataagcgatcttgtgttaacatgtcattgaaaaaaaaataatacattacaaaaattaagtaataattaatttcatcctacaatgtaccaaaaggccatactcaatggcatatgcaaatcactattaagtaatctctttcttcattatttataattgatcaaaatcatatataatatacctcttca

SEQ ID NO: 196507 - DNA, 593 bp, Cannabis indica
gaagctttagcgctgagagcaagcctggtctggtgctatcatatcaaaattccaattgctgtcattgagactgattccaggcttctagttgatcggatttgtggacaaaagcgagatatatctgcactctcgaatgtggtggatgacattaggagttatctgttccagttatgtaacttcatctgttgctgaagtctctttatcgtcaaaaaaaaaaaaaatcaaaaatttggtatagaactattctatactccccttaaatggatattttcataaataccaaaaaataacaaaatgtttacaaaaatacggatctatatttttttttaacattttgatggatttattacttttttttttttataaacacatataattgtttttacgttattttcaaaaaaaaaaatatattattttcacattatcactatatgaaagtaacatgaacattgatttttaaagaaaaaaatacaagtaaaaaacctgtaaaaatataaagaaagtgcaatttttagatattttgtgtaaaaatctcacacttatatctaagggaacttacaaaatactattaaatgggaaaaaatttacaaaac

SEQ ID NO: 196508 - DNA, 1101 bp, Cannabis indica
agtacaaatgcatcataattatgtctcaaaacgatacccttaattaattatatgaatctaaattttttttttcatcaattccttagtataacatatctgaacactagctttcctgctagtaccaaaaccaaaatccaaaagtaactatctaattttatttttttaaagtatatattttatattattactagtaaaattgaggggggaaaagtgtaatagattgaagtatatattggttatcataatccaatcacaccacaatatgagaactactaaaactataataaggggaccaatagagaaatactaagagccaaagtgaaatttcaatcactacaatatgtgttatattattatcggtctatttaatattaaatttatataatttaatattaaaattactaaccaattaaaaagtaagacatgaatgtccttaacatatgatccaaccaatatgatcatcaagctcctaaggctaactttcttttttttttttttttttttggtgaagaggaggtgcaaagcaccaattcattgaaaaaacaaaacgaaaaacaaacaaagccagcgtctaaggacacaaaactgcatccaaaaaaaccaaatgcaaggccaacactaacagaacaacacaaacaaagataaaatacacagaaaaaacttaaagcgacaaaacacgatgcaacagccgcctagaacctttgcaggatcctccattgacaggaaaattagcctgggtccgggaaccattcctgatgatccacaaacacttcaggaggcatggaagataaggcaatttctccaaccacctcagtcaaccgcgcccattttgcaacattatgagccataaagttctgctctctgccgatctttgacagctgaacactctgcaattggagagaagtagatctgaacttagccactgcacccgccaagttgagatagatattatgcgaatttgttttcgagaaattagacaccacctctgcattatcacagaagaaaccaactctctgaaactgattatgcactgctacctggcccgccattgccagagtaagagcctccactagagccagctcagtagccgtaaaacaagca

SEQ ID NO: 196509 - DNA, 2443 bp, Cannabis indica
aaggcttatttctgttgttggtgcaccttttcgtactgatgtgatgttattgaaataacaaagaaatacaagttagaagaaagatgaagaagaaattgccataaataataaataatctaatcatgaattagaatactcaggtactcaccatgcatgcatgactgtactttttcattatgatgagtttctcacaattagaaaattctacaaatgagtactgatcaagtatatatatagcatgtttaattatgatatttcacaataatataataaagcaacatccatgtataactaattaattacttaaatagctaacttttaaagtctactagctagttctgtctttcaaaataaataataaacaaaagaaaagcaaattataagttcctaattaaataaacaaaaataataattaagaaagatcatgcattaatacgtacctaattaaataaataaaaataaagacaaatagttaataagttcttacggaccaagctaggtaaatgccactcttagcccgcctccccccctaaaaaaaaacagaaaaaatagaacaaacaaacttgtgcccatgagaccatcacttctccctccttcattacttatgctacaaaagtgaaaagatatacatgttatacatattatatatataaaaaagagtttatataattgaaataataatataataataaatttgtacctgtttacacacatgatttaaaacactcacatttctataagtcatttctataacaactcctccaaaaataatgaacccaaaaacacaataattccttccataaatatatctataatatttcttaccactatgcaccttcttaagatgttggggcataatttcatctataaagataatagttgtatcatctttaaattttttcgccatatcagtatggagagaataccatacaatacttgtccagcaaatgtcacccagaataccaataatattcagtaaagacaaacagattatggtgcattgtattattacgtgtataagttcgtatttacactctattataaacggcttgaaattcaaaagggtaaatagaaacccttcaattattattatgattttaaacattttagtatattgaaattcaaacttcttcaatcttttaacttcatcctcctctagtttcattatgtctttgatctatcataataaattaataaaatgaaagttagataaaacataaatataaaaataataaagtgatctaattatataaattaaatagaattatttttaaaatttactaacaagtacatatataattgtgctatatatatgtatccattaatttatatattttgtagttaaaactactataaaagaatcacaaatttgtaatagagataataactaattgacagtgttattaagaagtaaaacaatgcaagagagaaacctaagccaaaggaggagtgttataaaaatagcattcaagtttgagaagtaataaaaacaatttatagagtatcaggattacctttagatgagagaggagtgctttaatgtgtcatgtgtggtagagtgatgatacatgatcaagtaaaagataattattccaaagcatctctcagccattagatcttcaattcgatttttttttaaaaaaaaaaaacaaagtttaatataataaatagttagtctggtttgatgaagactaaaaatttagtatttaatttaattgtgatgagaaaaattatataatatactttgtctttctctacaaaagtagacaggtgcagataataaaaaaaaaaagatgaacaaattacattaaattagaaaagtcttttcttttcatcttgatctctaaagccctaattaataatttggagtagacaaaaaaatatcagaggaaagtggaatgaaaagttagcctaaattaaaatagaaaaaggtttacacatcttcatctaataaagtgatataattatataaattgattttaaatagaattatttttaaaattaactaacaagtacatatctatataattgtgatatatatatatgtatctattaatttatataaaatagttaaaatattttgtagttaaaactactattttgaagattcacaaaaatttgtgatacacataacaactaattgacactgttattaagaaatacacaataaattttcattccataccccttagttatatttatatatattaccgcttcacaatcaatagtactggaaggagtatgaaaagttagttttgatgatgtaaaacgattaatatttatttgacgtgctattattgctgctgttattgttgtcgtggttacttatattgttttccattagatagtagaagttagagttaggagttagtaggatggtgttcgaagtacagtaaattcaaaatcacttcaacttagaaagtaaaaacaaatgcaaagagag

SEQ ID NO: 196510 - DNA, 1698 bp, Cannabis indica
atctccaaaagctcagctgaagctaaatatcgcgctcttgctgcaactactagtgaaataacatggttacaatacttgttacacgattttcacattcctcaacaacatccagccttcatctactgtgataacaactcagctatccacattgcaaacaacccaaccttccatgaaaggaccaaacacatagagcttgactgtcacttcatcagagacaaaatcaacaactcaacaatcaggctgattcccatatccagcaaactacaattggcggatgcttttaccaaaccactaacctttcctattttgagctcccatgtttccaagatgtccgttaatgacatacacgctccatcttgaggagggggtattaaagaatacatatacactatcctgtaccccgctgcaacatatctcttttttcttttgtattctttagtctactcctctgttataggaaagtagttaggaattctgttaatagttagttggttaagtttctttatttattttccctgtttgtaaccgacttaggctgagctctatataaagctccctttcatttctttgtttcgactgctttgtacattttgctcagaataaatcaaaactcagaataaatcaaaattacttttctcttttttttttttttgttaagtttaatatttttaagattaatatttatagttaagttgcttagtaaccatgaatagataatataaattaaaaagtgttccatattatatatatatatatgtatttatgtatacttgtaaagtaaaagtgtacataagtgaaagaaaaaattgtttaacatttaaaacaaaatatatttaacaatcataaatctaacacgtaatatattattataatttctcatacaaataatttaacatataaaaattaaaacttttcatttagttattttgcatctcgcataaaacatatattataatttttttttgtataaattataataatctaatcaatattatattataaatatattatttaaacttgttatggttccaatgtttaatttttttttcaaaagtttgaaatagtaaaatttggtaaaagaaatgatacaaaagagcaaacgaaaatattaattgctataatcttcattttcttttttgctgaaaaataatttctttttaatgagttatgtatatttatttaaaaaatacattttgcatttaccaacaaacacagataaaaagtaaaaataaatttgtgagcgataagagaaaaagttgtaataaaattgaataaaaatataatattaaaacggtaaaaaaaggcaaagacaaaaaaaaaaaaaaagctggtcgatgagcagttcatacatatacttacagcatttatatataaataaatgttacaactaaaaaaacttatctttgtcgtttgcttttatatatatttatatatatactattttttttatttatttatttgattgtttttgttttgttatgtaggtaaatatttttttatacttataagttgttcaatgttatattgatgtattatttaataattggttagtgattttttttttaatttttatgaatgatatttgtattaattctttttttgtaaattattttttatacaattattgttatgtggcaccttaaattgttcaatacaatatcaattcacatacactacaataattggttagcaattttc

SEQ ID NO: 196511 - DNA, 512 bp, Cannabis indica
aaattgttaaaattatttcagccaattaaaacataccacatgtacacatatgtacacagtggcatcaattggcacttaacatataattttaacagaataattaaatttgcaaacataataaaacaaaagggagtattactcaaaaaaaaaaaagataaagatgttaagtatataacacttgaaacatacggggatttagccgcaaatttctctaatttatatttataatatgtgtattttttttagtatattagtgtcttttttataattttttaagttatgttttgtataataattagtaaggatattggcggtaatactacttaaactacacttttagttacactaaaccccataaacccaaattttagtggtaaaaccctctaaacttcggttctgttttgctcttcactatttcgttagtgagtaagtgttaaaggccaccttgtagtgctgatgtgtataataacatacacgtggtatatttttattggtacacatcatatatatta

SEQ ID NO: 196512 - DNA, 1860 bp, Cannabis indica
gtaaattattctgaatttatcaagttttccagatgccgaacaaatatagggttgcattgtagaagcacccgatgattttaattgatctctcttctatatatattatccaaaaaaaagtaggtgagtgagacttttcattttgtgtattggagcagctcaaacattccccaatagagtttatagctatgttgatgtgagagatgttgcattggcacatcttcaagcatttgaagttgcttcagctaatggaagatactgtttagttggacatactctccacatttctaaggttatgaagattttaaaagagctctctccggctttaaccattcccggaaagtaagttttcgttaccaaaaatttcggctattttgatattgttttctgttattggtttttaaaatcgcgttttcagcaatgataacacaaaataatttttatagttttcacaattttaaataataataataataaagttagtgtttttaataattgacagatgtgaagatgatatgcctctcatgacatcatgccaaatatcaaatgagaaagtaatgaatttggtcaaaaatttcattcctttagaagtgagtctacatgacactattgaagacctcaaggcaaaaggattatttcattaactaaagttttccaagtaatatttaacaatgaaaagggatatcatatacatatgcatataaatgtatatgtttatatataattatatatatttatatagattgaataaaagttactgaaaaaaaggcatccttcttctcatcatttttctttatgaacacttttgactttcgttaataccttcttgtggcattcaaattaagaagcttgattagctattgatgattttaagtagatttgttttgaagatgtgaaaccaccttttactcagctattcaaattcaccttttacacactagtattaaagtttatcccacattagtaatgtgtggaaataaattgtcatatataagatgaatggactactcctctcactgtcaattgattttgagatggaatcccattcattttatttcccaaattgtaacaactagtattgttgccagcttgtatagtgtgcaccagacttgacctatgctatggtgtaagcttggtgaatagattcatgggccagcccaaaagaaacattgtaagggattatttcacaaatatataaaaataacaaagaaattataaaaatatggttgtacgaaattttaaatatttttacgacttttgtaattttaattacaaaaaatacagcttttttatgttttactcttattaatttattgtttattttttgttatatgtatcttatttttttttgttgttgttttaatgttatttagacgttattttcatgttacttttatataattttgttgttattttggtgttgtttctatagaaaatcgtaaaaatgttaaaaaaaagtaaacgtaaaaatatatttttttataaaaaaaaataatgctttatggaattatcccacattgtaatgcgaccaaatggatcacgatagactcttactatgtaggtggtctggacactagaacatctcagtttgaattcacgatgtaccggctagaaatcaaaattgcaataatattggggcgggagcaaagtaccaaaaaaaattaagagggccaaatataaattttctaaagaaaactaataaaagttttgaaaaatgcaattaaaaaaaaatttgagaggagccaagactcctttccattgccatgggtttgtcctagcatgtacagaagttgtgatcaaggaagccttatggccaagaaagaataatgagagcgatcaaaagaaaatgttgcaaatatcctc

SEQ ID NO: 196513 - DNA, 968 bp, Cannabis indica
taataataataataatttgtgtaataaacatataacacttactttatatcttctgaagaaacgacaaatatcttcaaccttccataatctagtataattttccaaccacttattataatttgatccacaagcgattgactgccccatctcttgcaacaaatcatgcatttgaaggacatggcctttagttatcaaacacctgtcaataagaacttcaatgacgctgtcaaattcaccacgatcatccaatatgtctctcgccaaatattttgttttaccgcgaaagaaacacgctatatcaagaaatatactctgttgtttagggtctagcccatcgaaacttatttttaatttacttgtaacttcttgatcaggatttacttgtatgttgtttagcaaactttgccatacttgtatgctttttgaatataaatgagaacccaaaactttaagagctagtggaaggcctttagcatatttcacaaacatcgacgaaagatcttcgtaactttctttgggtgatttacttttgaaggcatgcaaacaaaagagttcaagagcttcctcttttagttccttcaagttgtatatcatcccttcatcattgccaataatattccgaagcacctgatgatttctgcttgttataataagtctactttgagagtttagccagagatgactatcttcaagtaaacaattatattggtccaattcatcgacatcatcaagaactacaagcaactttttatggcgcagcctgtcctttaaggaacccaaatgtccatattgcaagcctttttcatttgataattgaccgaaaaattcttctttcaattttcttctgttctgttggaattcttctcgaacattttgaaaaaaacaatgactatcatatagatgacgagattgattgaagtacgatttgagctagggtggtcttacccaggtccccccatcccacaaac

SEQ ID NO: 196514 - DNA, 1743 bp, Cannabis indica
acataaattttttatgattaaatttgattagtcactacagaaagttacttgtgactaaaatatagtaattagatacaagttgtcactaatttagctttagtcacaacaagtattgtgactaaaaacacatttagttacaataaattgtgatttttgtgactaatatttttagccatagactttttagtcacaacgtaacaatggtaatttataagagtcatgaatcaagggccaaaattatcacaaaaataagctgacttgctcgttaatctatacaatgctgaggaagtaaaacaaactgtcttcagcatccttggagggaaggctccaggacccgatggatttggtagctattttttcaagataattgagagatagttggtggaaaggtagtggaggcagtattaccatttctccaaattggatcactattgaaggatctgaactctacctctcttacattagtgccgaaaagcaaatgccccaaaacagtgagtaattttagacctataacttgttgtaatgtcttatacaaaattgctaccaagataatatgctctagattaaggaaggttattcttgaacttgtagcacataatcaaagtgattttgttaatgggagatatatatatttattccattcctttgtttggttgcaatttaaagtattggaatatcattccaatggaataaccttttcaccattttggtggaatgactattccattttgaaatggaatgaaaaatcattccaatgcaagatttgaaattttttaataatttttcttattaattttaaattttatttcattccattcctattttaattctcattcctatatttttattcctcccagccaaacgccattaaattaattctagctttagaaatagtttcccacttgaatctattcatggggatagtgttgcatatcataaatctacacatgttgttgaacatttttctatttatacatcatggagtatttgtctcttcatgcagtaaaatggattagatttaaaatataaaatttgtatttagtatatattaaataaatacactacaagtaaaatagtgcggatcaaactagactaacatcgctaccaagatctgcatactactcacagttgttgagctttaaaagcaaggatactcattttttttttttttgaaaaatgataataaatatgttaaatttggaagtaaattagaattttattattacaactaaaatccaaaagtttctttatcaaacaatgttaattataattttttagttaattttcgcacataaaatcacatattaaaatattttttaaaaaaaacaatcatagtaatatttgttataatattaaatttataaatttttaaaaaattctaaatagtttacaatacccaatcagaatttttaatattttaacttaccacgtgtgttcaaatttttttaaatattttcaacactacaaattatttgagatttttaaaaaaattacataaagttgatagactttttcttttttatttgtttatgagaaatttatatttttatttttattattaattaatatatatatttttttttttgtataaaattattttactaaaacttggtatagtgaaaaaacataataaaatatccaaaggattgacatacgtgtgtgtcgaccattaatcaaaaccaatagaatttcaagtgccctccagccagagagcgaatcctcttgaccccctctctctctctc

SEQ ID NO: 196515 - DNA, 1551 bp, Cannabis indica
gtgagtcctcaaattctgcccaaataactgatcgtgttcttcatagccaaaccgctcacagcaacacttctaatcccattacacccttaactactccaacaaattcttccatttttgttccatccacactgaatcatgcctcttttagctctcctcttcatctttcttccagcatttatccccacacacactctgaatctgtgaatgctcctatggacaaagggaaaaatattattgggatgagtacaaccccgtcttccactatcttgcttgatgttttcacaccagaaataggctctagtgttacaaactcaaacacttttgcttcatatcctccaatcattacaccaaataatgttccaaggttcccactgcatcaactgtcaacatctgctgctcctaagccggttttcacccaggtccctgctgctatcaatgtgtccaaggctcttgttcatgatcaagaaaatatacagcccaataaagtcttcaaaagacagtttgacaccaattctatgaggcaaactttgaagagatgccgagctattaactctgaaactgcttcttccttgtcagaagttgctggtttacgtcagtgtgtttctgctattgaggattctgctgatgtttttgacaactctgcggaggttgctcagcagccccgcggttcaccatgaaaatcgtaagttggaatgctcggggtttggggaacccgagagcattccgtaagcttcgtttgcttgtcaaagagaaaaatcctcatgtgttgtttcttatggagacaaaggttccagttaattctctttctcgctttaaacaatctttatgtttcagttgtggtttagaagttcctaggactggtttgaaaggggggatcatgttgttatggaaagatcatgtagatgtaactcttctttcaatgaatgttaattactttgactgttacttggtgtgtgaaaatgatactcgatggcatctctctgctgtgtatggttttcctgaaactcacaataaaaaacacacatggactttgattaaacgactgagtgatgtttccccacttgatccatggctgctgttgggagatatcaatgaaattttttcacatacacataaaaatagtggacctctaagacaagataatcaaatggtggctttcagatctaccttggaccaatgttgtttaaaagaattgcccttcactggagatgatttcacatggaccaaaagtagaacaaatcctaatgcactgaaagaacggctcgattggtgtttcgttaattcggtgtggttagataatttcactcctccaacggtgtctcatgaggactactatggttcggatcatagagcactttctgttgtgcttactttctctaatcaccaacctgttgaaagacgaaagtcaagatttcggtttgaaaggatgtggttaaattcccctgagtgttctcgactaatagctgattcttggatggcaaatgggatagatgggaactgtattgataatttgacagctagtttggccgattgtgctaagaatttgcagca

SEQ ID NO: 196516 - DNA, 2026 bp, Cannabis indica
ttggtaccttttggtgttggtggcaacttattggggttttaagggtcggatttgtaattgtttttgttttattatgacatatgtaattctcttattgatcaatgtatgcgggagaattattaaaaagtattgttggtgtttagtatttttctcggtatcatagtattattggtgtaattaagtatcatgtctatataacttaagaaaataacgtttagagaatattgttaaccaattgtaagacaacacttataaaaaagtattaggtattactggtattcaataatggttcttgtcttcctattttgaaaattacaatagaatgagtcatacacttagttacttctgttatgagtcataggtgaataattagatttaataatggtaaaaaatttaaatgtgacattttgaaaaaaaagaataattggggttttttctaagtaaaatatcaaatataatatttttagaaataaattgattatttttaagaacataattgtatttttttagtaaataatagtaaaaatttaaaatgtggtgttttgaaaataaattgagaaccttcctttggaagaaatattttgggctaagttgggaactccttgtaatggggcattgacagcagttcgagttagccacaatttacaaaataatagcaaaaaaaattaaaagatgtcccacccatcgtaaaactttttgatgatacagaggctaaatttattttgtctattcctcattctagttttgatcgacagaatagattgatttgacatttttatgataatggttggtttttcagtttaaacttgtttttggaactcgatttctaggcttggttggggtcaacattcttcttcttaagggtcatcgaagtggtgaaattttatttggaagctttctctttcccttaagataaaaaattttgtctcgaaagcaagtcttaattttgttccaccctatgccaacttgaatatacatggcataaagacttctatggtatgtcatatttgtcttcaaaataatgaaacaacattacatgccttgtggttatgtccttctcttaaatctatttggttcattttgggttcgggggtttggataatttgaagatgacttccaatttttaagaacttttggctggggttataaatattttatccaaggtaaaatttgaagaattttttgtcatttgttggagaatataacatcgtcgtaatacctcagtgcatgataataagcttctttctatgatatggttagtagctgggctcttagctatttgtggcgatactaggaagctcaaactcaaattgctccaatagctcctgtgagctcttcgccgatttctcctagtcatattgggagagcggttcttgagttgattttggaggagtaaaatctatttgtcgatgttgctaattgttatgaaaggtggcaaattagtttaggggcgatggcttctcagcaagatggtgacgttttatattcaactgctacctttgtctcaagtttgcttgaacctcagtggagacttctgtcattctccatgggcttctcctttgtgtgcgattgagatgtactcctataaatatattctctgattgtttaggcctggtgaacttttttaaacaagagaaaggattgcaatgaatatggtattgttcttactgatatccttcacgtttgaaagtcttttttccatgtctctattttcattgtaaccgagctagtaacgctcttgcatattctctagctaaattttctctttcattagaaatttctcaagtttggtggccgggtcaaccacctaacttgctttagatggttttatgcttgtattgatcttgagatctctttagcttttgtgtattttttaatggaataattcatttttctccaaaacaatataactataaagtgaataaaattttctatatatacatatatttattttaatttgagtaaatactattttagatgttgtattttgcaaaaattacagattagagcatttattttgttaaat

SEQ ID NO: 196517 - DNA, 957 bp, Cannabis indica
aaaaatgagttttcttctaaaacccaaagtgactaaaagtctaaactaattgcgctgtgttcagtaaattaatttatacccaaaatttccaaaatattcaaatatatctcatacaagtggcttgaccattattaagttcacacttctaaaaaattatcacaaatatttaatatcaccataaaaaaaatgaaaatatattactttaattaaacataaggattgcattttatatatgtttcacataattattaattttaatattcataatgtaaaatttttttgctttaacagttttgaaaagaaattaaacgaaaagagaaattttttaagtaaaacattttatatatatatatataaaaattgtggggcattaatattttaggagaatttacatatactataaaattgtgaaaagtgaggcacaataggagaacgactgtgagggagaatgactgtggtgcctttttagcatttctaattagtttattatatagttgatgattttttttttctttttcttcggaaaaagtctcaactgcaccatttaatcaccaagtgtagagatactaaaaaggtgggacaagataattatgaatacaatttggataattccaccatcaaaagaattactacaagatgtagttgaagtgtatttagttaagctctatgactagaacattaaaatattttgaacaaatgcaaaaaacaaatatctttaaaattattataaagactaccaatttcatttaatacaatacaaaaatgttcacctatgattgaattgtgttaatttactcattccacgtacacatatatttttatatgtatatatatatcacttcatacgaaatttaaaaatgacactaatttttaggtgataattaaaataatataacttaatttgatgaacacaactaaacatgactaatctttgtatttatttatttttgaaaagga

SEQ ID NO: 196518 - DNA, 1624 bp, Cannabis indica
cagggtccaaaatagtatttacaacatttacttattattttttttccttgtcaaatttagcatatttttaaaccatgcatttgaggcatttttgtaattgcactctaatatataatatattaagatgtaaattataataaaaagtaattattattaataataattaataaattaaatatatttttcaacaaataatgataatattataataaaaaaataattaaaaaatataattaaaaatatataaattattaaatgataataatataaataaaataaaaatatattcattaattacgtactaaatttaacacaaattttaacacatcattaaataaaataagtacatcaaatttggcaaaagttttattgttttattagcacattattgaataagtactattttacatgaacatcaaatatagttttacatcatttagttgacactctattattgctctaattatgtaagtatatggaatattaatattgtaattaacttttggagaagaaaatcctttatatattaagtattttgctttatgtaagtttggctagtttttaatacatatatagtggatatctagttaacgtacatatataataatctatatatataagtggaaaagagatttgattgcacgtaaaactagcaattatctttatatttcctttcattttacatatatatacatatttgtccatcatagatgggaatttatacataggtccacaaaaaagaagtgtataattaatgaaccgcttttaacatttttcgaacgtgtcattcatcacaatgacaaatatagatatttatttaaatgtatataaaagctttcggtcaacatataaattcacattgctttataaatacatgatcttaattaatacatattattctaattaacatgtaagatattgttaatgtaatacattatgtcaacatgcatatctatataataaaattaatcctaagatacttaaaaaaagagaactaaattaatgcgtagaaattccaattcacaagtgatatagtaaagtcgtactataactctattttcctttttcatttttttaatgcctcttatttttttttttatttatatatatatatatgtgtgtgcatgtagatttgatatgcatcgtttatttgacgtagattagcaatgaaattaataatgttgataaagagcaagaaagttttttttattattattttttttatcataaactaaaaaggaagctcaaacaaattttgcttgtaaatggaagagtagtatatagggtaaatcataaactatataataatgtattttgggcttgtgtttttttgttgttctaaagtaataattattgtcattggaataataatcaatctatatcgtaccactgacctggtccacttggaatatttattattaattaataatattattttaaaaatgcacaggaatattaattagatgatagacttgaacctttgcgtatatacgatacgaatggcccgtttctgtgtgccaaaaagattgaaaattaaaaaattcaccaaaacaagtggccaagggggattgcaaattggcatactattgttaaccttgacaaaaatcgtcaaaagtagggataa

SEQ ID NO: 196519 - DNA, 1375 bp, Cannabis indica
aaatattacaaaataaacaactatagaaaaaggacatgattttattacaaaaagatgaataattgttaatatctcacctcgagtccacaccaatgatggtattggttactatcttagaatcacttttgacaataataaatttgtattcttattttattgccacatctaacgtcaagcaaacagcgaccgcctcaccacaaagtgcgtctgagaaatccaattttgccaaattcacccaaatcacctcgccaaggtggtttctagtaacgactgctatgcgcatgtgttctaaacccactttgacatcacagttcattttttaagccagccttggggagatggcaccaaacaagagagtggctcagaggggtaggatggatgaaggaagatctgtaatctgcaaaagagtgaataattgaatcaataacttcacattatttattttatggttatgaaccttattattccgaactctccaaattgtgtccactacaacctaagcataaaagaacaccgcatatgcgtttacacctttgtattgaaggttccaaatgaatttaacccaaatccataccctaatattggtgtcagaaataggaaagattctccacagggaagagcaccataagtgataggcaaggttgcaattaagaaagagatgctcagttgattcatcttctactccacaaattgggcatcgagtgtcctcaatatgaaaatgtttatttagagctgacctggttgagagcgcttcagacaagatgcttcaccacaaaaccttatgacgctcaaggatcttgctattccaaaagcttgttcgagagaaatagagccacctcacaatggaggtttcgttggaaggcttggataagataggcaaacttgcaagagaaccggccatttccttctttagtccaaatccaatgatctttcccctgacccgtaggtctagcccctttaaaataacacaaatggtttcattatcaaagaggatacgcagctttttaatatcccggtctcccctatctgttagcagatccacctttctgtacactggatatggcacaccaacaacctttggaaaaaaaatctttaccatgagatattcagggatcctccctacttagccaagaaagcctgattcattttcttagtttttcgaaagccaaggctcccacgggatttagagagacacaacttgtctcaagatttcaagtggatttcatagtttccttttttaaagccccaccaaaagtcataaactattccatcaatcttcatagcaaggcactttgtgagctttgtagtttgtattgcataacatgcatgtccagacccaccaatttaaatgagagtggtacggcctgccttggac

SEQ ID NO: 196520 - DNA, 600 bp, Cannabis indica
ttacatgtgattttcgtagacacgcgctccacgcgctgtctgtcttccattctcagattctattttcctctgattatttgtgtttggttactcggaaaaattgacaatcaaattcccaatcaaaacgaaacaacaaactcgcaattcgatctctcttaagattttgccgccttcactcgtcttccaccattttcaacctccttctctcttaagattcgaattgagtttcagtcatggtttcctagggtttctctatttcattcctcaacaatgaaagtaagtgtaataataataacatgtttattaattttttttattcaagattcgaacttataatctatactacttcttctgtcgaagctcgatttaattttttaatgaaaaaacaaatgttgattttaatattgagggagcttgtggaagcttgaattcatagtgagtcgatgtttttgcaggcttattagcaggtttaaggattcacggtcaattttgaagagatgttgactaatgttttcaaaatcgtatgtttcttttttttttctctctctcagtttaaattattgattcaattctactattttattaatggctttgtgtaat

SEQ ID NO: 196521 - DNA, 1404 bp, Cannabis indica
tgcttgtgctcctgttagtcacggatagaaaaatcaaattcattactttcatttctttgacaaataactaaaatctggatataaacaagcattacaacatttctcatgcagaaaacctaccaaagtatcctctaactagagagctaaataatattggttggtatgtctcctccactcattgcaaataaaggctaagcattctaactattagctcctaaactgtaagcataaataccatcattgagtaattaaaacaaacacttaataggcacacaacttctgtccacctttcacactttatattaagctcacttagtcccattacaaacaactcagtagattctgcaaacatattttcatgaaaaacgttgatagagataataaatggtaagaatacaaaagaaacccaactcaaccaaacattgataactctgaattacagaagtagagaatgagaggatcgatcacttctagtcttcacaattgtatttaatgaagtagttctagtagtgcaactgtgtggcccaagcaaaagctctaatgattataaatacaaacgagaaatggccgaaatcaactttgtttcccaagcaaacgaaatgtaattaccatcatatatactaattatattcaacaaaataataaataaattataaacaccatgaaacaacgaaagtgcatgatatttattcattaatgtcagacaatatagaatcatatctgatatttatacatataattggtccacacccaccgattcatagcaacagaaaaaaaaaagtttttaagtatgaaatttcaaacaaatgtttttatgcacattaacacttatccaattccaaagccaataataatatagactgaggaagccatagatgcatcaaacaattaaaacacaaaaaccaaacaaatatcatatgtttacgggagtccatgtacataccagtactaatttctttctcactgaaaagcaaattattaatgataataatatcgattgaggaagcaatcagttggcagcagtaatactaactagtggatcattagtgaatctgcacaaataccaaagtgaagcaaagcaaagatcaaatctgaaagttgttatcaatgacactggacaaaaaaagagataagcctaacaaaataacggagttaataagatgagacaatgaaaaaaacctacatatctatggtggtggagaaggatgatcggcggcacgatcggtgatcggaacctaagcacgaataggaggaggcaaatcggaggagaagaggagaccaagactggatctgtgtactatagtgaataaggcctcattttaagcccaaatattagtatcgtcatgtgtaggcccaatattaattttaataggaaaattacaagggttaatttcaccaatgcac

SEQ ID NO: 196522 - DNA, 1292 bp, Cannabis indica
aaactgttttagggtatatatatcacaagtagtaataatgagatacacttacaagttttgtaacatggttaaattggcaatgtaaggagaaatctcccccactaatccacttgaagacaaatccctgttttcaagtgaaacaaagtaaaatataagattaagatacatataggttactaagtttaaacaataagtaaatatatagatttttttttttcttaagacagttataaggacatacaaggatgtaattttgtatgaactactgtatgtatcattatgggtacaattaagaccatcccagacgtaagtcacaggaacacaaggatctccttgccaattcttcttcacttcatacacggtcttaatattcaatatagcatcaactgatattattattattaatttatacacaacagaagaaaaaaaagaaaaggttaattataagagatatataagtataataatagaaaataaaaaaattgtacatgtgaaaaaatttataccatctgtttgctctgtttcttgttgcaacatctccttcaaaacataaatctcgagggcatttacaaggggtggtagagttgaatttgaggttttgttaaaccaaatctgaatatttccttcaatgtcggggaacttgcctttagaactgtagattgtgttttgcttcaagtagagtggagctagagattcgaaccacaagtttccattgatgaagatatcaaactctcttgtttggttatttttgagcttctttagttctgcaaagtgcataaagaataaatatctggaagaagtatttaaatttttccagtttaatcccatgtagctgatactattatttcgtgtatatgcagtgctcatcacagccgatggtggctcaaatatattggtggatatagcgttttcatccgtgagagagacatttattggcttccacacctctgttttgagtggtgaccacaaccgatcataaacatcatctttgtacctatatatacatatattatatatggatcaacgcattattaatataacgattatacatggtattcgtacatggtcattaattgatatacaacattcaatagggttgtttaattggaagaattgtaggatccaaaatagtactattttatgtaaataataaagtttctgtcatatacagtagaacctctattcaagaatacacttgggaccaagaaaataatattctaattgagaggttataactaaatagagttacacttgaaaaaaaaatcaaaatatcaaaaaatatcaatgtaaca

SEQ ID NO: 196523 - DNA, 807 bp, Cannabis indica
taatagtaatcatttaaaataattgtctctaacttagtccagatatctcttctattggaaatacaactagaattagaattagaaaaacgagttaactaatcgagcgtctgattttcagatcacttgacaaaagaaactaaaataaagtcaggtgagaaaaattgtagcatcgaatttaatcttaaaatacatatattcagtttcctccaccgctcaaaagacaccacagtagatccgttgcagcaggttcattcagctccttagcttgagcactcaactattgtacaaggtacataactgtaccattaataatcccttcggccacaaagaacttgttattctcaaccacttacatcaatttgatggggaaatactgaagaataaagaagacgaactaacaacaaaataaattaaacaaaacaaaattatgtcacaaaaacaagactaattacagtaacaaaacctaattaaagtagtaaaactataaattctgactgaaccacgcctaaacccaaggaagaccagcaagtgtgaccagagataaaaaataacctcagactaagattgtagctattagttcacttcaagtgttttgtttgtttgtgaaggaattctacattgtttggttctgtggagcctacatcacttcatatattggtgaactttatttgtttcattagaagaataacaatataggctaatccatctcttctccaattttttttttaaaaaaaataaaataaaaaccttaatggaaagaaactatgtgagttgggtacaaatccattttttttttcactaagatac

SEQ ID NO: 196524 - DNA, 3148 bp, Cannabis indica
ggtacaacttatcaacatactcacacactttgtcatcatttgaaagttcatttcagatgtttattcataatctgacacccttttgttcggttatgttctttaacttcagccaccaattggaaaagatagagttaaagagctggggcagtgggtgagaaaggagtttcatgtgtgtggcaatagttgggattctagctctgtggatatctcagctgctggtcttggttggtttgctattggactcaaaggagaagctcaattaggcgtttggacttatgatggaattgatgttgttcttcgcaattcattgattcctcaaagatcacagtattttgaagtttcgggttttactgtgtccaaaatcgtttccaaagctgaccaatcttcaaataaagcgttgcgccagagtgagaagaagaaaccaagcaaccgcaaggaaactacaccagctaatgcagagcctgtttcttaacaacattggcccgaaaacaagtcagtagaaacgccaattaccgatttataggaagactaaatgctgaatgtttggaagattttgtcaagttgccaaaccttaattggaatgttttgtacataatatctctagttttcattggtatgttaacaaaagttggaatagttaaaaataaaaacagtaaaatgtgcacaatatgtactatgacaagatgattttattattaattttagttggatagtaaattattacacccaacttacaatttgaaataaaaaagcaacaaaatcttctaaaagaagaaaatcaaataataaatgagaagtaaatataacaatcattgaaacacaatcatcatcatcatcaattattgaaattaagaaagggttcttaattatctcttaattaatttgttactctgcatgatcttctaatttcacctttagttttatcagtgatgacctcaactcttcccaacttaaccatagcttgtccaaatttttgggcaaagttataggcattgccattagccaattgtgttacaacatttttggtttgtttatcaatggccaaatcttggtcaatctttagaactcctctcttcttcacaagttggttgaagaatgccttgtccacaaccatggaactccccggagtttggtccaagaaaaccgtgttggcggggtttggtttctgaggacactttgacttcaaagatttgaccaacaatgagtccattgttgggtcagctttcttcgtgccgttaaagttgtatagacgatcttggaaaatagtgcaatgtgccactccaacagtgtgaccacctatataaattataatagtattagaattttataatgaaaattaagataagtttttaatgataatattaacttaaaattaatttgtgatggttagattgtcacggtataattatagtattttctactaaaaaaaaaaaaaaaaaaccaagcataaggtatctggttacccaatggtaggtgacattgttgtttgggccttaaaaaaataaattttggacccttgttcaaagaaaatataataattttgaaaaataccaaaaaattatatacatttgtgcaaatatacacatatatatatttatagttatatacataccaagaaggtaaaccatgtcattgacaccaagtcctttcttttgaaatgctttaatggaattagagactgatattgaaggaggtggcaaatcaacattgctagctttagatacttttccatccaaccttcctccttctacaccataattcacttttcctccctgcacacacacatatatatggtatttattataatagtgattgtgtttttttttttggtattttggatatataataattctattttaaatgatcgtgtataatataattataaaagacccctataaggtataaggtgctttcaaaaaattacagataatcaaacttcaaacgtataaatatcaaaataaaagcacaatttacagtaacatgtttgaatcttaattttaatattatttaaaaaaaattgaaaaatttatgtgcacgtttcgtataacaaaattatataccatcgaaaaattatattttatattaatgtactaaaatacttaaaatacctatagatagaaaatttggataagttgaggttaagagattaaagtaataatttaattacgtacactggctaagctgacagcatctcgggtagcaatagcgataatatcagcacaagacacaatttggcgacacttactctccaaacttttcttaatagtgtcaataagatcataacctcttacgcttagatttggtccagcattcttctcactttgcttaccgtcaagaagaagtgaagcatcacatccctacaataatattcaatagtttttattacttatgatataaatatattttaagaaaaaagtagtgctaaggatgttaaatagtcctacattaataaaaatattgttattattaaacatcaatagtgttcaacaccactacgaggtgttgcctttgtgaatgaacgactatcttatatagtcaatattctattatagttattaaattaaaatatgtgagatttgatacttaattgtacccataacattatgacatctcgtggtagtattaaacatcaatggttactttcaacatttttctatatactagtaatgtgtgagaacttaatgaggtgtcatagtgttattggtataaaatattgagttaataatgaatattattattaggtatcactagttatcaattttttataagaatcaataaattaaaatatgtaaaactcgatattttagactaataacaacataacactttggtggtactatgccctagtgatgctctttagtaattttagaacttaaataccatataagtgtataaactactcatccactcatgatgttgagccagggtcagccctaggctaatgcgagctaggctcatatatatagggtcacccaatccaggggcccaaacgaataaaaagttattttaaaaatatacatatttataataaggattcaaaatttttactttttcgaagattgaatacaactcagggctgaccctatgttaaacatcttaaagtgtcaaacaacaacattctaaatataattggaaaaactaaccttaa

SEQ ID NO: 196525 - DNA, 2800 bp, Cannabis indica
gataaccaactaactacaagtcagttggataagagttagttaaggccgttaggttgttaattttctgttatgatttccttgttgtatttcttgccttaactgattgtaaatcatgtctataaatacattctcttatcaataaagaagtaaggcttttctgcattttctttgtctctgttttagagaaacaaactctgttttctctctttgtttgctttcttcatggtatcagagcccttgactaacgtcaatggcttcctccggtgaccactcgtctcaagctggaggctccgatcctactgttgtgccagctcagtcctcctcgacggcacaacaatggaacccgttctcaaactctctcacagcttcactcaccttgaaacttgatcgtacaaattttctttcttggaaatcgcaagtcattcccacggttattggccatgatcttgatgaacttctcttcagcaacaatgcaccacctgaaaaacttgtcaatggcagcagcaatcctcagttcttgcaatggaggcgtaaagatcaacttttgctatcatggctccgttcgtcgatgacggagggaattctagccacggttgcctgttatcaaacctcacatgctgtctggaatgccttagagcagaaattttcaagtcagtcgaaggcgagacttctgcaactcaaaggccaacttacaaatctgcagaaaggtaatctcaccatctccgattatgttgataaaatcaaagctatttgtgattctttggccatagctgggcatcctgtcaatgattttgatcttattcttcatctgcttaatgggcttggtcccgagtttgattcggttgtgtccagcataacctctcgaagtgagaatctttctctcgaagaagtccaagctctattaatgtctcatgaaacaagattggagaggcactcgactgttttggatctttcatcaaaaatggctgccaatcttgccatgggcacaagaaatggcatgtacagaccttataatgcagctggcagagggcaaggatctgaccatatgccacgatttcccaatcgaacaaatggtcccaggcctgtcaacaataacagaccattgtgtcaagtttgcatgcggtttgggcacactgctgtgacttgtcactataggttcgatcgtaattgggtcactcccaagtcttctactgctcatcctcaagtcaaccttacagaacagtcacttgactatgatcctcagatctttgttgctcaaacagtgcctgattttggagatgatgttggctggtttgtggattcaggtgctaccaatcatatagctcaatctttagacaatcttgagtcagcttctccttatcttggtcctgaaactgttgcagttgctaatggtaagagattacttatttctaacattggtactgctactcttccctcacaatctcaatctttgcatttagattctgttttacaaattccttctataaccaagaatttagtaagtgtatcaaaactcactactgacaatgatgttttcttggaatttcataaaacttgttgctttgttaaggacaagaaaaccggagcagtgttgcttaaaggaaaaatcagagatggcctctaccacctaggagatgatagctcgagtctttccaacactgccctgcaagtgaatcttgctacttcaaccttttcttctcagcctatgaagagtcaatatgagtcttgtattcataattgtaatcaggttgattcatcaacctttccttgtaataaaccaatcaataaagactcttcttcttattctcttgattccaatcccactgtcttactttctcatgttaatgacataaataattggcacaaaaagttgggccatcctgcttctcacacattagcaaaaatattacataaagcaaatatcccttgttcactaaaagatttacagttttgtcaagcttgtcaaatgggaaagagtcataggctaccctaccctctttcttcatctcgggcaaatcagccccttgctcttattcatacagatttatggggtccatctcatgttccatccaaagaaaactacaaatattacatagtatttgttgatgattatagtaggttttcttggatatttcctcttactatgaaatctcaagcctttgaaaccttcatcaaattcaaaagccttgttgaaaaacaatttaatttgccaatcaaagctgtccaagctgatggtggaggtgaatataggccttttgaaagatttttagctgaccaaggcattgtttttaaacaaccttgtccccatagtcatgaacaaaatggtagggttgaaagaaaacatagacacataactgaaactggtttgacacttttagctcaagctggtcttgatctctcctattggtggcttgcctttcaatgtgctactcataccattaatcgaatgcctacacctgttattgataatcttaccccttttgaatgtttgtttcatgaactgcctgattatcatgtgcttaaaccttttggttgtgcttgttatccacatttaaggccatatcatcatcataaacttgattacagatctgaactgtgtttgtttttgggatattctccaaagcacaagggctatttgtgtgaaaatgctgctggtagaatgtttattgcaagaaatgttgtttttgatgaatgttctttccctgctcttcaaattaaagggtgtgcttctctatctgatcaaaagacagccaacattgcttgtcccaccatgagtttcagcactgatttttctcctgct

SEQ ID NO: 196526 - DNA, 1619 bp, Cannabis indica
tacagtcatagggtcttgaggaataccttaccctatgaatgtagctgttggttaaccattatttttgatcatataaattaacaacacactcggtagttgttggttagagcacccatttggtaagcatgaggtcttgagttcaactctcaacaaaagcacaaaattattgaccttagatttggccaaccgacagtaagttgaagttaatgctgatgtttgccacgtggtgcacaattacaacagaaatgtacatagacacaagattttacagagctttggcccccttagttagcaggtaatgacctactccccttttagttttattgatgttgggaggtaataccacttagatcactatagtaatgagatctaaagttgctctcttaagattacacgtaaaaaccaaagttggtgaatctcaagtgagagtaaagccctgttcatgagagagagagagggaacagatgagtgcccagacttcgagcataaggctttgggtttgagatttagggttatagggtttgactaaggctctttatataggagagcttacattcctatcatctcttggaaataagtaaataaagccataagttacataataaattaataaaatacaaatgactaaattacccctcaaaattggaaagttgctgatattttccctctatttttgtggacgattaaggcccatttcgtggcttaacttcctatccacggatgaaagttgtgcaccaaagcctactaggccaaaagcttgctggccatggacctgcagagtgcaagctcgttggccatgtgatgtccaaaagcttgctgacctatgctggccataaggccagccaggggtggctggccagcccccttgaggtggtttattcgtcacttcatcgtccaacttgagtacttggacccctcgttggttgaagtgctgagtagatgtcttggcctttttgttggtgagatgtactcccatgtggcactgatgttgtccacgtagacatgccacatcaagtgggtaaaaatcaagataacatatatcaaaataaatagattaaaataaatatttctaagagaatacacattttattttaaataactttaatgtaagatattgttctccactgctggtcttacattgttattgtttttaatgggattcatcgccaacacccattagacaatttaacaacgtaaaatctctaaagataaatatttttgtagattcatattccatagtaatgctcgccccaatagtgacaacttagaattgagtttacaagtatgaaacaatggtagaagctcatcaaataagaataaccttgcatcccgcccaatacgggacaatgctggatttttattttaatcaaataaatggttggtaaaataggtttactttagaagagtcaactactctatttaaagttttacatcctttaatcccgccaatacgggatactgtatgtcatttagttaaaaatcttggattatgtttatgatatatatttgtattcatttttttatatttctttattatttgtttaatgattacaaatttttcgaaatgtgttgtaatatctgcttttcttgaagggtaaataattttatttttttttaaa

SEQ ID NO: 196527 - DNA, 609 bp, Cannabis indica
tttttttttctttttcttaaaacagctcttcttcctctgtctgatctgtctacgcgcaaactttctttttctctatttttgttaaaataaaaaataaaaaattaaattatttttcccatttgttcccaccttacgattacgtatacgtggcgtcactcttacgacactgacttattattttatacttctttgggtttttattgtctacaaccgagtttacataacaataaatactttcattacatcatcatatgtgacctttacaaaaccgacttaaccaaaaaaaaaaataaataaataaatagtaaatgattttttgtatttcttgattgatagaacattcttgagcatattgaaggaaaatagtgtttttttcttattttcttttaaaaaggtaaatagcacctgaatacctctaaaactaactaatttgtacgattttatttatacactagaaccttttataccctttatctactttttagtcgaatttttatattataattttcaaaattttcaagactattaaaaattctttaaagctattaaaattattgagtttaagaatttctgtcaaattttaatagagaaagtctaacatgaaaaaaa

SEQ ID NO: 196528 - DNA, 3377 bp, Cannabis indica
agtcgacgaaaaatgggcaagtaaatcttgccagggtcccaatttttggatccataaaattgtaatcccatgcaagttgtagatcagactaggagaccagttttcttgtttcttctttgctaagtgaatcgattttgcggtggtgattcttcctgctgttcgtgcaagtttggagtcaaatttgttgttgatgaaacgactaagaagtaagcgatgcatttggagccttttacacaagagtaaacatctaattgagctttacctgggtcccaaatgtttagcctatcatcttgataaattaggtcaaaaggttttcttttgtgggctggaccttgaacaagatagaagggggtgagctttttgtgatatggtttagtgactcattggaaaagaacagattatggatgattctttccacgatatcatctttcagaattccttctagagttggtttctctagtgaagataccgacttcccaatcagtggtgataacctcttagaagcgatttaggtccttgtcggcggcggtaacctctcagaagcggtgcatctcttttctagtggcgggtgtagactttctagtacattgatcgatccttttgttaagagcaacgacgactgcaatcccagaatcaccactcgaccagtccctgtgtctcgtccgttctgatgatgaatcaagaatatcttcatttaagtcgcctttctttgtctcttcttgtcaatactaaaaaatctgctcatataagttccccttcgtggtatttctgaacatattcaagatcagaagtttcaagttttcccaaaggaagattggatgatgccgcaattccattggtaccaagtcagggccttactcgaagttgttcgtcgttgcttccactgtatcctcgttattaattatctagaatgtgtgtcatcgttcagctctatgcaactagtcgtcggggtctgttccatcatatttaggaagccccaattgttggagtcgcagatggagctgttctgagccaagctctttgttcatggccaattctctctctttcctttgtttccaatgaagttttcccatcatggagatcatctcctccttgaccaatcacatttcatcctgaacaacgttgatcatggatttcagtgtctcctctcttctcgataggtcctccgaccattcttttctacaaactttggtctcatttcgtcttccaccgcactgataccaatacactaatgttttagttatattcttgaatgaattagaagatgggcagttcagttataacaaagaggaagttacaaatttccgaacttttcgagatgctttggtatctccatgagtaatcttttactcactttcttgcaaaatagttccccccaactccatacgatatactgactcccttaaatattttaacaccttaggactataggatagctcaatcaaagccgctaagaatatgacatcgcagcctctaaaatcgtaatcaattatgcaagcatctattctctcctatgctttagccagctaatgctaaaccttgctctgataccaatttgataggaatttatctatcaaagatgaatcttgaattgaatctgaaactactcttattgcttatagaaaatctgaaattacaaataaagttccaaactattgagaggtttggatctcccctaactagagcttctcctctccaaaatataagcaataatcttactaggttagagccttagtctgctatatatagattaatttagaatacataaaatgacaaactcttgcccctgtggatgcctatctattataagcccctccccttgttcctatctcttcgagcatgagtatattttattttagtacgggttatcattgtcctttactgaaattatgttgaattacagttctgtgtcaaacctcattctgtagttgcatagattgctgtatacatttgatctcagtcgtgtcttcctttccaccctatccattcacagtttttgttgatttatctactccttattttttcttcaaattttattgttattagagtttcatgtagttaatagtaattgatttttgtaagtccttttagtgttgctttgattttttgttatactttttccatttgttataaattattttgcttcttggcttttgaaaaaaatatgggtggtccatgtactaatttattgtttttgagctttgctatagagcactttagtgtccaatattctagaggacgtgatatattattgttggtgcaattaagtaagcaggttttacataatttaaaataatttaatttaattataaatatgcgcaatctaatattcattcacacatccaataatagtgtagggtgttgggcactttaggatgatctttagcatttcatttctcttgttcttttgtgcctgaaaatttgagtgaaggacgtaatcgtcacaatagcagcaattttttttttggcagtgaaatacagctcaaaagcccaaactggttgtttggtcagaggaaatatgaagaaaatgtttcttccccaaaagtcatttcaggagaaactaatggcgaatccactgacgagaaagaagttgactgttttcgtaatcaatattgggtttcttctggtgataatggcaatgatgaggatatcattcacaggtattgaaagaatatacaataaatgcatacacatgctttcttaaaatgcctatggagtaaattcagaccaaaaaaaaaaagtgaagaaagtagtgtgtatagtacaaagtattttgctaactagcttatacttttaggtatctggcaatgtcatccgtggatgaagccaatggttggtatggtggaactctagttggcgatcaagatgaaagcagtgaaatatataagcactatgctcaactatgcgaggtaacttaaatgattgttacctcaaataatttaacaatcttaatttgagaatattgtatatattaatttatttatttatatagtactgatttaacgtgaaaagatctggatgaaagaaactcatcactacacatctaaggagttaggagggtagttatgtgtttaatttagctttgttcggctttgagctttagcttatagagaagtgttttttgaaaaagctactattagttgcttctctagaaatagctttttatactgtatttttaccccatcatccataaaaatattttttactactaaatattgaagaaagagcgtctgaaaaaggggtgccaaccacaaccttagtgactgtgctagtgttattaggctttacttgtagactaaacttggcttaaaaaggaagcatgatgtttaattacctaaactaaaatcctactaattttgaagttgcaagtgcgttgt

SEQ ID NO: 196529 - DNA, 877 bp, Cannabis indica
aacagttctagcttttcttaagcccacgattaggacattcatgaatctagtaatggttttacactaagtacataaccattccatcattctgaagttttcctatcactagggtatttccttagaaggactcaggcaattcctagtaactaatcataaatattttactttcatcaatatgcaaacagaatttctagggaggtaagtttggatataattcaaagttcaactcaatgatctttgaagtgcatatccaccaaatattccacccctatcagttcacaagatctttaactttaatatttttaatattgctaaaaattcatgaaattctcagacattttaaatttctttgcataaagtaaaatctagagtgatcgtctaaagaatttaacgataactcatatccactcctgaatgtacatctatattttcgaatatagattgattttattttcaagaggatattggcaaatttactctttgcagaaaatgatcttgttaaaaccacaatagcaataagagtagtttacattggtgatggccttatgatggggaaaactccttcaaagccttgtgtatttagtgcaacagtgtaaagatagatagagtatttttttaataatattatattgttaaaaaaaaattatttttaaaagtaaaataaaatacgaatatataattttatatggtgggtttggagatgatgaaaaaataatatagtatgtatgaaaattatctatgttaatgcaaaatttatactattattttggagtttacaaaatctacaatccaaataattaacaaatttttttccacaagttctcgaagataacaaataaaatagcatcaacaaaataaatgagagagagagagagag

SEQ ID NO: 196530 - DNA, 1721 bp, Cannabis indica
taaacataagaaatcttaatcaaaaacataaaccaagaacaaagttttaattattaatccaaattggattggccaatgataaattggttcacaaatagccgttaaaaacaaacaagtgtcttaaacgcacctgatgatcaatatgagctcctaaggggcaaattcggtaaggagaggctacaactcgaacatcttcgatgcatcttcccgccaatgcagcaactatgtctctaatctctttcaactgcaacaatgtttaatggacaagcaattaacatgcattgcatacatatagctatatatatgtgtgaacagaagatttaaacccacatcacatcgaaggatgtcaatgtaataaaaagaaaataaaagagtagatttgcataaacacagttctggcttccaagcgcaattcgtgtccgttgaaagtaaatcttaaggcattgattgtgatttattcaccatattaaaacttgaatcgagcaagaagtaaattcaagaaaaaaaaagaaatggataatttgaacatttatataagagtgaaagatgagaaacagagagtacctctgattgagatggccatgatgagggatccatcgtcgcagttttcaaatgaaaagtgaagatggctttgagagattagcttgttttgtatgagggcatttagagagagagagagagagagagagagagagagagcagagacaatgaaggtgaatatgaaataataaaggaaaatgacataaaatagtgaaagttggcgataactgcgggtttctgttgaagcgtatcaagtgcatgtaccaaactaaaagaaaaatttaccaaaaaaaaaaaaacacacagtgggaccgacaaatcaacaacccgtcacaataatcacattacgtatttttccgccaacctctaatataattatggcttaaaaaaaagggagctttttatatatacggctataagtctttatttgtgcaaaaatacggtacctgaataatttaccctttctaacttttctttttgcaaaattacgatgataaagttgaatgcaatatagtctccgcctttggctccggcagctttttcgacagtcattttggagctactgacattaaaaaccagcaattcatcttttccaacaaatccaaatagaaaaaataaacaaaattatcaaccatttgaggatccattcaagtttgcaagtatttcaataacttggaaaaactatgaatctttgcaaaaagttatttacaggaattcaaatttcaattatgaccattaaatttcaaattcaatgtttattacaacattcaaatcacaacttcaggtaagttcaaaccccttgagcttgtaggtaaatctgaatttattctttattttgatcaactaggtgtttaagatgatctattcttatttatttttaccttgatgtcgggttccgtgtgttgctggatttgatttttttttttttgtataagattgttgttagagacttagagttgctgaaagggttgctctatttgattttctggttctgtttggatagagtttgtaaggttttctgttatgattgctaaaatagttgttctacttttaacatttctgttctttttctagagggtttctataagcgttgctgttggcttgtttaaagggttgctcaattttattcttattttatgcaaatggtagatgtaagtattgttgttaggattgttattatg

SEQ ID NO: 196531 - DNA, 1410 bp, Cannabis indica
ttattaaactacataaaattaaattattacaaattaattattatctaaaacacaatttaaaattcataaaaaattactaatatactaaaaaaaattgaaaaacataaattataaaatataaaatattattagaaatataaaataaaatactaaacggatccttgttgaaacaggtcatttaacattcgggacaaaaataatccccattaagaacaagtccccgcaagattccttctcggaaaatatgcatccctacttaaagtctcattttaatgggtgtagaacacttacattatattaattattgtgggttgatacccaagaatttttacaaaatatatggtacatagttatatttatctcttatgttaaaaaccaatttgtttcaagaacaattatacttatttcactatgttcaactaagtacaaaattctcacataagaacaacaacaaaatctaaggtaataaaaataaatcatcacaacataaaatatgttaatgagtgattatatttaatataatgaaaagaaaaataggagaaaaatgaatggtaaattgaatttcagtttttactttacaaaaaaatatataatgaatggatacataatatagtaaatagtgggcataaataagttagactatacaggcgtccaacaagaagaagttgcaggattccacaaagcaggtaataaaaacttcttgcccttaacaccatggaagttgaatgctccaccatttttcgggtcgacccgaatcttgccagtgtatcccggaaacgccccgcttccgaacataccttgacacatggttccagcgcccaacaaaccaaaatgtccactgcccatgtgtgagaagcctgtattaaaggggttagtcacagcatcagccaatcctgatgccaatgatataatcatagcatcagccccaacattgccatttggtggttgtaacaccactccttgtggcccaaaatcagacttgtgaaaaggccaagcgcatgcaccaggacactctgtctcagggttccccacaagaacataaggttggtgtccgaacaccccgtgctgggcgcatctcccggtacacatctcttgtacggtcacttgtctatccgtgaaaatgagagctagagtgttgtgtgtcccttcagtggctttttgcaccaaaatctttatgaaatcggcagtcattaccttccccgtcgagtaggaagcatcggtagccactttcacaaccttaactcgaattttggggaccctgcggacgtgtctatgccttgtgaaagattggtagctctccaccattttccaccaggatgatactttgggcttagaagccccgcgaacactgttgagagatttgagaaaacaacggatgagactcttttggccgcggccaaattggccgta

SEQ ID NO: 196532 - DNA, 723 bp, Cannabis indica
tgaagtttttaaaacacaaatcacgtttggttagtgtttttaaaagtaatattgaacaaaattcttgttttttgtaactttatttttttaaaattatttttaaaaaacaagaccaaacaagtcaaattatttttaaaaaaacaattttttgtttttaaaaagaaaaaacagttttttaattatgatgtcaaacatgctctaaagctcatgtttttcgtttatattacaggtaatatgttaacaagtttatcacttttcactttaaatcatatgaacatatgaatagaacactcgacctgttcttcgaacccaaaactagacctcggactcagatccgacctggagtcagtgttggggtcgagtgttaatatcaaatataatattgtattaaataatataaatacaatacaatacaattcaacacaatacaatataattagtcatagtatgtataattaatttcacattatttttggttgtttgtgatttatttattatatacatatataacactttgttttgatagcaaggaaaccagaatatgctaaaagattattaataaaaaaaaaacattttttcttagaataaaaaatatttctttcattatattaatattcaaaatgtgcacctctgttctgcctttagttatttctgatattctttaggtctcatatctgtcactaatgtcatcacactcacccaaaaatcgatacatggttaaac

SEQ ID NO: 196533 - DNA, 1145 bp, Cannabis indica
ttgacattattctattgcttcattctaaagaaatgacaattttcaagggctaacttgagcataaaactacaaccaaatcaggaaattctatgtaaaagttatatgtggagtttttctgtatgtgtggaaatggaatgctaattttttataattgttatttctagtcttcaaaaaaattacttaagcatgtaatagttaactaaaattatattcaaacaaaaattaattaagttaaattatttgacaattcccacttttttatatttataattatctgtatagaattgtatatgctgtcaatctttttcaagatgagtattttctagttattgctagcactatgaaaaggaaaaagcgtattgtgaatattgttgcaataaattatgtatgaatgttgaattgcaagtctaggcatgaccacatcaataataataataataataataataataataataataataataataataataataataattaataatgcaactctaaattggtcgtgcttaataattagttggaattcacatgggttatagctttagcaagctatatatatgcaattaaattagcctcaaaatataatagttcatcattttgtttcacctcgtatctatatgaaaatccacacactaagactatttggtaggactatttggtaggaagaaaacaaaaaagggcaacaaaaaaaaaagagtgcacataaaatatgaatgattagaaaagaaaattttcactttttattaaataaataataatagttattcactattagtgattttaaatacaattttttaggttttatgtgattgacaaaaggaaaaagtggatctcacttttttttcctcctttcttcttttttttttctcaatattcttctttcttcttttttgtcaactttatgctaaaataattcaataacgtacgagtttaaattaaatatatgcatttgcatagtataatgaaaaagaaatacaataacaatttgaaaaaagttttttagcggccaaatccttccaactattattttatttgtacttgaccttataagtttaaattttagcggtaaaactttctaaactactagactgttagcaaatttaaggtgtcatccaattaattactattatagatggctt

SEQ ID NO: 196534 - DNA, 755 bp, Cannabis indica
aaatgcattgattcatcttactttggtggaattttcaagataagtctaaatttttgtttttgaagattattcatagatgagaaaaaaaaattatactcctcgtttgttacataaaatatttattaggatactagatacttctagcaactcataatatttataagtccatttagctacattatgagtaacaaaattataagttctacttaaactagcgaaattacaacccaaaacagtacaagaattcctaatgcaatggttacaaaatttattaatttctcactgagaagtaactctattaaaagcattgatagtagcttcagaattactttccaccatcacataggagttgtcgtgcgtcactgttgtctccaaggccaaaagacaagcttctgcttccccttgaagatgatcggaaaattgaaatcgcttggttacaacccgagagagctttcccaagtgatttccagcaacaacatatgcacagatgtcaccctgtctcactcttacatcgcaattcaccttaatccagtccctaggaggcggagaccaaccctggccaagaaccgctgaaggatgggaagtatagaaacaccatagtctacataacagtgagaaatcgtattaataataatgctcaatgttaaacagcttattgttatataccttatcatttcaagcttgtcaaatcgtatcaatcacacaatagaagcatataggacaacttcgtggacatctaagcctctcgagtttaa

SEQ ID NO: 196535 - DNA, 1107 bp, Cannabis indica
aatccactgcccacacctccacccaaagaagctatgctccccttcttgagatacccaacaacgcctccaatcacaacgatgaacccataagggatggtgaagcagaaatcgtgcatattttttctccaaattctttattccctagaaaattacaggcaaacatttacaaccttttaccacttaagcatatgtgaccactccatatcttgtatgatatgtgcattaaaccactaatgatttaccacaagacaaaagcccaggtgtcctacttgcacaaaaagcacttctacagccatccaaaataatataatgagccttggaaatttagataacagtgataactatgagaatcttttctgtattttagtaaaggctgctgaaacagttgcataacatgaagaaaaaaacatgatgacaataaaactgacactgaagaagaaaggagaaacattttatctaggtgatataggaagaggtttatgaaaataaaaaatggtgcataatggtatgtaacattaatggattaaacattaccaacactttttgaatgctattaaaaatggagctgaggaagtgaaagtaaaagccatagttttaatcgaagagttaaataaacaaaagaaaaacaagaaagtaaccaataaatctaatgtgtcaagctaatataaatacactgtagattcatgagccacaagcaattaattggttcactttaagacgctttcaagatttatattttttaaaaaaattgaaaacatcaaacgagccatataccatgttgttatgaagttgtctgacaattcccaagcacttaaattgtataagattattgtcaaacaatgcagtctcaacaaaagttgggcgagcccctgtttttttttagcaattatcagatgctctgaccacaaacttgcaaggtaacgtacttatatgtctcatatataaatatatatataactatttttctctttgtatacagagctagctaaatagatctagttaactacgtttatctgattgtctttggtatattttatccaaaaactcgacaaattcaaagacgattcgatgatgatatataggagaccaatatatatatatatatat

SEQ ID NO: 196536 - DNA, 1939 bp, Cannabis indica
atctcaaccccccaagcgctgcctccccattttgcgctaccgttaagtcaagagatcgcaagtcaaagttttggaagttcaaacttttgaatgcactttttcgatcactttttggtgtccgtttgatgatctgtcttaacaactagaatcagacgttgaggagaacaatctcatcattttcgcccgactcgatagttttttttggtgatatttttgtagctctgcccctttccaacgactttttagtgataccgtgtacttttttgacaaatagttggcatgagcatgatctactcgtatgtactacctttattttcagtgactttttcggtacaccaatttctactgccactgatagttagtatgcatcgcttaggtgaggttttgaactctaaactttaatatagtcattttatatattgttggacttgattttgaatgtagaatgcaataatgatgattatttagccatttgatggtataggtgaaagtgatatatatgattggactaaacatttggagcttgggacttgagagcttaggatcatcgttttggacaaagtttaacaacttgagagaggtaagaactcaacttgattattggacttgattttattatgatgattaacatttgacatattccaattttagtgatttatgaatgtttgaaaaattgaaaacttaatctgcatgttttttggactgttctagaggcactgagtgttaaatatatttttgcacaattatctatgtaggttataattcttgggttttatcaaattacagctcgtatagtgccaaattttctaaaataaacggaatatgtacttttactgttcttagcgccagtattggtttcgctgatgagagccatatttatcatatcttgtgtatcataggaagattaggtgtgcattcacctggtgtaagaccaataatctgtacatgaagtaaactgaatttgagccccagtattttggtggttcgcgactacccagtttaggatgtcgttttctataaaaaccctttcatttcttcatgagggggatcaaaaagagaaatatatagtcgaagctcttcaaagatatcctctatgctttcttcttcttcttcgaaagaaacctatagaaatagagttaggattttatattgtaaacaccacttgtaatatatttcaaaaccctataaggccaatatactgactcgtggaccatggataattaatgctcgaaccacttaaaatcatttgtcttagttacttaacatttatttaatttctaaagctttcagctaattagtttctgaaaatctcagtaaacatttatcattaatgagtttcctaacctcttgatgcttccaagttgagtttatccctcgaacattgcagcacaagaccttatccattaggtctgcgaggaattcctcctccctcatctgtttccatcatttcacacaaaatctaacccacttgtaacttagtaaagtttcgacattcaaggcttagtacttgttccttaattggactgtgggaatactcttaacttctgttttttcctccttggtacctttcctctgccagatgccatttttctattttatagcccctagaggttgcacattcacttcattaactggtaaattatcaataggatgacccttctcattaagagtctcattagatttctcaagggtagccttctttttcgaagccactatggaaatctatttcagtttctgttttaggccttttttacatatgttgtgagtgaccaaatctcttgcatccctttcaattaatgggcttccattcataatagatgttaagataaacatcctctccgacttcattctcaaagacaatttattcaggcatgtcttgattaagagagacttctatcataacatgtgcataaactaatctatctcaatttctagtagc

SEQ ID NO: 196537 - DNA, 854 bp, Cannabis indica
aaaaaactccacattatttgaaaataccaaaatccagagttacaaagatctaaaaatcactaaaagccctaactagcctaaatcagattcaaaaaaccttattaaaattataaaagaaaaacaaagcatatcataggaggcatatttagatgttaagaaaagcatactatgactagaattcgacgatgaatctaacgaaatttatcctggagctcgacgaatccaaggctcaagaatgaagcattttgtgggtttcaaaaaaatagttgcagaaatttgaaaaaaaaacaaagagataaagagggcatacaagagaggtatttcaagtcctgaacttcttctcttttcttaaaatagtaatagtgaaaatggtggtaagaaatggaaaatgctagtcctttaaacggaatcttaagcaccgtttgattaagcaaaactaaatcaagggtgattaacttacgggtcagttgaaaagacaagtatttattgttaaagccatgattagctctttattgagaagaaaaaaaaatcacctaaaaaaaatatttaagaagcttactcggtacacaaacaattagtaacaatggtgattaaaatgtctttttcaaaaaatgaaagagaaatactttttaagaggaaattgttacccccatattttgagcactaaatatggacatgatacgtgtccatgtaggtctcagagattgaagagaataataaatacgagaaataaaataattgtcaagataagttgacctcgcattgtgctataaatacaatgattcacgaggataacaagatcataagctaaagccttagaacttgatggagatagacgagacaaatgaatagta

SEQ ID NO: 196538 - DNA, 879 bp, Cannabis indica
accaaagcgtaaaacttctaaagatgaaaaacttgtttctatgaagaaaaaagactaaggtaatacataataacttagatatattattaaaatttttataaatattttttaactaataaaatatatacaccctgtttgctattttattttacaggatattataaataaaggaggtgttgtagatgattttgctaaaaaagggaaggagatatcctcaatttctagtgaaatctctatagatgatatgcaacaagaaacaatgatttccaaggtgaataattaacttaaatttttaattaaatcaatttatgttttaaaaaaattattttgataatacaattttaattttaggaacataatcaaatagttgcaccttatgcatcacttccaagtgaggtagctaatttcaaacatatggatggatcttacgttcaatatttagaatcttaccattctataccaaaatttttgcatccaactttatacaatactcaaggtaattgtaacattaatttattttgttttattttttaagaaaaattcaatagcaatgagaatttttttttttttttaatttttttttatagtattcttgttatatgcaacttctacaagattgcatcaagggatacaatatcaaggaacatccagctaaatcaatttttggaatccaactacatacaatgctcaaggtaattatttattgtaaaattcattttatattatttatttaagaaaaattcaataataatatagaaagtttatttataacattaattcttgttgtatatgtagattctacagtattaaatcaaggagtacaatatcaagaagcatccaatcaagcaaattttgaaatccaactacatacaatactca

SEQ ID NO: 196539 - DNA, 835 bp, Cannabis indica
atcttgtttcataagaaaaataattatttgcggtgaaatttttcttatgttttgatattttacacttttttttttttttcttgagtaaatattttacacttaattcctttattttttgtttgtagtggcaaacccctttatgtttacttttatttataaatttgaggtccaaactggatatcattgctaaataccaattgaattattactttattgaagttttattttcacgcatacacatttatacacaatgatcatctagtttgtatttaacaatgatatttaactgacgtctaatttataaaaaaaaaaataaatttataggaattttgccacaaaaagagaaaaaaattaaagaattaaatatataaaaattaaaacacaagaaaattttgttgtgttgattacttaaaagaaaaaatcgtactggaagctacaacaaagagtaagattggtcgtgtcgatccttaaatgatagaagctattgggctcaagaaagccctcagctgaatcaaaggaaaggttgaagatgaaatatctcagtctctttataagagtgcctactgtctttgttgaattggactttttagtccttcggcaagctttgtcctattcagtcactttatttttctcttttggtttaatcatttcagattgtaaacatttgtttcaaactcttctttaatgttgttatttcttttgttaaatggtctgaagacaaagcgactctcactggttggcttgctattcatgttcttcacctgatcgtctttccattgtcgggatcgtctccgatgggtgccattttaatagctgattgctaatgaaattgatt

SEQ ID NO: 196540 - DNA, 1107 bp, Cannabis indica
aattgattcccaggaatggatcattcctagataaatagatcaggagcatgaaaaagaaaacaaaggcactatggtccagcactaaaaggatcctaaagaaaatatacaagttactacagtcattcaaaaaaaaaaaaaaacttgaaacttcctagttattcaattttctacgcatggcaaggttctcatatcaaagatatcatgtctctaagttctcaatcaaataaagacaataaatttccctatacgatggtgcatgcaattttgatcataaaaaacctagaaaaaaccctaaaatcatgtcacatcaactaggaccctctacccctaaagcttatttagaccaacaaacatagcgaagtttagaggaagggagtacttacttatgatgtaagaggttggggtgtcagtttcatgttttcctgtgagatgcatgactgaatatcgcgaagcctcctcatgatttgttgaagtcccttagaaagcccactaaaggtagttctagggcgattaacgggttgatgtttagaaatagcttctgtcaaagttgtaatagtctgttgaaaagcttggagtcgagattagacattcactagaaacttttctatgtttgggaagatttttctctctctagaaatttgaaaacttaggaaaatagctaaagtgctaaatgatctgcctgtgaagcatttatgagtatattggcgatctgtaagcgtatgatccaagggatcaggttaaatctaagaaaacacaaatcctaccatccaacgatcggggaataccaaaggttgcatttaatgcgatcctcagaactgatgggacatgtatttatggtgatattagccttgagtaacatgctaacatgatcaactgtcaatacacaaccccatttaccacgagcccaatagaccgcgtgacgcacacgcagcaatgattttttgacacgtagactgcaccaatagaatacgaaaggtttggacactcccacaatgtctcaccatagaatatgaagaggccaatctagttcatggccccggatacaatatcaaatcggcggaaagcctccgtgactcttgaccctcgaagacttggggggtaaatata

SEQ ID NO: 196541 - DNA, 942 bp, Cannabis indica
atttttttctcactgcacaagtcattgatgcagagtataaccgacataatccaagtaccttaagggtcccgcagctggggtatgcccattacaacgcttgtttgttatatattaattagatatcaacactacaaagatatgtaaagaaattactcgaaaggtcccccttaggaattaaaaccatagacccgaccatcaacatagcctcatagatgcaacaaacaaaattagaagactttaccttttatgctgaatttcaagaagaaatgaattaatgaagaatttacagtcatagaggactgtaatatgttaacagatacatatacatctacataccatgttgtaattccctccagtattagttagcattcccagtatcagtttatacatcaatttttaagtaacatatcttacaaacaaaaattaaatgatgtagtgggtacctcaaaatatgaaggatgtacctcatatgaaacattgcctccagacatggatggctgacgaagagtagcattacaaactgccccatttgccgagagaatacaaactgtgcggcgtccttcctctgaaagtgatataacctttgatgctacatcctgcagaacaatagcccaactcaatcagaagcacatctatttataataaatccttatgtaggttaaggatattatgacataatacaaattatgcttaagcaaaaatgaaagaggtcccagccaaacccgaattggctgatctgattttgaatgctatctattcagctactctctaccaattgttgagcaatagaaatgattgtctctttaacactatttgtcactcagcttcctttcttagtaaagagattaaatgtatggttaaggctagagttgttgggtttcattgtatcaatgctaagggaaaagattgttatatttaaagggtagtgaatagttggtagct

SEQ ID NO: 196542 - DNA, 813 bp, Cannabis indica
gtttattttattcttctctgcatggataaattaatgaaagtaatattattataatttttattaaaaattcatttatttttcacttataaatttaataagctacgcggtattctgtcatgtcccacgtgtgagcgcctactgtcaccgtccacgtggcatgcatgcagaatcagatagatgtgtactgacaaagcattggacccaccacagccttatggttcacacctaattaattaattatgactctttctcgataattacccacgaaatttgacacgtccttttcttagctaataaagtcgtgccacgtggtcaaatgaggggtggaactgtcattggacctctttgattgtttcaaatagtacgtatttgaccacaacaatacaatataatacttcataaaaaaaaaaaaaaaaaacacactaaactttcaataatataaaaagttagattccatttattcatatatttcttaaataatccctcaataaacaaatatatatatatttttctttacaaaaaaaaaacaaatttatatttcttaaattagttataatcttattttgatgtgttaataggattacgtatatatatacactttttctcttcaggaaattgtattgacattatagtttttgtataagattaccaaccatgatatgaatgtatatatatcataatcatacgtacctccatggtagtattaattaaagttaaatatttctacataatgctaccaatgttgtttttgtcaattttttttttttatgatatttgcaaaataattaggtagagatgtcaacgaggtcgaag

SEQ ID NO: 196543 - DNA, 3522 bp, Cannabis indica
cactgtaaaccccattcggatatggtagatgtgtgttgaggcaaattccaaggccatgaataatctgaggatgatgatgagatgttgttgcagttggaagagggttgatcgtctgcaaagatggaaatgaatgtctgttgagcatcaaagaaccatgcaagggagacaaggatgggttggagagattgagcccagctgatgtttccaatggagttttcaatgattgagtccagtgatggggtttgtatgtggggagattgggatgaatcgtcataatggggttgggagagaagcggaatatgattacttgaattggccatggaattggggagagttaagaaaggctagtgtagaagagaaacaaacattaataggaaaattttagagtgcacagctgctaagcaccaccaattgagacactgttattactactttttaatattcggttaaccgtatcactgtatagtgttagatgtacatttattatgacaaaaaatctttagtgtacttttcttattctaccagttgtttgaggacacattatttagatctatttcacatgtattaatttagtttagagtttgttatcggattattataccttaaataggtatagatgatatgtactaaaataattaatgagagaaagggcacgccaattaaagagagcaaattttctttcttaggtttggttgaaaagaataaaaaactaatattttaaaatgaaaccaaacaaatgaatgaaataaaaattatctcatttccattctattcttacctcaaactaaatgccattagagaacaatgacaccttttaatatatctctgatattaatgtgagcatggctttagcatctaataaatgaaaaaaatatgttgtctctaaatttgtgtgcctttcctatatcactaattattttactacacattatttatacttatttaacatataataaattcgttaacaaactctaaactaattaattgatacatgtaaagtaggtataaacgatgtgtcctaaaataactggtggacaaggaaggcacactaatttggggacaacaacttttttttttcatctaatagggtgtttgtgtgaatttgagttagaggtaatagagttggagggagtaaacttagagagaatataagtgtttactacaattttaatttaaaaagtaggattcacttagaaatataaattcttcttaaatttaatttagtttgacattcgcattcccatcaagtctgaacctcatatactaaacaccggtgtaattaaattttgggtctcatgtcatttaatatgattcctagagccctaaggcaagtgcctatatccactatgaactacatttgatgaaatcaggagccaaaggtggagaattgtgaagattggtccttatttctcaagccaatcacttgtccacactcaaatttctgacttggaaacaagctgttaagatagttaggccaattgtcttaactctccaagctcccaactgaaaattgaatcggttattctgtttatcacttatgtcaagcaccaactaaagcctatatattatccctagactgatcaactaagggtagacattattttacaagctggttttgaaccaagcttagagagagtaggtgagatgagaggatagaaagaatgagagagttcaaattgttcgatctgtgtttgagtgtgtaaaagtaagattttttatagtgactcttagttatttaattttaatttagcggtaatgatacttaagttataattttagaatttatgtaagtagctagctgttaattaatgttaagtaaattttcacgtgacaatcttttattggtctaaattattaaatttttattttttaaattagttaaataactaataaaaacgacatgtgtataatgacttaacatttaatggtcaaatacttacagtgacgaagagaaattagttataacttaaatataacttaacatttgatgtgttggtttagtagaggagaatgaatgacggagctaggggcggagagtctcatatagtctccccatcttttattatttatttaaaattacatgtaaacataaacttaaaattggaaatatcccttttttttacatgtattggtccccttttagtttatggattgagtgctcactgattaatgaaggaaagacactccttttttctggtatggtttcaccagaattaactgaatctattagcgtacgggaagccttgagttggatgaaaactcataattggcagcatattactctcgaagctgactgtctaacggtaattcaagcgataagaagctcgattgacatgatatcgctatttgatcaagtcattcatgagtataaaaaacttttgttggaattaaaaactgtttatgttttatttgttaaacgatcaacaaatatggtagctcataactgtgctagaacttctatattttttcctagttgtactttcgatatggagtctgttccattcgacttgatactttctttggtagcgaattttgatagttaataaagatgtattttccattaaaaaaatgtttaaatttgtacaatttaaggtgttaattatgtacagaaagttaatttaagttaaatattttcataattttatttataaaattaatttaattgaaaatatttaattttgtgtaatttgagtaaattgtataatgccatttattcactcattacatatatatctcttcgttttggtcaggttttctatgcatggaccattttgtatagactaattaggattattacctcataaactttgacatatactaaattatatcctctgaagttttctgatcgttaaaaattcattctcaattattaagattatcgaatttaacgacttttatccaatttcatttaattttactaatttagtgattgtttatgcattaaatcctgctcctcaaactttaatatatactaaattacgcccctcgtactttgacatgtgccaaattatatttcctgaacttttatctattttagatttttcttactaaaattagacaaaaatcgttaaatccaataatatcaatagttcagagaaaatttttaacgaccaagaaaatttaaaaaacataatttgatacatgtcaaaattcaaaaatcaaaattgtctattaaccatttgcatttaaatggacctcatatcatttcaataataagagcccaagttactccaaattagcattactgctagttaaacgaccatgtctgactccaacaactaacgctcgcaggaagccaagaatgaagagttgacacctgtccatgcggtctcattccaataggttctgacgcagatatttctctcattccccagctgattgccatgtgtcccctgatgtcccacttcaagtagctaattcagacactacttctcccacaatgaccatttcttcacacctttttacaccatctttgatagaagtattctctaaaaatgttatatatttttacattatttaaaa

SEQ ID NO: 196544 - DNA, 1001 bp, Cannabis indica
taaagatctgcccgagactttttctgttcaaagtgtccgccacaatattggccttcttgctgacaagttgtactccatgcggcaatgatcttacccacgtggacatgccacatcacgtggacaaaaattgagataacaagtagaatttttgttttttttttaatttgtttatgaaaaataaaaatgtgttttgtacctatttttgttttgtaagtttaaaaacaaaaactgtgttctgtaaatttaattttttattattgttttttatttttatttaagtcaggtcagtggtccgggttcagatctgcgattcagggtctaaggcggggtctgagttggggtttggggtaggggtccgagtccagctccgacttcgtggtgtaggtgcaggtccaacgtctgaagtccgagtctgggtctaggtctgggtgtgagttcggggtcaaggctcgagtctgggttcagggttagggcaagggtctgtctttgggcctaggtttgtgtttcaggtatgggtttgcgtcaaattcgagtctagggttggggtcggggtcggggccgggtttaggtcagtgttcgtggttgggtcttggtcggggtccggggctggggctcgagttcgagtctgggtctgagtcttagtctgaggtcggggtcaaggttcgagctcggggcaaggtccagggttggggtcgaggtccaaaatattgataaaagtaaatataaatagattataattagaaaaaaaaatgtttaaaagttttttgagagtgacttttttttgggttttcaaaattttgttttttttttttaaaaaaaaaataaaagtaaaaacagttttataaaacgtactttctgaaaatattaaaaaaaaagatattgacagctaaaccatctgaactttaaattttttaacatttaaccacaaaaatttattttttggggggcaaaactacctaaactcccattccgtgtaccccttcgtccgaaaatcacagtta

SEQ ID NO: 196545 - DNA, 1284 bp, Cannabis indica
tttagaactataaactgattaagttagagcactggtaaagtggaccgttgtacaattaatttagaagggcttatacatcttttactggcatatcagattacacaccaaataaaaaagctggaatcaaaggaggttgcttgacataatttagtagtaatttacaattaataacaaattaatctaatactattcattattaaattaaagatatataatcaagtaacacttaaacttgctaatttcataaaattagtgccagacattcaaaaatcatgaaaaaatataatataataattaataagaaaagggtaactccccaaacaccagataacattttcttaaaaatttaaaaaaaaaacaaaaaagaacaccgagtactaataaagtgtcacaacaaaattgatatatggtctaatcatcaccaacaaatgttttaagactgttggaatcgtataaactgtataggtagttaaagttagtttaggcctaactgttttactgttataacagtttgttagttagttttgcttctttcctttcttgctttgtaacaaactgatatgtaattcctattacagtataaacaacagctatgccaatctgttctgattgagcatccatttcattcattcaacttcatctttttctcttcttctccctttctctctctgctccattgctctgtttttcagagttcttacatggtatcagagccatgtctaacaatggtgaacgccgagttgatgcaccagaacaagaacgtgcacagcagcaaaatcagaggattgcaccatttgccctaccaaacaacaatctacttcccctaaatctgagactcgatcgaaacaattacacaatttggagatcccttgccttagctgttgttcgtgcttatgatcttgatggacatgtccttggagctcgtccaacacctccagaaactcttgcaggtaacactcctaacccagaatatcaacaatggatgcgatttgaccaatttcttatgcactggttgatgaattctgtttctgacaacatgttgggtcatgtaatccattgtcgaacttcagctgagatttggaatactttctctcaactttttgccacaagatccagagcaagattgctccaactcaggggactccttcagtcgacaaagaaaggaagtcaatcgatcgaggattacattctgaaaatgaaacaatatgcagatagtcttgctgcagctggccaaccactgtcgaatgatgatcttgtattatacattcttggaggtttaggatc

SEQ ID NO: 196546 - DNA, 2302 bp, Cannabis indica
ttagccaatcccgagatagactttagcttttggcgcaaaagggctgaagggatgcttgcatactgcgagaagaccaagaaggaggaggctggagatgcaggcaaggttgaagaagatcaagaagagccaactaaatcgcctactatgtaggcttattctttttatcttttatttatttatttatttaggaaaatggccctttggccgagacaatagttgcccctagtggcattattttttgtaaggaattttgcattgttggaaggccaactttgcttttttatgcatttatctttacttttaatgccttgtatcttatgtttgaatagaatatatttgtttattgcattttattttacaatctaaatatttatattctcatccaacttattgataccttagggagcattctcattgttcctatttttcctttgatatgcttaagtaattattaatctactacgtatgtgccgagtagttataatctatgtgtagttttaatccgcgagcagttttattctgctatgccagcagtttacaatctgccatatttaaacatatttcttgtagagcaaacttaaaaaatactttgaataattcacatttggaactattttgtatatcttttcattgatcatataaatagttagattatctattcataatttagctttaatattatttttcaaggcattcttatgcctcgttataatacatgccagattaatgtgagtcgttagaacattcaactcacatatagttttatgttattttttgagttgatctatttacaactgttgatttgattttttctttctaaagaaaggtttttcgattttttttttttgactttatattgtccatagaaaattttaattaactatccttctctttgtggaaaaaattttaattttctaggtttgtaacataatatgtatatctagataaattccagttattatacatatatatatgcctcttaaataactttaaagaacataaactttgtaattactagaacaaactttaacattattaataataacaatttaaatattacaaagataaatacaacatttatattttgaatttactggtaataaggccacaaatattcactattccagtggttcattattagcgagttattaagccaagttaatttgtaaactccggttcccactactacttcaataacataaggcccttcccagattgggttaaacagtccagcacttggatctcgtgtgtttcccaatactcgtcttaacaccaaatctctaacattaaagagccttatcttaactcttttggtaaagtatctcgtgattccatattgataggttgcattagttatttgtgactcattacgtctttcttcaagtaagtccaaggacaggttcggaagctcttggttttctacttgattatagaattcacgcctataggtcgtaatgttaacttctagtgatagcattgcctccgagccagttactaacgagaatggagtgtgtcccatcgcttttttctctgttgttctgtgagccaaaagtacttgaggtagttcatctacccatcttcctgtagtagcatccaacttcttcttcatagtatcttttaatgttttgttaacaacttctacttgtccgtttgcttggagtcttgatactgacaagaagcttttgataattatattcgtttcacaaaattcagtaaaaagtttgccgtcaaattgagttttgttatcagatactactttgattgctattccaaatctgcaaataatattcttgataacaaaatcgagaacttttttgcaagttatggaaactaaagattcagcctctttccactttgtaaagaactcaattgacactacagcgtactttgctcctcctcaccctgtgggtatgtaaagaccccttagctttaatttggaaattagcagataattagggtttacttatgaaacttgcatattagtcttgaattattaatttacgatgatttatttaaattcagaatgcattttatatgtcatatatggaatttcatagttttgcatgttttgtgcccggcaacattagaacgcgctgtttggctattagaatcacatcttagtggaagggcaaaatagcttttttgcctatttgtgttttatcctttagtggactttattttgggttactaatctgaatttctaaagttaataaagctgatattaattaatcatatactctttatttcactattttacaaaaaatcaaaaataaagcaaaaaacttcattctctctctctctc

SEQ ID NO: 196547 - DNA, 630 bp, Cannabis indica
agagagagcttgtgacaaaggaaatcaaatttgggcaaacttagtggcttagtgagaaggtcagctggttgttcttctgttggaatgtaggagatagtgactttgttttgagccaccagatcacgaacataatggacatccacttcaatgtgctttgtccgagagtggaaaacaggattggaagctagttgttgggcactttgattgtcacaccagattactggagtgacaggaactgtaatgccgagttcttggagaactgaggaaatctaaactacctcagcagcagtggaggacagtgagctatactcggattcagtgttggagcgtgcaacaacagtttgtttcttggagccccatgtgatcaagtttgagccaagcatcacacaataaccagttgtggactttctatcatcaagattgcaagcccaatcagcatcggagtacccctctaatgttagaatggtggctggtttgaagactaagccaaggttgatagtgcctttgatatatcttagaacccgtttgcaagcaatccaatggcagtgtgggttgcataactgacttgttaattatggcatgctgagatcaggtcttgtcaaggttagatattgtagagagtcgagttgt

SEQ ID NO: 196548 - DNA, 1741 bp, Cannabis indica
tttcaccctagttactaagagataaacactgcgggtaagagcagtcaagttaacagagtgtctacaacatttcaaacataatggtgacgaaggttatagttaatgatcaaacattattaaatattctaatcaaaatagagcctataaagagtgggtcactccctaagagatctaaagccatgcaagtagctcatgtatggtttcaggtgagtcaacatcgctccctttggtaaaatcaaattacaactcacaatcaaaactgccacgtggtaaacatcactaggactactattatcctgatttttgcccacatgacatgggaagcccacgtggccaacatcaatgtcacgtgggagtataacttatcaacaagaaggccaagtcatctacttagcacttcagcaaatgaggggtccgagcaggactaaacattttgagaaggattgacccagacccaattaacccgaccggactccacctgatcaacccacaaatttttttaaaaaaatgttcgggcaagttaggtccaacccggtactccattaggtaggtttgcaggttaggtcttaatgttcaccaagtttcgggttagaccaaacctgctcgctaactcggtgaataatatatataattctaatttttttaattacaaccccacacccacatgccacatgaaaactttcaaaaaaaattaatttctcattaaaatttgcaaaacgataagaaccatgtcattagctttgaatgactaaatcaaagcaagaaccaaaaactaggatatccttggcatagctcagtacaactatttctcttagattctctcctttgtatttttcttgctccacccccataaatcaaagtgatttctgattcaattgactttctttcccatttctgctaccactagaatttgataccgacttcaaaagtaacatcaacatagtataataaattctctgccaattggtactctagaactgtaattttctctaaccctttcctaccataataaaggtatttcatctccccacccagagactttcttaaagacactttttctctcttactagggatagaaacaacaaaagactttgtagaccaaatcaaatgctatagaaagtaacacatttataccccagaaaaataaatcccataacattcaaagccgcaaaacaaggaaaaagaaaacagaacaataaaagaaataactgtttgacaaaataatatttgattttttgaaaagagatgattagatcaatctgttgacttggttaacctgtgacctgccaacccgtcaactagaccttttgggaactcgaaacccgcaaacatgaaactcggtcaactcgctgatgttcaaccctaggtctaagtacttaggaaagaccatgaaatgacaaaccaaccacctgtaggtcagccaacatacaccttgtaggtgcatggcttgccaacttttggcttggcaggctttcgtacgtagctatcattcttggatagcaagtcaaacaatgtattggaccttaataacccacaaaaatagagggaaaatatcagtaacttccctatttttaagggcaatttagtcatttgtattttattatttattatctaaatgaaagccttatttatctatttttaagggatattagagatttaagctctcatatataaagagcgttagtcaagccctaaaaccctaatctcaaaccctaagacttatgctctaagtctgataact

SEQ ID NO: 196549 - DNA, 1437 bp, Cannabis indica
agtttttccagattaggaagattccaaagtttcaaaacaagaagcttaggaaatcccactgaacaaacaatttcttttccgctataagaatcggcaagaaaatagagaaatttgagttctggaagataattccctagcattggcattattaggctgcctctcaatagttccgaacttgataaagtaagttcggttaggcttcctggtagatcaaaaatgatggaagatcttgttatctttcctgacaaagttaggcttgaaagctgcgtaaacttattcaaatctggcacatacagctcctggaggttgccgctttcattaatggatttcaggcttagagatcgtaactttgtaagttcttgaatgttccttgccaaatcctctcgcagccttggatccaaatggattgttagcctaagcttttgaagtttatgcaacttgggtagcgctttcaccaaagccgcgccttcttcatccacaagtgcgccagacaacttttgaagattgtttggtagagtcatacatttcattcgacagctcccattcaaatgcaggtttcgaagcttcttcaatttccatatggaacttggaagctttcgcacttgagtatgctttaggtccagagtttggagatccaacaattttcctatagttttgggtattggagaatattgtcccacatggattaaatgtgaaagtattgagccatatataagaaacatgggctactccactcattgccaattggttttgagttggaaccccatgattctcaacatggtatcagagccatatccctagcgggctttcgatccacacctatcaaagagttagccagccgcaagcgagcaaaatggtactcccagccgcgaacaagaataagcgagcaaatggaactcccagccgcaaaataaaaaaataagcgagcaaatggcactacttatgataaggtattgagccatatataagaaacatgggctactccactcattgccaattggttttgagttggaaccccatgattctcaacattggggagcttctctattttagttccatctaaggcccacgatatgtcagcttcgttagatttgctatgacgtcgggcgaactgaggcttgtagacatgttcgagatcaagaacaactaagtcaagtaggcgccctgtttcaatggctttgcataggaagttttgtatatctaaaccaggctgatctccttcgcgggtatcaaagaacgtaatagaggggggacaactttcctcaggcaaaagattggagtgatcgagacgatgaattctccgactgaaaccagtgtcttcatcatcaaatcgataagcaagtttttgttcagtagttccacacaaagaccaggaacgagctgctgtgttatttgctctgtccgccaaccagagttctcttagaatgccaggaaacc

SEQ ID NO: 196550 - DNA, 1296 bp, Cannabis indica
aaaaaaccctgatttccgcagaaaagttcttctaggacaaatcaaggcagagaggcttgtggacatgagcacagcggagatggcaagtgatgagaggcagcaacaaaataaaaagctcgaagaaaaagctttattcgattgcgagcgcggtttgcaaagagaagcaacaaccgatcaattcaagtgcggtcgttgcggtaaacggaagaccacttactaccaaatgcagacgcgaagtgcggatgaacctatgacaacctacgtaacatgtgtaaactgcaataaccgttggaagttctgttagtgtgagggagttccttttaggtgtttctgactggccattgttggtaatttgattcatctgatgatataagtggcagagctgcccccagttagatgtgtatgtcttgagtcaattttactttattagagaattatcatattgtagaatttttctatgacagcctattttattttcatctagtgttctgtaggataaatttgttcggagtatttctttttttaattgatgtatctccaaatttactacacatttctagttccatattcatgtacttaatgactaatgtttatgtggcaaacactttaatgtcgttttccgaccgataaagttgaaccgagtttcaaatactgagcttttttcatctttggtacttaaaagttgaaatcctcttgttctaatctagtattgacaaataaataataacgttcaacaatctatcaagaaaataacaccgccatctatcacagtaattaaattgtttttcttttcttattaccataataacagaaaaggggaaatagaagaagaaaacataatctacgacattaacagaccaagattgttagacaccatcaacagtagcaggagttgtagtattagtgtcacgttccctaagagcctggaaaactctagagcttctatcgaatatctgagcccttcgattgtaatcatttggttctctcccatggtcatcccccatatggcctctctctccaagcactcaagcaattccaccactcctctcccagctccgccgcacttctccttcaacctcccggatttcatccattccgccacttcttcagcgtcgtcgcccatctcgtcatcgaaatgatctgatgatctcgtcaccttttacaggtcccaaattggtggcacactcccgcagccattttcactctcgtgtttttaagtaacaattattattagaccaccacattctcgaaaaaactttacatcacggtgggcgagtacaaggctttggcagcaag

SEQ ID NO: 196551 - DNA, 974 bp, Cannabis indica
agggaagaagaatgttttcaaataatagggacaatttcgaaatcaatgcaaaaataagcataaattagttagagtgtccaactttgagtcacatttaaattaacacccacttttaagcataattatctaaatttacatcttaaatatttatccacattaattaatatgtggtaaattccaaattatacaatctaatgtatatatagagaggtttcaataataataatatataattattttttttagcttatagaatgttatttcgtaccatttagtgtttttaattatatgttttatgaagttttggatttttagcaattatcataaatttgacacgtctctttatgagaattatggtagttacaattacaataactctaaaaccattgtatttctttaggggagccactataaacctacaatggctttcaataagtcatcatgaaatcccttataagtattttagtaacttttataggtattttaaccaaaaaaaaaaactttaataagtgttattgttaatctaaatccttatcttttggtaggagtcaacactttcactactacaaaattaatatttttggttggtttaaaattttcttattatttatatattttcgtggattcaaaaaattatttactatttgaacgccataaaaatacaaaatttcaaatgactatttataacccgacaaaaaaataccaccttaaatgacaattaggcataaatttgttagcgaatcgatctaactttgaatcacccacttttagagacgaaccaacacgtcctggtggttcgcgagaaatacaacagctttgtcggctgctgaagcagaactcatcgctgtccagtgggcattgcaggtagcaaatcaaaagggtttcaaagttgtggcgtgcgcttcagatgcaaaggtgctagtttcagctctcaacaacaggaaatgcccaccgttgtggactctcaagccgtt

SEQ ID NO: 196552 - DNA, 1211 bp, Cannabis indica
gccatcccttcccatatcattggcaccaattttaagagagatcattagatgagtttgtgagctagttcaaagagaaaaagaggagagaaaagaaagttgtaatggcttgtggtgtgtttgatccttagtgccacaagtgaggtttgtgtaaattgaagcaagacttcattgagtgattctatttgagaacacattgatgtacaactgcttagtaattgattctttttagcttaataaagatcaaattcactggggttgttctggccgaggagtaggcaagtgatattacaatcacactattcgaacctcgttactttgttgcatctggttttaagttttcttgtccactgttctaagttctatttttcagttctttgtgtgtcaactaattggtcttgatcactttttttcatgtttttgtttgtcttgattgtgcatgagtttcatgatcgaactattgaccacagcaataatgtatattcattcatttgttacttactaacatataatttttagagtacataattcggcaataacaattataatgaacataaaatatgatacatatatgtaattttaaaaatttactaaataatcctttatttggttgtatacaggttcgaccacaatatttcttcaaatgaagcaatgcttcatgtagagtctcttgcacatgttgcacatgcttttttgaatgatgactatctaggtaagatattgaactactttacacattcattagtattttattatttaaatactattattagaatataattatatcaattttgtctatgactctaaaattatgtagtgtttaaaaattttctcgaactataatatttttataattatattcctacgtttaggtttgaaatttttgtactcttaaaataatatacaattaactattttaatcttaagcttaacttagttccaaaattaatcattttttgttaaagtaaattaattaaaaaatctaattttttattcatttatgaaaactctagaaattaaattaaagaaaacatatttaaaatcgaaaaaaatatttaatacttaattttttttaaaaaaaagttaaatttacttaaattaacaaacataattctttggaaaaaatatagattaattcaaattaacttgttcatatccataaattaatatttacaaataatatcattccgataaaaaaaataacaacatacaaa

SEQ ID NO: 196553 - DNA, 727 bp, Cannabis indica
catagcaattgttataattttttattctcaaaaaaagctaaaatttgaagtaatatggattatattacaaaaaaatgaagtaatatggattaaaactatatcttctttactcaatatgaattataaggttcagagtccttcctaaatacttacataacaattgttatagttttctgttctcgaaaaaaaaaatgaagtaatatggattatattgacttgattaatcatatctaattattaggtgtctctcaagtttgtatacttggctgtggggtctggtatggctgcatttctacgtaagtacataaaaagcttactctttggttagaaattttttgttatgaatgagaaaaacaaagaaaacaaaaccatttttgaactatggcagaggtggtttgttggatggttactggagaaagacaagctgcaaggataagaagtttgtatttgaaaacaatattgagacaagaaatcgggtttttcgatatggaaactagtgctggagaagttattgagagaatgtcaggtgaaactgtgcttattcaagatgcaatgggagagaaggtagtaaaatgcccacttttgtttcaatcatttcatgttaagttgaaaaagttaagatggttgtgaattcttttagttttgccccaaaattgtatgatttttttgttttgtattcatctttagatttctaaaattgaagcagatcaatagatcaaccaaatca

SEQ ID NO: 196554 - DNA, 3209 bp, Cannabis indica
gttttgtaatattttttaattagtaatttttgttaattaaaaagtgaaaatattattttaatcagtattttaggtgtctttaattttgacaaaaaaaatcactttaaaaaaatttcaaaatgctatatctttatatattaaaagtggctatgtaatgacaattcttaattcaacagtattttaattttttattttgttaaacttaacaaaaagctatccctgtcgttaactttaaaataatatatatatatatataaattaaacccttaaggtgcctttttaaaccccgactcatgtgatattttcatatcatcaccaatgtaattttcaatttcaaaattcaactgaagcaagggaatagaacatttctaagtcgataggctaattcaatggagcattcgatttttgaatcaaaatcaatcgtggaaacccaaaatatttttgtaagtactgtagtcgatagaccgattcaatggagcattcgattcttgaatcgaaatcaatcgtggaaacccaaaacattttccgcaactattgtagaaaaattggtataagtgtaagttagagaaaatagtttaaacacaactgaagcgattgaatggtgcatttcattttcgaatcagaatcgatttcaatttgttgtcaattcatcagctccgtaatggtcaattgagtcaaaaaacgatttgattgataccattgaaatacccatagaaccgttactctatatattcatgtctacgattgagcattcaattttaatttgttgtccattgattcatttgagcttcagaatggtcgatccatttgtttttacattcaggtttttgatttcatcacaagtttaatacaaagcgtttctccaacaagttgtcagcaagcttttgggaaaatttatgcgacccaaaaatttctagaaaatttcactggtgatcaggtataaattataaacaaattgatcttttaatttttatatgttaggagaagtaaagaaaggaacacaatcttattactttgcatttattgaaattagatacagttttgaactttttattctgttaaacttaatagaagactaacgctctcgttaactttaaaataatatatataaattaaaccattaagtcggcttttttaaaccgcaactcctgtgatattctcatatcatcactagtgtaatttttaatttcaaaattcaactcaagcgagggattagaagatttctaagtcaatagactgatttaatggagcatttgatttttgaatcagaatcaatcgtggaaaccccaaatattttctgcaagtattgtagtcgatagaccgattcaatggagcattccatttttgaatcagaatcaatcgtggaaattccaaatattttctacaactattgtagaaaaattggtataaggttaagttggagaaaatagtttaaacacaactgaagcgattcaattgtgcatcccattttcgaatcagaattgaattcaatttgttgtcaactgatcagctctgtaatgaacgattgaggtgaacaacgatttggttgatacgattgaaatatccacataatcgttactctatatattcatgtatacgatcgagcattcgatttttatttgttgtcgattgattcatttcagcttcagaatggtccatccctttgtttttctcattcaggtttctaatttcttcaaaaggttaatacaaaaggtttctccaacgagttgtcagcaagctttttggaaagtttatgagacccgaaaatttcaaaaaatttctccggtgatcatgtataaaatataaacaaactgatcttttactttttatatattaggagaagtaaagaaaggaaaacaatcttattactttgcatttattgaaattagatgaactgaagttcacaattattaatgggtctttttctcatttgaatgagctttggtacaaaaatatactacaatatctattcttagattctctataatggagtcttagggtgatgtgtaatccgtgaatgactctctttaccggtactgacaaataaattagttgagaattggagggacgtgtcaagttagaagatgcaagatttgacaggaaatttttgggtcatgatgtgtaagaggtattctactatcactttactaccataaaacaagatagtatattaataaggttaatattcactcctctatcctgttggtacctaagtataggaggattatgtcgtctgggccaaacctgagccaaaacttcacttataaccaaaatacaagatcttgttgatagaaggaagttagaagattaaactgttgattttttttattatggtatgtatgctttacttaccttgttattttgctaccaatctaaattacttatgtgaaattgattgataatgttatattttatatgacataatcccaaaaacgaacgacgaaattcaaagtacaatacaatttaccattcaaactgttgagtcgatggaagattaggataaagttctactatgctttgttttatttttcataggatattctatatattaagactttatttaataattcttgtcttctatttaaggtgattacgtttttttaaaaaaaaaaaaaaatcactacataatgttttctttaaattttacaaaacacatatattgctttttgaattttcctgaaacaaagaataaatgttaaagtcatatgttgttatgacttatcataaattatttcttcacattaagtatgtgtatattgatattaatatacttttattattaataacaatgtacatatcataagtttgtaaacacgactatgttttacttaccaaatacacagacacaatttatttttataaaacaaatcattcaaataagcataccactttaattaccaaaatctaaaataaaatcaaaattttaaataaaactaatatttacatggctcggcacgtaacatctgtctaatatatataaatatatgtaacactcttgaagaagaacaactctttttctttattattttttttttcacatcataccttgagtatacaaccaaggagctcttttagattcatcacaccccaagaactcacaaccaattggcgcacaatgaggggcggacgtacatgacacaatataagggccatggcccccctagaataatatatatgtgcttagatttatatatgtaaattgagttttt

SEQ ID NO: 196555 - DNA, 1011 bp, Cannabis indica
tgttctgttaccaattattactatagttaaaaggcaaaattgtaataaatgagagaaaaaaaaaacattattattattcctcaaatctttaatataaaccacacaaataatagtaatcaattatctactaacaagtaataaaaacacacatttaaagtgaacatagagtctcccatctaattaaaaatgagaaatgtttaaaaaaaatataagaaaatcaccagatattatattattatgtatataattaaatatttagtttcatttatatatatatattaaatattataaaatagtgttaactatttatgagatactataatattatagcaatattatactattgatgcctaataataataatatttgaatatacttaatagagagagaaaatgtattaaagttccataatttatttaggacacatcttatgttaaaataattatacattatggtatacaaactcaaattcaaagttaattttaatctagctaaattgatttatttatgagttgtgttgatcgattcagtttttttattctgtcccgtttacatcctgtgaagagtgataataagaaattttttagaacaattcaaaccgtaaaaataaaataaaaatatttaaaattgatgtataaagtgattttgttactcttttccctcaatatataaatatatatataaaaaataataataaatgagattattattattattcttatctgtgcatgtatattttagaccattaaatgttgtagttcttcttacccaatataatctcctgatctcagtactcataactctctttctctctttgtgacttatgagtagtcaattctttacaaagggccttttgtcactaaaattatttaaaaattatattttgtattgtggtaccacttttactcatatttatttataataacgcattccacaaaattgaccaaagtcaaagatgtctactactactactactactctcactactagcctttattattattattatta

SEQ ID NO: 196556 - DNA, 1645 bp, Cannabis indica
tttttttacttaatctccattcctatttctttgaatttttcacgcactgcatcacagtggctataatgaaataagatgattattcttgaacttggcttaacattgtttcttcaatgctgcagcaatggattgatctcgctcactatacaggactgcagtctcgggcaaaggaattaccctctttacaaaattctgattctcttagtcacgtcgcattggaaggcaataacacagaagaaaccaatatagatgagataaaaaatcaggaaggtgataatcccattttatagtagagccactagtttttttttttaattaattattttccctccttcccttcatatactaatgaaaagaggaacacgaaacgtgaaacagagcagcccttgtgttatagaactctaaatacccaatttttgtatacattcaatgcaattactccaattttgatgaaaatatatagaaagttgtatctcgctattctgttgtgtacttctgaaattttgcgcaatttaacataaattaacaaataaaaacaatattgtaatggaaactcggcagcctgtagcgcctctaacattccttggaatagtatccaccaaccaaccaagtagaacaatgattgatatggccaacaatgtttgatttaattttgagaaacgctaaatgtactccatattacactctgatatttgtatttcaccaagtcaaattctacttatgccgattgaataatttgaacaatacgatttgttttgatgagattggattgttacaaaatgatttcaagcattttaatagttatttttatttgtaatgttaataaaaaccaattaaaatcaaacatgtggatcgtgtaaaaagtcaagttgaatgtgtaaagagtggaatagagagtcaaactgttattcaaatttcaaaccataaatatttactctcacataaatcacccaaccataagaaaacaaatgtcttctttatcagttggacctgtcaaccaattcgaacaactacaatgggaaacaatatttgtttatcaaatatattttttcaaccaaatgtcgtaaatcagaatctctcatacataaattcttgtgttagtgttgcaacagttatttatcttgttcttcattcatcctatctagcagcttctgcttgaccttctgcagtgcaagttcaaggttttccagctgcatatatttaagttgtaaatatttagttttagcaaatctttaagcaaataagttatgttaagaacatagggcagttgatccatacctcttgtttggcaaatctatttcgtagaaataacccactatacaaatcaaaactatccttcatggtgttctctttctgcaaaataatttgatgttagtctcctttctacttcattgcagattttttttttttttaactatttaaatatagaaagaaagaaaaaaagaaaacacttcaatatggtcatttattataccaactggattagtgtttcaaagcctttcgtgttcataggtgtggactcaatcgccatttccgacaataccctgaaaaacatgtagatgcctgagacttgttcatgacagaatttttttattttttttcaccagtaattactgatatagggctagaaaaaaatgaagaagaa

SEQ ID NO: 196557 - DNA, 1012 bp, Cannabis indica
gatactcaatattattttcatatattatctcaacatgatatctattacgacatatatctttgaagcttaacatattcgtttttgatttggtggataatataagatatcttctataataatttttgttcctatagacatcaatataatgactcttttggagccttcaattaaatttacagtgcctaatattgtattaacatttgctttcattcttattgaatttaaaaaatatatatcgcttctaagtattgtatgagtggttgtgctatccgccaaacatatatcatcgccattatttatgaaattatgtataaaatgatagatgtccattacttcattaactaacaacaaaaaaaaaaacataataagttcaaaacataaatacttaaacaataaaagttcattacataaacatcacaaataagataaattgccttaaagtaaataaaaaataataaaaaataaaaatcaaataaaaattacaaagaagaatgattttaattgtggacattctcatctctattatcgatatttatatttctattataatgagagatcttcattaataaaaatatacaacatctaagtgcgtaatatctaaggactttttgaaaagatcatcatcttgatagacaaaatttgtttctattttctccttctctttcacaggtgcttgataaaaattaacaaggtattttactgtacgacaggtacgtgatcaatgtcctttcattccacatctgaaaaatctccataaagagtatctctctctagtttatgtctctagaaattgaagttttcagaatttagttattttttttttgtaaacattctcgtgagaataaaaatttaaagtggatgtagctctaaaattatcgcaacacaggaagtgaactactataattacttgtatgtgctctctattttacttaggtacttctaacttttatctggtttatacatacaaacgagttggcctgatttttgcatcaatactcaccaactggctcta

SEQ ID NO: 196558 - DNA, 641 bp, Cannabis indica
ttttattgggcaccaaactaaaatcgatgaaataagcctctatagactagtatctttagtttttgatttcttcccactaaaaaattaaaaataaatgtgtaaattatagtagtgtgatctctcgtagatgtcgaagtccaatataagtcatattcgtgacgaggtaacaattttttattctatctcatgtcaatggaatgttgttatttggagtagacttccagttctaagcaagttcatcttttggctagagagagattccaaactagagatagcattgcttagtttgatatttactctgcctgcttaatttgtgaagatcttgatgaatctcattatcattgatctattcccttttgtatcttcagtaaaagtaaaaattatctagttgagatggataatttgtttgtaataatatttatatcccaaatttacttaggtggattttgaagtaaatggagaagattagaaactatttcttttcaactgtcatggcagccactatttatcacatttggggctcgtttggtaggacgtatgagcatcgtattgtattaaataacaaataaaactatgtttggataaagcattatattgtatttatccttacgaccttatattttattacaatatgaatcgta

SEQ ID NO: 196559 - DNA, 906 bp, Cannabis indica
ggtcctgggtctggccctaatttttaggtgtgggtgtgtgtctgggtctgggtctgagtcccggtatgggtccaggtcccagtcttggtgtaggtcccaagtcacaggtctcggtccgggtccaagtcccggtatgggttgtggtttgagtttgggtttacgtttgggtcctattactgtcccaggtccgggttctagtcccaaacctagttcgattctcattccaggtctgggagtaggtttggatcccggtctgggttcgagtccgggcttgggtacggatccaggtctgtgcttggttacggatcttggcctcaagtccagagttggatctcaaatcttggtcttgttccagttcaggtcccgagtcttgggctaggtcctaagtttgggtttgggtccgagttcgaggttatgtctcggtagtagggtcctgggtttcgggtccagggtcgagtcccgtgtctcgagcctggggtccagttttgggtctcaatctaggttcttggccccaatttcgagtccaagtcccccatctaggtttggatcctttgtccaggtctgggtccaggttactgtttggggcccaagtcccccatcaagttccagatcctaggtccaagtctaggtccaagttcaggttcgggtttggatcttaagtttgagttcaagtctaggtccaagtacgagttaaggtttgagtgtgggtccgggccctgatctatttcaggaccctattggggtccaggtcggtttcccgatccaggtcccagtcaagctctaggtcccaaaaagttcttgtctgggtttgggttagggtttaggtccttagtttggatctaggttcaagtcttcattcggtccaggtttgggtgatgggttccgatctcaatatgggtatgggtc

SEQ ID NO: 196560 - DNA, 1036 bp, Cannabis indica
ataattctaagctctaaatacctaaattatatgttgaatctcatcaaacaaattaatatttttttattaatctcataattacttcactataaatatgaaattaaactcttagtaatgatagaattatatttattgagttttactatagtatccattgatatgatcaattccagtaattatccttctttgtgtcggtttgtaattagttttggtcaaattacatgaatggtgcggtggtggtagcatgatctagagggtggcagtctagctatggtggtggtcaggctatatatggtggtataaggaagaaagaactagtttttttttatatatagttttttatgttctaaaattatattttttttaattattttctacaatgtaaaataattttttaatcatttaaataattaaaatgagttagatcaattaaaatatgtcatatgttgttatgtacataagtgtccacgtgaacaattcatgatagcagttaatagaagaaaatagacaagatagtgaataccaaaacataattgaagtttgaaggatttaacttctaaaaatttagtaaaaatagctcagcgtactaaactttaagatttaaatagtttatagccaccaattatcttacattaaattattatatgccaaatttagcttatggtatattatgacacatttttttaacttgtaccaaatttacatatattatttaattttacctttaataaaaaacatatactaaaatataattttaataatacatagtgtcattcatgtttttggatgaaggacattccaagacagtttcaactcagatgctccaagcccaatcgtaggttcaaaccaaataatggactaaattcattagcgaagtcaagccgtccggatgttaaacagacgagtcatccagacaagatacacctctgacacatcatatctctgaatgacttcgagctgatctcttaaatgagtaattaatggacatccatatatctagctccatatcacaacaattcattaaaaaattctacaa

SEQ ID NO: 196561 - DNA, 550 bp, Cannabis indica
tttttttttttatctatggtttccttatgttttgttaaaaaattaaattttggtgaaatctacattttcaagattctttgtgattcttctgtacacggtacgatggtgggtacaatactagtgtaatttggaggttatgatcaatgaaagttcgataaggtacgaaggtggtaccataattgatactgtacgatagtagtccaataattacttaaaatttatggcataatatggaagttatggtaccacaaaccctatcttaccccactcgtaccataacctccatatcatgccataaaattataagcaactatcggaccactatcgtaacctatcgaaccttcatccctaatcttcatattacacaactattatacccaccaaaattcgattctttacctaaaataagaaaataccacaaaaaaatacaccgatcaaacatctaaacatataataataatgatttgatttttttgattttagtaaacgacatgtcgtttgattaattaagtagataataagagtgagaaagagtggaaatagagaggag

SEQ ID NO: 196562 - DNA, 793 bp, Cannabis indica
agtccaaaagagcaattaatgtaattaaagttagatactaattgatcccatgggaggatcttgtatatgaaaaaagatgtaaaataaatagtacaaaacatcaaatgattacggaattgatttataatataataataatgataataataaaaataataatgggattgaatagaaaaatgagaaccaccctcttttgaaaaggaataaaaagaaaaaggtgttgtgccttgaacgtcaaacgattctctactaacattcaaagaaacccatcaaagctctctccacaatatgagacaacaaaagcgacgtgcagatatctagaagcccaatttatataaatatatataaattaatttcttttaattagtgctcatattgctggaaactatataataatataattctttttgtaatattaataaagatattatatattatatatgccgacaaaatagttctctctttgccggattatctaatcttcttcttcattcattttgtttattagtttacgcattttccctatttacttacaacaaattataatcattattagagaaggaaggaacaaattataatcattagagaaggaaggaagtatggacaaaattaaaaaactattactattatcattaaaaagaaagaaaaaaaaacagtataaattttatgaagtttatatatataaattagaagataagacttgggttttattactattaaagataacttctatttaaatatatcatatgtgtattaattattccctactattttattccttaaatgttattat

SEQ ID NO: 196563 - DNA, 575 bp, Cannabis indica
tttatggctggtgaagctgtccccgttactgctgtaccaaccaagtagtataatccattcttgagtctacctctagctattacaagtgaacctttagagatgtttagagtgccattgtctattttgacagcataaccattgttgtcaaacacacctatagacaataagtttcttttaagatcagggacatacctcacctcttgaactgatcgagtgatgccatcgtgcattttcatgttgactgagccaatgccttgaattttacatgccttattattccctaagaggacagtacctgatgcattttcttcaaaagaagcaaacaaattcttattaggtgtcatatgaaaagaacagcccgagtctagaatccattcaccaccagtatcttcactagatgcaataagcacatcagcagagtcatatccacttgagacaatatcagcctcacctctgtctctgcttttatctcttttcaacttattctttagcaagtaacaatcatctctgaaatgtccttcctttttgcagtagtagcatttctttccaatggcatttctgttcttggaattgga

SEQ ID NO: 196564 - DNA, 1311 bp, Cannabis indica
tatacaaaatcttactcagaatccataaaggctcaattaaagcatataacgagatatcttcgttttgatttcttgcacaagaatatgttaacagcaataatgtcaaactcaagatgagtagaaataatagtttctgtcctttgatgattttataatagtcattagcaagaacacacacatataatgtaacggtggtttttttatctcttttttttttttcagagctgtggtagaccatagttttgggaaagaccttccttctgtttcggttgagagctttgagtactttcctggaaaaggtctcattgctacacttaatagccttgaggtaagtctataaagattcacacaaattcttgttggtttttcaaaatagtgacacttgtgccatttttctgtctaaatatatatggcaatgaacacatatcaatcaaccaatataaaaatataattgatagatgtgccgacatttatccattagactctgctctatttattattatgatgatgattgtttctcttgacttactttacatgttatttatttatttattcatcaagtgtttaacattcgtttcaagttattgcagatagaaaggggagattgtaaattgctgaaagtatcacttggctctgtagactttattacatcatgttgtaaatttgaaggtgattcaataaaatcaaggatgctgtgagtgcatcatcgtatggaagtgaatttgttcgtgcactttcagtcaatgaaaaggtgaggtttcaaacaagaatgctatttcagtctctttcataatgaatcaaaatgaatatacataaatctttttttttttttttcagttttactgtcttttgttatgacttgagatctttgttaaaacccaaaacatagaagaatattttagtttcatataccatatattattatttctttcttattgattattgcataatatgtattctattctgttcaggcattcgttttgatgtattgtagtgttgaattttcatcttccatttactggaaataaagtttgatatgatgaggttttgttacaactctatgctgtctatgattttgatttcaccaccgacgagaactgccagaaaagcaagattttcttcgtcgcttggtaaactctataagagttaacaatattttatattatttattaataaattaaaatatgtaagatttgatattaaattattagataaataatgttatgacgattttgtatcttgtatttgtttggaattgaataaggtcacctaacacatcaaggtgaggagtaagatggtgtatgcaagtct

SEQ ID NO: 196565 - DNA, 1826 bp, Cannabis indica
ttaaattttttaaaattttaaaactaaaatatattctctcaaatattaaaacaaataaaaactacatcaattataatttttttaatatattataaatatttatatataaaaatatatatgagtaaataaaagattggaataagtgtgtcctaattaatggcacgagtgcatatcacaatcaagtcttttccttaactaataatgttcaaagatctgaaacagtagctgcccaaaagccagacaaaacaaaacaaaacaacacaattttatttttattttttatttttatataaataaataaataataatattattaattaattaattaatgaattaaaaataaataaaaaggtaattatagagtaatatcttgctaacaacaggtgctataaaaggtcttcttcccacccaccaaaccctatgaccattagtatttcttcttaaacataaaaataattttgtccctacataattgaaatatacatatatttttatatataatttaaataaataataataataataattaatatttattttagatttcaattagtgcgacagagttcatcttcatgatcattattattcttattcaaatattcaacaccacttctattatatatatatatatatatatatcattattacattatctaactataataataaaccaatatcttccaaatttatgttatcttacttataattattcaaaacatatttatttctttatttttataattcatttcttatgattaattagtaatgcaattaggttaattatgttaaacatttggatgataacatttcctaattgtttagtttgtttaaggttgaaatatattcttcaatattgttcgtacttgggtaaattcctttggttgtaatgttgtttttaggcttattattgatgagatcatttctctgttagttgttattgtggtggttcttatcatgtcatttcgcgtgatgcaaattgtgtaattcatgcactagtaaagtctattgtaaatttattcggagttcatgtttaggcaaatacttatcttaaatttttatgtatgactcttgttacagtgaatttagttcgttaataatactactttttctttaaaaaataacatttcctaattaatatagtatactattattgttgaaaaactcactaagataaacgatattatcgaacctaataaatcaacaaacaatataaaaccgaaaacctaatctcaaacaagtctagctcaatagctacacctcttatttctttcatgcgatctattcactttctccgaaaaatgttatcttagctaatcaagtctcacgtatcataatttaaactaattaaatatacaagatctaattttaaataatactaataacactacagaatatacgacgtcagatgtgtctcgtaacataacaataatatatagcctccttctctaatttccacatcatcaccaatcttatttgataatctcaattagtggtgtggataagcatatttattaacttagattagttttttttaagagaacgtggaaggagataataaagacaaaccaatgaaagaatgtttatgtgtgattatatatataatgaggacttaaatgtaattttgagaaagtttaattaagatttcttattcataactttaatgcttgacatctgtaccattagcttataataattgaggcataatctttttgctaatgacataaatttatatatatataaaatataatttttgccctttgctatctcccaagagctatattctttttgatatatattatcatgtttaatttaattattaattaatt

SEQ ID NO: 196566 - DNA, 717 bp, Cannabis indica
gatttacatttttcctcatttttatataaagttattttattatgtactagttgtagagatcaacagctgcccatatggtcttaaaaaaagaaagaaaaaaaaaggagccagctcatttgttacatgtatgtgaacagacctaatagttcaataatgatcatcagctgcagccagttatacctttttcattaatatatcttattgtataattggttcctttgtcttttttttggtagcttttcattgttttactggaacaaatctacataataagggaatttttctatttgaattagccacattcagagaagttatgcttttaatcaacacacccaaaagttcttaaaaagaaacacgtttgtcgctactgtattcccattaaactagataaagtgatttattcttccaaatactaataataattcagtagtagaggtccagcaaagttccttagaatacaatgttcacagaaaatgaaagtattgatgtttaatttttcagaaatgatcttatgttattattgcattcaccattgatatggattgagggaactatcttttgctgagtatgcctattttagaagtgattttttcgaattatattagtctttttattaaaaggttatatatgttgttttgatcggctttgtaaatcttcactgcgatttatttatgtctcgttccctgaaagttgcaatattttatgttaaataatcat

SEQ ID NO: 196567 - DNA, 827 bp, Cannabis indica
ctacttgagaaagcttcaattagattgccattcgaatctcgaagaaggaagcccatgccaaaccgatagccccatcgacgttgatcttgaactttgtagaaacaggtgaaaattataatcaatttatttatgaaagaaactaataaattataatcaagtgaaaatttacattttaattttacaatttagaaagaaagtttcttacaatgaagagagagacttgcgaccattacaatcaatggttagcaaaattgatacaatatttgtggtagttagcttttaggctcagacttttaattttagacaaatatttattttgtgttctaaacttttattaatgcctagacttgtgtacttatcttgttgtaaactttaactttgttaatataattaaactgtattttaattttaaattaaatctttacaattataattaatttataattatttcaaaaatattaatataaatttatataattattataattaaaacaataattagaaatatgaaataataaaaaaaaaacagaactctaagcctcataattgaagacatagaacaccttgtgtgtctaattggttattccctcataactgatgacatagggttcacgttctcatatgatgcctcacttatgtcttcagttattttataataacccaagactaggtcccctttacgtcttctataacgaaattttttataactaaagataaatgatgttaaaaattgaagagaaatgtcttttttctagtagtgtacaggctgaattttttttttaatacaaaaattgcacctcgagcttactatttatttatttatttat

SEQ ID NO: 196568 - DNA, 2028 bp, Cannabis indica
ctctgtccaaagtcttttccatgatctttcatgaagaaagacagagaaagcttaaaaatcctcacagccctcttattgcatctgtccaagaaaatccttctgttgctcttgcccaaactccctcggcattagcatctaacaacaataataatggacgcaataagaaaatgagaccctactgctcaaattgccataaactagggcatttaaaggataaatgttacttccttattggatttcccctggctatggcaacaagaaaccttctgataaggaacctgctgctcataatgccactgccccatctgataaattgttgtctaatctgactaagaatgaagacattcaatctctcatttctctcctcagtcagaagctgcaacaaacccctactgaagcaccagtctttgcctcgaatatctctggtaatgcctctaactctctttgttgggtaatagacagcggtgcaactcatcacttttgtttcaacttatctctttttaccactttacatcataatgccatagctttttttgtttccctcccaaatggcaccaagatacctgttcaaaaatcagagactatttccctctttgctactttaacattgcataatgttctttatgtacctagtttccaactcaatctttttagtgtgtctagcttccttagcaatacttccaacaaaatatcatttactgatgactactgttttcttcaggattcatagaagaggaagattgggacagctaaaagatttggacatttatactttctgctgccattttccaactctagaataaactcaacatctaatcaatcatgtaattctaatttttcttggcattgtagatttggacatccgtccatatcaaccaccaatttcatcaataaaaattttcaattgagtagtcctcaaaatgttgttccttgttccatttgccatttagtaaaacaaaagtgattaccttttaattctcaaaataacattgctaattcatgcttcgacttgattcatcttgacatataaggacccttccacatacatagtattgaaggttttcgatattttctaaccattgtcgatgatcatagtcgttttacttgggtttacatgcttcaatccaagtctgatgtacaaactattattcctcaattctataacttcattcacactcaattctctgccaatattaaagcagttcggtgtgataatgcaaaagaattgaatataacacctttttaccttcaaaaaggcatacaaatctgcaactcatgtgttgaacgacctcaacaaaatttcgtagttgagagaaagcatcaacacattttaaatatggcaagagctctggcatttcaatcatccattgccttagtttattggccatatttaattcaaactgcagtatatctcattaatcgaacaccaactccattacttcagcacaaaactcctttcgacaaattgcatcttaaatcacctaactatgatcatttgagaacctttggatgccttgcttatgcctcttctttaccaagcaagcggcacaaattctctcgaagagcacatacttgtatttttattggctatcctcaaggaatgaaagcttacacactccttgatcttgccaccaacaacatctttcactctcgagatgtcatattttatgaaaccatatttcccctcaaaggctctattccaaactctcaattcaatatcctttttcccactgaatctattaataatgaccaatcttctactgctgttacaaataaaccagaaactccttctgctgtcaacaatgaaccagcacaaaatcctgcatatcacactattgttgcagccagcaagcctgcaaccactccaacttcatctgcagcacctcttcctggccttccaatcaccacagccacctcttcttcctctgaacatctcacatctacaccaacagttcatgacagcttacctactgtcaccaaaacaggtcgacatatttccaaaccgattcacctcaaagattacatatg

SEQ ID NO: 196569 - DNA, 1009 bp, Cannabis indica
ataaaaaaaatattcatgtccatcaatagtagacatgaatatttttcaaaattttttatattcaacactatttttactgaacatgagaaaggtacatgaaagacattatttttgtgagtagttaaatggtacaaatgtaataattagagcactattaatttttacatacttaataattttttacgccaatattccttatttttattattattttgtcatatatgaaaagtcaccaaaaatattgagctatcatgatattatgtattgggccaaactttaaagtaaaacccataagacttcacaccaagagacatttgtggccaaatatatggtcattatttataaaatccagaaattcgcacacatacaaaatcataaaataaaataaaggcacgactgacgagtatacgtgatagtgggatacgtccttttacatgttttttacagtcatactgtgatgagtgtaaattattatatagtaaatactaatatacgccccacacacagaccacacacacatatattgttttgtttttatgcgtgggcaaggtgagttgcgagatcttgggtgacctcatttgctaggtcaagcaatgtgtggggatctataatctcatcgtggtgcttctcatactcaaaacgccaatgcacaatgctgccttcaccctcatcagctttaggagtcacaacaagtattattttgaagctcttataatgctccataaggtccccttcaatcagcttgaaagtgatagaattcttctcatcatctatggcttccactatttgcttagatactcttctcttcccatctgaaatttgttaatcaaagttcaccacaaataaattaattcatatacactacacatttttttaataaaaaacgctagctactcttataaaattaataatttatcactatgcgtaccgcatttaatcaaattttatttgtacataaatatttttccacttgaaaaaaaaagagctttttacacctggtgcccctttt

SEQ ID NO: 196570 - DNA, 637 bp, Cannabis indica
agtttcagcatttcaccgagccaatccatgagtatagtttcgagctccgtagctgccggagacgagacccagttgagtccaacgacattgaagccagcggcgagtatttcgccgagaaacccggctgtggaggcagtgtttgggaatagagcgaaatgggtcggactttgccaatgggtcaaacccgggattatgtgtcgggttatatcatcgagaatggctttaagtggttcggggtcggttggagcggattcgggtaaacgggtttggaggtaacccggttggactttggttagaactgggtatgtttcgatgtttttgtagtaatcggctatgaaatcgattaccatgtggccttgttttcttaggtcttcggagtttagagggttattcattgttgccttttttgggtttttggagtatgagataatatataggagtatattatgcatgtatggattattagaggacagttttctttctatttatagatattttgaaatttaaatggagggctgagatcattccttctctttctattatatgttggcgtgataaaataagttgcttttattaattttttaataaataattaggtacaaggttacttatttcatatacatatctattctatata

SEQ ID NO: 196571 - DNA, 1544 bp, Cannabis indica
tatttattttattaattttcaaattttatttgatacaacagctaattcttcttcaacacaaatccaaaacttcaacctttctcttcagttaattttatttgcatttacatggtataactatagcaacaggacaacacacattttctttaagagttttacatctcaccagcagcaaatataaaggaacgctactaaacagcaacggagataacgagaaagttagagaagacctacccttgctttctgcttgttcttctattcctcctcctcttcttcttcaagccaattcacaaatagcccgaacacctttaaaaaagtttggctgcaatgttattcaaccacatttcacatcattattattattattattattattattattattattattattattattattattattaaacaaccacaaaaaaaattaaacaatcacataaatcattcatcatacctacccttggggttggttcctttgcagaaccagtaaagaatggtatcctcagcaaaaatatcctaaacatagagagatcttataatttcagagaacagtttcataaacttaccattttataaacacttttgattctatccaaaaacgaaactacaatagatatataaatatacatatatgatacaagaataaaacattaataaagaattcagttagaggatttttctttttcaaagatgaaaggttttttttggaacctgaatgttgcaaaaagcgcttgatctgagagatcagagaggatacagcagctgaagaattgcctcttctcgtgaattttataaatgtagtactctattataaattttatgtgtaatacagtacatgcatgtatatatacaatacataagaaagtgacaaataactacactatttagaatagcacacataataagttctaccacctgtacctctcatgattattcctgataacgctaaaatccccacaattcatttattgtcaagggctataaaatacattttatatataagataaatttcttacttaattataacaaaaaattcaacaataaacaaatatgattcatggttcggtgcaaaaaataaccaaattaagtacttaatagtaatttttataatttacttttttttttttgcaaaaaccaatgtcaacatacctcgtcgcaatggtatgcatatctaagctctgcagctaattggtgaagataccggttaaaatcctcccaataatgaaggttaaaaaatcaacctaccaaaatagttccaaacattgcaactaatcaaaaagtaagacaaataaaaaaaaaataaaaaataataataatttgccaaaagttgcaataaaaaaaagtaagaaatcaccaaaagttatatcttctcattagtatgaataattccaaacattacaataattctaaatgacaccaccattcaatttataaagaatttaaatataaaagttaataacatacacaatattatagaaggaattattcatatcaacaacatagaagtggcaatttcatggttcactcaaaaaaaaaaaaaa

SEQ ID NO: 196572 - DNA, 585 bp, Cannabis indica
ctcagcgttgggacactccttcctcagtcgctgcaccttaccagaatcatcaaccttgtagaactggagaagagcgagcttaaccttcttcttcttatgtttgatcttctttggcttggtataggtcttcttcttcctctttttggctcctcctctaagtctgagcaccaagtgaagagtcgactccttttggatgttgtaatcggctagggttcggccatcctctagctgctttccggcgaagatgagacgttgctggtctggtgggatgccttccttgtcctggatcttagccttgacattgtcgatggtgtcagaagactcaacctctagggttatagtcttccccgttagggttttcacgaagatctgcattgttagggttctgactctgatgaaattggaatttgaagaaagtgagatttttatagtgacgaaaattagggcatatattatcgggctgggcctttttttaaattgggctcaaaagtttattaagggcccattaaatggaaaattcttagtttccactaacgactggaaaaatgccattttaattttcgggtttttacaccatatactaaa

SEQ ID NO: 196573 - DNA, 1508 bp, Cannabis indica
ccacactaactcttatctttcctaaaaacttgactaaaaactttgattactaaataaaaaaattatgtagaggtatagaggatttttaaaatttttcctacccattgataatttactaacaaaaataagagaaaaaaaggaagagaaactgaaacaaaaatggaaaagacaaaggaaaaaagttaaaaagaatataaagaagaagaaagaaagaataatggtagtggaaaaacactactacaataaggacttttgcttcaatttttaagtgacatataaaaaatttgctttggttggggtaactgacattatagtcgtagacgcaaatagtaaatttttttgcttcggttatgagctgacgctaattatttttttgcttccgttatgaaccgaagtaaaaaaaagattttgcatcggttcataaacgaagcaaaaaaccagggcaccaatgttatttattttttgcttcgattatgaaccgaagcaaaaaaaatgataaaaagaggcggaccaccgccactatcaccaccatattcatagtagttattacgaattcctccgccaacacaacatcataaattacaaaaaaaataccaaaatgaccacaaccctttttcgaaccaccaccatagtgccatctaaagcaccgtgcatgttttcttgcaataagaaaaaaaaaattagatctaaaactatttagaaccgagatcaccaaagagaaagaaaaagtgcgagagagagagagagcatggaagatctacaccaccggagctgaaaaccaccgaagatgagagagaaagcatttgagattgaaaaagagaaagagatgtgagaaacgtacctgggtgttgtcgatcggggtctggctgttggtaggcttggttcgacgtcgtggggtgtgactagttgctaggcttggtcaccgagatggatagagagaaagagaaagagggagatagatatggatttagggtttgtaaaaatggtatatgtggtggctaaattaagtggtaggttatatatatatatctagggtttgtgaaatgttcttggtcgatctgttggtttaattttttttacgtacgagtttttgcgtcagttttagattgacgcatagttagcgtcacttctaagcggacgcaaatagtcttacaactgacgctaattttgcgtcagtgcatatactggacgcaaaattcacgagttctttaacagtattggtttttaaatttgccaatgtcaaaactgacgcaaaatctagtttttgtagtagtaaaagtgataaaaataaagtgaaaaatgaagaagaagatgaatagggcagagagaatggtaaagtaaatgaattttttttttaaaaaaaaaaataataaaaatacaaataaaaaacacaaaaacatatataagaatggttttgatcacatgactttatcattaaaacattaaaggtggagaaaaagtttttaaaaagtaaaaataatgggaaagagctagaaaagaaaaaagaa

SEQ ID NO: 196574 - DNA, 1060 bp, Cannabis indica
ttcctgaatagcgatttggggccaaagagatgaaggcgatattgataaccgctaccggtgtccctgaaggaccctgagctcaacattgatgagatcgtagtcaaggtcaaagccaaaagcgctcaatgtcgtggccagtacccatcaagtcgaaggcgccaaagttgcagaggagcaagaagagtaaaatcaattttttttacagagaaaaatttaacaacaaaacttaaaaatgaaatttgaaaaataatatttataaaataaagttttatagaattaacaataaaaaaaaaatgtaaaaacgaaaaagaattagtaaagttcggtataattgataatttctcttatttttttattgtttataattttatataataaaattagggaaattattttatatattattttttttttaaatttgtagtttgggttttaaccgtagttttttttttggtgatttttatgtgagtttttatatgggttttagttgcaatttaagttgctccgttaattgttatagaaatttttacgtgaaattctgtaaaaatacaaaaaaaaaaaaaaactttttagaaatataaaaatgaaaaaaataatccctaaaattaatcataaaaacattttttacatttttaataaaaacattaagcatcaagctttataattgtacaatattagcctacaatactaaaaattgatataaatatattacaaaattatttttatgttaaatataatacaattttacatttttaattggagatgatctaactcttgaagaacctataagtatttttaatcaactttagatttaaattatttttatttttgtagttaactttaactcaacaaaatttaatacttacaaaacttatacactgaaaaaaattacattgagatctaacgacaaaaagaagtacatatgggatacttttggcatactactctacatctacataaccgcaattatccattaaattatttttccataatttaaatcatatcactgattaatgctcatgtataatgtaaacaagtatcaataaattccaacaaaacc

SEQ ID NO: 196575 - DNA, 1585 bp, Cannabis indica
agtaataacaaaagtgattcactggcctatagctaatttatattatatcacaaacacatgatacacacattaaatatatttatatacatatatattgtgttataacatttgaagtaacatgtgtgaacctacaaatcaaagtcgtccatagagaagacagagaagacttaaccaataaataaaaaaaacatgtcggaatattcaaaaggtgaataatttaccaaaccaatttcaaaattctattcaacaataacatatgcatatgcaaatgttactttaatctttttagatttttgtctatttttaattttatatgcatatatatatttgacacgtctcctctacaagttagtaaaggagacaaaacattaaacttttagagatcatgtagtctggggcagtaaattatatccccagacgagtggtaccgatctcaaataggtatttgggtttatatcttttaacttgtatgatgatcagggcaatgcccgaatgattggcattcccatcccaaattggatattctgagatcactgatggagttggactgaccaatcaaattcaaatggttaggttgtacgaatattatgttgatctcggcgggacgatttgctatcgtctgccaccattttcgatctgtatctagttctgggttgaagggacaagttcttgtcaccgttggaccatgctagtacttgggtttagaggttaggcattcgatccagcccaatattttttttatttttatctgatctaatccgatcagtaattgaatttaaaaaattatcatctgattcgatttaattagttatcaaaatttgaattccaataaaatccaattactaattagatttgatctcattgttagcatccaattcaatcaaattgtaagaaattgaatatctttgattggattgattcgattcaaatggattattaaatgttgtccactctacttgggcctatcataatcatggatggactagctaatcttcatgggcctccctccggtgcacatgtttttgttttgagtgaaaagactaacaacacaaaccaattcactatataaaaaataaaaataaagcaaaattaattagagctcaattaaaaagagttcatattttaaattaacacatcaataattcgtacaaattaatttggtggcaattaatgtataaattatgtcatgtcatgtctggtgtgaattaaaatagaaagtgaagaaatatgatcatatattaattaataataataataataaatgaatgatattggaattattagtgatttttggtacgatcgaacgtacgtatactcttatactgcttacgtagtgcatgcatgacacacacgaatatatataatcaattattattattattattattatttaaaaagaaaaaaagaaaaagacaaacaacacactagttatacttaacatactttcatcgtttactgctaggttcgaccaaatttattaatttttatttttaattttttcaaaggaaggttggaccaaatatttacgataaaatataataataattagctgaatgagattgatatttatatataaatttatata

SEQ ID NO: 196576 - DNA, 789 bp, Cannabis indica
atgtatttttaggtgtaattggtagtgaaagttaagattaaattgaagaaatggggtccaaagcacaattttaaagaaaaattctgatatggcctcaagcaactcccactctcggtcaactctttgaccaatcgaagtcgtccatgtcctgatcgaacgaccgagcaacgtgcgtgagccacactccagacaggcgcaagtggtgcgccaaacccgcctgctgcctctcttccccgtgggacccagccgaatcagctcccacctaccagagagtgccacctcctagcccgtcagctccagcccaccaaccgcaacacgccatgtgtccctgctgagaagaaaattaaaggaaaaaatatgcaaacaaaacccaattcatatcagccgaaaattgcataaaaataccaaaaaaatctttattttctcccacactttacacttaaatatccattttactcttctcaatttatttcacctaaataaacattcttattttatttttaccctatctttttcaacactttttcatccaagcaaacatttattttttccaatattcttacacatactctatttattcattatcttcccaacactaattaaattaatcaatttatttattatattttgattaatttaatactccaattttgcctataaatatggtgttggaagaccatttcaaacacacctcctcactaccaaaacatcccttcttctcttcaaccctaaacacctcttcatttcacactcctcatatttctaccgtttccttcttaccattttttt

SEQ ID NO: 196577 - DNA, 1513 bp, Cannabis indica
ttttcacgaatgctttaaacgacgtagcattaggaggaggaggaggagatcatgagcggcgtcggcggcaatcggccgagctgatgatggaagggttgggtagagttagggttacggaaatggagctgagaaaggatccgatttgtcctgtttgtaaggaggagtttgagattggggaggaagttagagaattggcgtgtaaacatttctatcataatgattgtattcttccatggctaagactccataccacttgtccggtttgtcgttacgatattgatgaggatagtaatgatcatcgtgatgacgtgtccaatacggtgcgtttttggtggactcagttgctttctctttggccttttcgtgctttattcaatggttggagacataggatgaccttatttggttatccacatgaggatcaacaccataacctttcttcaggtacgtacttaattttttattttgtcttagaataattttatgagtaaatcaagaattaatttcagttaattatatgagtactgcccaattaatacatgtatttaattaattaattaattattaactttttgttgcagctaacaccaggtggccctcttggctcattatatgaaaaattgaaaaatatagggcgcagaaaaagatttggttattaaaatgcttatcattttagaaatcaattaattaattaattaataataatattactcaagctaactgcagccacgaaatggtttcaaattaaatttatcaggtatatatacaaaggtatgccactacatatacttattattcttttgaagacctataaaattcttgtattttgatggtaatatatttgcatatatatatatatatagatattaataataacgtatttttgtcctaggaaatatatatcatttaatttacgttcagtttagggacgatttatatcttttatatttatgcatacacatataattatattatatgttacttctttctaacgcaattttgttttgcagttctcatttaagttggagatgtgtgtagcgcatataagtatatatatgtaaaaacttaatttttatctcttttatttattgacaatgatgttgttgtaactttgataaaaatttcataaattaatattggatatacagtgatttcgttttctaacaatgatgagtaataacactcttatctctttctaagcatattcattcatattacacaatcacgtgccaccttatgggaaaatatgttattttttgaatatttttttttcttttctagttgataaaaaagttgttgttgatatatatctccaaccttcttctattataaaaatttgtgataaaaatataaaaattgacgtggttctagccttaaaagattctagtgcgagtctattagtgttgtggagcaaatttcgacaataccaattttgtgcgagtattcaagggctacttggataccaaaaataagatatgcgagtactcccttagaatagcgagtactcaaagaa

SEQ ID NO: 196578 - DNA, 786 bp, Cannabis indica
acaaattattattagtagtattactacccttataataatgtggtaactatagaagtaacatatacatgaaaaacatggtagcacatttgatccgaatggaagttggaattgaccaattaaatagctcaccaaaattgattacctcaccagcaaaatcagatggaaaaagaaaaaggaaagagaaaagatcatgttaggagattctcgtaagggaaaaataacacattgagttaattctgattgtgttgatcgatcataataaagggcaatattgtatttaataataatgtatgatgtaagatatataatgagatacgttaacagtgaagaatatcttttatatagtcctgtctctttcgaattctgtgtctttaattggtggatcccatattggtgtatctacaacattgatacgcacatgaacagcctaatctgatagattgactgattgacattgtctacaaattccacaacaaaaaggactgaaaccccttcccacggctttgacctttatatccctagctatatcattatcatcatcactactttcgatggtacacttgaatattcatggctatatataatatatattttgtgttcaaattttaatatattcatcatattctagattccatcccattttttttttgtttttatttttttttggttcatgggaaaaacatgcatgatattcaaaactactgttgcgttgaaattcacaagactcacattttttttactctgagaactaaaatcactttgcatattaataattttttatattta

SEQ ID NO: 196579 - DNA, 1993 bp, Cannabis indica
aaaagattgaactttggttaatacaagtacgcaacaagtataatcaatcaacttcacttgtctcatatagacatgtaaatagtggcagtacctgagaccatctcattaatcaaccggacgtattcataatcagtactttcatttttcggattcacataagtgagcagaaactccttgaactttttggctataaaacggcgaacttcatccctagttacccactctctgagagttccttgcacacgatacatctcaaactcgccatcttcatcatcatcatcctaagtattaataataaatgtgagcaaatatgaggaaacaaacccaaaatgataaaatggaaatttgatatgcctgtggaatggagcttaagaccacacctcaaaggggtcatcatcagtttgatcagtagttggcaaatcttccctggaatgagctctttgcgatcttcctggtgaactctgtaacccgtcagcatcagatggaggcctgaagtcagccctagccctcttggaaggtctatagctatcatcatcggtgtctgcacaaaattcaaataaattaaaggaacgacaagaaaataaagagtagaaatttacaggattttcaaagtagaagacttgactaccttgatcatgaagaaggtgaggaagcttgcgagaggtcaaacgaacatcacgagcatcaagctctgattcggcagccttacggtcagccatgatctgatcaagatccctctcatcctcaagggaatcatccagaccgacagactcataattatcgttttcgtccattcggcggtagtccctgcagaaacacaaagaacaaacaaatcaagcttccctccatgattacggaagataaagaggaataaatttattcatccagagacttactccatgaaattgtcgtgaaagagatcctcgccttcctcctcttcctcctcattagggagctcttcggggtcatcgcggatgatttcgggatcgactgcagcctcttcgtcgtcggagaaattctcggaggtccgactggtgtgaggaagttgatcggtgttgaagccgacggaggtgggagaatcgggcgtggaggggggattaccagacattttgagtgaaatggaaaaacccttgtgttgagtgtgtttgcccaactaacctatcctcgctcactgtgtaaaccctataaccccacttacacaacatctccattttggcgggaaatttttttgggcgggaaaactttattatattatttattgtaagcgcgggaaaactgtcttacttccacgtgtaatttaccccgggaggtctttattttttctgtgaacacaatcacatggtatattttatgtattaaaaaaaattgtaatttttttttttgagattaaaataaaattgtaatttacttgcgtgtgtttgtaaccactttttaatttgtttgttgttttttaatgagaaaaaaaaccatttgtgtaagaatatattttgtaaaaaattgcttttattttttatttttttataaataagtattaaaattttaagaataatgaaaaattacgtttaaaatttatttatatattttcttaaagttaattaagatttttgctcacatatacaaaatcatactccctaaactattgaaattgttagatttaaaattttttgtctaattttagtaaaaaaaaaataccatgaataaaagtttaagggcataattggttagatatcaaagtccgaggaacatttagttcataaacaatcactgagttagttaaattgaatgaaattggacaaaattctttaaaaccaacaatctcaatagttcagaaaaaaaaaaatttaattagcatgattttatacatgttaaaattctaaattcctaattaaccttttcttaaattatagtttatttgaattctttttaattaatatttggacctgaactcaaatctggctcccaatctagacctcgaataacagctcccagtcac

SEQ ID NO: 196580 - DNA, 1566 bp, Cannabis indica
caatgtccttataagctcaaaaactaatacgatgaatatataaaaatataatgctagaaaaatattaaataaaataaagaaaccctcaaagaaattatttgattttaccacactattaataaattatatataaaatatcacaataataagttttacttaatcaataataaaactgcattaaattgtaataaaactaaaaacacccacttttaatgggcaaataacaataaaacatacttataatgtggagaattatattataattaagaaaattaatttattaaatgagtataaatattataataaatatttaccataaatatccaacaattactcaaatcacatctccttttactgcacatagagagtgcgccgatccacggttccactcgccgccaccatctccggctaggactgagttcatgagaactctacccaaaatgatgatggccatgacgaacaagacaattttctatgaatttggcaccatatctaaattttttaagttttctttatgtactggaaaacttcagtaaaacagtctaataattttttaataaaaaaggatccacataaaaatatatatgaaatatgtactataatagaaaagaaaagacgataaagataatatataccatatactataacaccaagaaaaaagaatagagtttatcaaaaccaatgataaaacaataacagataattttctaaatataaatattcaagcaacattaaaaccaagttttgaatatacaataaaataccatcatcatcatcaacaaaatatttgtacctgaatttcgcagcgaatcttagagaaatagtagaatcgttttccaggcaaatgacgaaactcaccccacagtcagagtctccaccgtctcatcgttggactcgacgtagagtggcgaccatccttcactagtggcgtcgagtctccgttggccataatacaactccaactcacttgttataaactctcaccatatcagagaccagatcttcatccttctgtctctcactcttcttccttcttttgaatatgaaaggattaccgaaatgcatgtttttcctcccccgaagcctgttggacctggagaagcttcagaataacagttctcctttggtgattcagattgtatgatggtgatataatagtctatatacttgaatacacttaataatataaatgcatgaaggagggagcaacaaaagacattatcacagaaaaaatattaaaataataattaactttaaattgtgttacaaagtctaccaaataattaaataaagagttaatatttggatataattgagaagttgtaataataaatttaatcaacaatgaatcaagaaaaaaaaaaaacacacataaatattatattttacctcttaagcacatatattcaattaatgatgatgttaagatcctaaaagaaaattatatacccaaaacactgcaacaaattgagagaagaaaagaaagaggtgagattaatgactgaaaatgtaatagaataatagctagggttaattaattagtatatttatacttaatattttcta

SEQ ID NO: 196581 - DNA, 644 bp, Cannabis indica
cttgctctatgctaatcattcacctttagatgcaagcccaaagccaatgcaaaagaaaagcaaaatcattttctgccacttatttattgcatgcatacattagatgtagttaaaaagagaaaaaggtttaaaaagaaaatatagaattggaatgaagaattatgaaatctgatttttttcaataagacgtaatacgtatagggaatccctagaagttatgctaaaagttatgagaaggcatacgaataacaaagatgtacgttgaccattttatgagtgctgagaagtatcaatgccgtagtagccaacatctttcttgttcttacctctactgttatttcttttatgatttaatgtcaataaaatgctcaatgcaggcacgtttccagtcacagtatatggttctttcttacctcgacatatattctaccgttttcatgctctgtgtgcttatcttcggtgcctttttgttgcactctgcgtattagtcatgtggtcatctttcgatgtgattttagtggatcaggtttctgttatcattccattactgaagctcaaaaaatcaacaaaggtttattgctattattgtacccaatctaaatgaattttttactgagggtgtactattattgctgttttacaga

SEQ ID NO: 196582 - DNA, 1129 bp, Cannabis indica
tttaaatttgatgtatatttatgcaaaagttccattaaattattatttactttctaatttttgaattatttgcacaagtagatgaatttaattcaatttaatcctcatacaagtgcaaatatctatattttgttgatttgattaattattcgcaaaagtttcaaatttttctttctgtttgctaccattagaggtaagcgtaatactattgaatgtataatggacaacaatgatgagtggattactagacgaattcactgatttttggagcaagattttcttcgagcatcgtttgtctcaagcgcctttcttggacggcctaatccaagaccgccttactccagaagagcaagagatctggttaaactcccaacaaacattgagattcgaaacactcttttttgatggggagtcataaagctctaggtccagatggtatgtttgtgcttttctataaacactattaggacttagtgggggtgatttttgtgatgcggtgttagatttctttagatctggtattatggacaagggttttgatgctacaaacttgatgatgatcccaaaagtcactaattcctaagagggttagctacatatttctctctagaatgctacgtacaaggtcatttctaagatcattgctaataagattaaactggttcttcctcgactgattcgcccaacttaggcggcgtttgtcctcagaagaaacatccaagataacaatgtgattgtacaagaaataatccactctttcaagaaagggaaggaaggtttttttgccattaagtttgatctcgttaatgcctatgaaaaactaagctggagcttccttgacaatgtgttgcaacattttgaggcctcgacgactttttgcaactggatcaatcagtgtatctcaactttctcccttaatgtatgtctcaatggaggtcatgtaggggaaatttctcccttcttgtggaatttatctgggtgatcccctctctccttaccttttcatttggcagctaaaattctttcaagactcatagaaagctttgttgataaaggtgatatcaaaggtgttaagctgagtagaggaggccctaccataactcatgtctctttgcgagcgatattatcc

SEQ ID NO: 196583 - DNA, 992 bp, Cannabis indica
tagagataggataaatgtaagagtcgagataagacctaccactgttagtaaaaaataaggccaaatcatataaaacaaaattagtttaaggaagataatcccatattaaaactaatcatggaagtagacaagtcttccgtacctagagccttagaagtagcctctggatttgaagccagaggtgctatctgctgagatctgctctcaaaagcctagcttttcttgcctttgtcttcgccttccttggaaatctcttgaacctcgtcggacgtggattggatgttgcccaggaacctgtttagcagccccatctgtaaggtagccggttaatctacacaaaaaaaaaaaatatccatcaaacaaggccatagcaaaagatataatctttacaacaaattatcatgcaagacatcaagaagatccaaaccattaattttagaataattgactttccccttagcaaaaagagcaatgtctcttgacctaagttagtctcatgttggaagaaacctgggaagtaaattttactaaacacatccactctgaaatgatgctgcacaggtggaacaaagtggttgggactcctaatggtgcaatctacattatctatatacttactgtatgaatatctacaatgatctaaatttaagaaatgtggatcgaatccacattaatcgaaaatctttaagttagttagagtgggagccctaattatatgaaagggtgtctcaccactaccaaaggtgctcgctcttgaagtaccctcaatctgcactacctccttgaatctaatagtgagttcttcaacctcgcttaggctttctgggaattttctcctccaatccgccagccattcctcattagcttttactacctttaaggcctcttcaatagtgataagtgcaattgcctcctgaacctcatttggatcccctcgaagagcatcctggacttggtcctcacgaaaaggttggtcacgtcctggtgtggag

SEQ ID NO: 196584 - DNA, 552 bp, Cannabis indica
ttccacttctttttcaaattctatccatagaatcaattatcttcctgatctaacaaagattaacccaagagtataaaatgaaaaaaaaaaaaaaaagaaccatctttgcactacccttgccatttttgaaactctaaaaattttttaagcttctccatcgaaaaaccatcaccgaatttgctcgaaaatttgcatgccctatctgtcattgacattttttctacaagtttcattgaatttaatttttgacttcaagcattcagagggatcttcacgtcgttcgctaattcacagactgcaaagtcgttcatcatcccaaaaacctacttcaaaaagtaagtgattttctctcttcttttcatgcgagtttgttgtgttgtatttctaggtttaattaccacttcttggttagcatcgctgttatcttattggttttagcaatttttagggctgaattgtgtctgggtaaatgtttagggtttagacagtgtgtaggttttccaaagtctccaattcaccaacctctagattgataaatttcttccatgaatt

SEQ ID NO: 196585 - DNA, 828 bp, Cannabis indica
ataaaataaaataaaataagtgtgaagtgaagaaggggtttgtctataaatagagtttttagtcattcatttgttttcatcaaaagattcagtttttaattagtctttctatttttatattatggaactcatcacagcaacctctgttctctgttttctggcaatctccatactcataatctctgtaatcaaatccttcgtctcttccaaaagaaccactctcccacttccacccggtactcttggattaccatacataggagaaactttccagctttactcccaagacccaaatgtcttcttcactcaaaaacagaaaaagttcgtacctttaaatttaactcttcactctttttttattgttgtattgaaacttacttatatgattatgattattaataatgacaggtatggttccatattcaaaacccacatcttgggttgtccatgtgtgatgatttcgagtcctgaagcagttaaattcgttttaacaagaagtgaactgttcaagcccacatttccagctagtaaggagaagatcttggggaaacaagctttattcttcaaccaaggtgattaccacaacaagttgaggaagattgttctaagggctttctccccagatgccattaaattcattgtctctgatattgagaccttagctaaacactctcttcagtcaatggaaggtcgtttgatcaatacttatcaagaaatgaaaacagtcagtactctcaaacaaaaacttcaattttctttctttgtttatccaattttcatggtgaaattagtgactgatcagtgttctgttttgtgtttttttttttt

SEQ ID NO: 196586 - DNA, 2760 bp, Cannabis indica
ttgaaaaggatatatagtcgatcaagttaccaaattatttattacatataattttattataataatgaagatgggcagttaattaatgcggctgcttctgcggccacactacgttacacacgagtttacacatcatcaagtttacacatcatcaattacttttttttatttttcttattttttattaatgtattatatttaatctaactttttgctgattaattatgctttccccattttaaccttaactaaacgtcatcagtgacattttatatcatatattctacatttatatgttcttcttattgtttttctcttcctactttaattttaattttattgcaagtaattaaaatttttatttttattttttcaaaacaagctacaaatatgttaattaattttttttaacataaaattgcaattatattaactccaatcaactaataatataggagaaatttgaatatttatgtatttattggactaaaattggtccactaaaccaaaactattcaacatttgtagaataggtcaatttttactaaaacttccttttactcctctcattccaaaaagtggcttgctctctctcccttccctctgtgtctttctctcgaagtctctccaacccaccgaacccaacaccattgtaggacaattggctttaaaagtcacatcccatctgaatttaacccaactaagtacttctttcaaggaaacgaattcaacgatatgaagatccaactggtcaaacttcttcatagaaaaggcttcaatgaaacgcccacgaccatcttgagcaatccagcagtacttctcaattggaaaaatagcagtgtcacaattaaccttaatttcttcaattccttgtttcgtctattgctcaattgtgttttcatcttgaacaggtacgaccgagactaaagtctctttttgttgggcagtcatctagtgattcaggtaagtaattgcagcagaaaccactccttctgtagttgtgatcttattattccataccacatcattctgggatcgccaaacaccccattgaatcatagctaatttagataatatatccatagaatatatattgcataacctttcaaatcagcagccaaaataagtctcttcatctctaaaaaaaaaaaatccaacccacaatccaaatccttaagcaaaatagcaactcaccatattatggattatcgtttcatcttcaactttataaattgaacaaatgtcatttacattgatatttttagattgtaataaagtaagagttagaagccaattagaaatgactctccataaaaaaaattcttcactttcggaagcattttcagattccaaaatcttctccacaaaccaaaattaccctcgaaatttcacctatcattatagcaaaagtatatatgcattcttgattgtataaccaccaaaggattcatgagcgtagaatcatatatctctatccatgaaagaacccagcaaaatagtttgaataacttccacatctcgcttagcaaaaaaaaatcttctaaaatctctttatcccgctccattgaatgaactttgaataaattattcactgtgcaaccctgaagagcctcatgtgaagaaataacccaaggattatccttggaaggcaaccaaggttaattaagaacaactatagtgactcttgattcaactcttcactgagctcccatcttaaccacattttgaactttgcatacaattctccacacataactagaattcgctcccaactgagcatcaaaaaagaactttgtggataacatctaaccttaaaaatacgaccaacaaaaaaaaaatagactttgtcaacaacctccccccttattttcctagcatggccaaattaatatctctcaagtgtcaaaaactcaagccacccttatttttgtgcaagcaatgttcatcccaactcttcaaatgaatccctttaccatgggaagaattagtatgacactaaaacttttctatgagtgtatccacatccttataaatttccaaaggaataagaaagacactcatatcataagaaatgagggattagatatataattgattttaataaaatctcttttcctgttgtagacaacaacttgctatcccaactttggattattttcctcacttttacctttaagacaccaaatgctaatgacttgtttcttcccacaacatttgacaaaccaagatgctatgatcatcaaaaactcacatatgaaacatagacagaatagtaccacaaaccccttcctctattttagagcgaaagaaaattgaggatttattaaaattaacttatttcctcgaagccctttcaaacttatttagaaatttcaagacttagtcactatgacaaattaagatttttgagctaaacaaggtaagtgacaaaagttggggagttcctcacagagtatttttccaccccgaagttaacgttgagttttcttttttccaacgggtaggctcgttcaatcggccccatcacacaattttcatgtggcgaagggcccaaaatttggccaatcttcctttagagttgaaagagcttaagacctacaccaccctttctattctcactatggggggtatttttgattatattacagggaggaaatcattggagtgaaagaccaaatccgtgacacaacaaggaaaaacttttaaccctggtggaaaggatataagaaacttctaaggctccacattggtttttgtact

SEQ ID NO: 196587 - DNA, 1367 bp, Cannabis indica
attcaacttgcactaaaaacaattaacaataatgtaattttacatacatattataatagtaattatgtttatatagattgtatacacaagtggggtgtggtatgaggtgtttcaatttttttaaaaaaaattcttttttattaattaagaggaattaacaaaacatatgtaacaataaaaaatttatatatgtgtattgtattgtatttatttatttatttatttttattatgacttattttttttaaaatatttattttttaataaattaaaaattatttgagcaaattagtgggaatggcataattgtaataaaagtatgatatcatgactagttattaagtaaaattaagtcttgttgaaaagatgacatttgtcattaaattaactagagagtgcaaaagagagtgtgatagagagtgttcttagcactactctactatatattttcaacaaaatttgaaatgattttgttgatcaagaaaaacaaaagagaataataatttgagtttttatgcttacatttagttaaaaaatttcccataaacacataataactaatatttgtaagatatgacaatttttatgatatccttaaaatacctcccatttacatcaccccatttacacaattggatcccactcatcggaccccacatcggacacaatcggacacatcggactaatcggactcccccccccatcagaccctatatcggaccaatcggacccaccatcggacccatcggacatacatctcctacctcgcaaactcacagtttcattcgacccttatcggaccctatcggacctacatcagaccctatcggaccttgaccaaaatcacagatctgagattctaaaacttaaatatatccctaaatctaacaaaatctatctttaacactaaaatcacaaacaaaatcaataaaaaaaaataaaaaatggtagtggtgctttggtggtggtgcgtcgtgggtatcggggtttggcagtggttctcctccgtgcgattgaaggtcggaacggtgggtctccttcgtgcggttgtgatggtggaatgggtgggtgtgggtcggaatggtgatggtgatgtgggcaaattggggttgcgatggggagtcgagcgaagaggcaaagaaagaggttagagggaaggagagagaaacagtttgggattttgagaggggtatttttgaggtttatgtaaaatggtcatattttaacaattacccatacttttggttttcctaaccaattataccttaaaacatgcataaaaaattaaatttcccttttagaacgacatgtcactgtcttattcctctgctatatatataaatttttattgataattaaatcataaa

SEQ ID NO: 196588 - DNA, 987 bp, Cannabis indica
tggccagctggaagtatttttgtgatattgttacattttttggttgaaactgaaaaaagccctaaatttttactaaatttggctagaaaatattatatttgagcattgttattgggcactaacactttttagatgtgtgtcttgtaattggctagcaatactatctaaaaattattacattaaactatatgggatccgggcaaaagaataggaaaaattcaacttctttaaggagagatttgattggtgttttgtgaacaacatgtgagtggatcatcttctgttgcccactgtcacacatcttgattattatggttcagatcatagagctcttttagtcaatattcttgttaatatttagtcaggcggttgaaaagagaagatccttgattccgttttgaaagactatggttaaatgaggttgaatgcactgatctcattttttctagttggcaggttcataatgatgctaatccttcatccacccttgcaatgtgtttagatcgttatgcaaacaatttacaacaatggcacaaaaggaaatttgggaatttaaagcaagacatcaaacaagctcaaaataaagtcaccttgctgcataacttagattcaccaggttatgaacattcaaaccaggtgttatctgcaaaactgatactagatgaactgttagcagataaagagcaatattggcagcagcagtcaagagtggagtggctaaaatctggcgattgaccaaggaggtttgacttggaccccaccgtccaaatctgagcctgtaagtacaactgctaaccaaggttgtcgtagaagaagggaagagagaaattaggtttttgttattagtcctatttaataaatcaattaaaaagttaaatcaaaaactaaaacaagttaaaataatataaattaattagaccaacataaatgacataaatgtgtcacttatgcacacatgttcagttaattgagacaaacaaacgacac

SEQ ID NO: 196589 - DNA, 966 bp, Cannabis indica
agagagagagagagaaagaagtaagcagcttacactcctgatcgccatgagaggaccttgttcttgtaacaggcgacttcaaagcgattaccgtgcttcttgagacggacaacggcgacattggtgagcctcttttgacctacgggctgaacaagaatccgagacatgcttctcttctcttctgtgatctgctttttcacctaaccgaaaccaatcagtctcttctgtcattaaaaaccttaaacatattgtacttcaaatttggaatgattatccacaccctcaactcattaaagaattagaggctctgatctcagcaaagcaagatcagattatggaacaatctctcttgttaataagagaattttttttcagttatcaatttacaacataagaaaacagatcaaattcaagtgaagagagatggtggggttttgatggtgataaagagacccttttacatattacttctctctcacaaaaagacatattactttaagcttgaagaagaagttgttaaacacaaatccaaattgattatccatttacaacttccaactctaaatacagaatatgaacaaaacaaaaaaaaaatgataaatgacatatacatatactgatacatatatatatacaaatattgctggaaagattctcactagggagctcgagaacaaattgacagagcttttaattttggggaaattagaaagaaaatcaaccacattcaatcgaccacgtctgatatatttagagagagagagatacctggttcaccaagcggcggctagggcttgatgagagagtttttcaaagtaaggaaacctatacagaaaatcactgattttgattacttacaaagagaaaaacaaaatctttcattcaatctgaactaatcgaaaaaaattatccaatacaagtgaaaaacgaaacagaaaactcaaatcatagttcaaacaaaaagaa

SEQ ID NO: 196590 - DNA, 817 bp, Cannabis indica
tttttttttttagtattgggagctgagcccttagatccatccaaagctcgaaacgtggtccaatcatatttcagggaaaaacaccttgatgtgatttgtagccaatgagagctcgctaagtggaatcatctcagccgttgacttactctttacacatcagattggatggtgatatttatggttgggaaaaactaataaagtaaatgacgtggtcacgctttctcttctatacccttcttcttttttctttttttaatttattattacttgtttttaaaataaagggctggtaaataatatttgaattatgtattttattaaatgataaaatagattttgtattttttaaaatggtacaaattgaacgtgttagattgattttttgtcaaaataaaatttaataataatttgacgtagagatgttatagcaaaattggtaaaaatttttgtatatgttcatgtgaggaattgtcttcaagttggttattttaaaaaaattatcaaaaattgagttcagatcttatttgtaccattttaagttcattttgtcctttaactaaaacagacaaaatatagagttcaaaatagtatttatcttaaaataaaataataattggcgataaaaactttttatttttaatttttatatacttaattctcttaaatattacaattaaatacgaactggatgattattgtatacactcgtgtatacgtgaaagtaaaatctcgaagtcaatacaataataatctaattagtatttaactgtgatatttaactgtcaccttaaatttacaaagcaaaataaacataaaa

SEQ ID NO: 196591 - DNA, 1202 bp, Cannabis indica
ggagctgttggtgagctatctcaaaatatatgttgtacacacaattaggcacattagtattaacagtagaggaaattacactctatactctttttatattgttcccttttatttttaccctcttttttaaagtcaatcatttttacctctttttttaaacatttttccaattttacccctgtcacttcaagatactctctatgtgactctcttatgtcagggtattttaggtacaatacatataaaaagaagtatatttcaattaaatataaaagtagaggtaaatttaattaattgattagtaaaagtagtatttttcaatttacagtatgtatacatttatagcccatgatatgttaatcattactaatattctctttacaattattaaaccctacataatactaacaaagctaattaagatttatattctctgaactttgacatgtaccatatcatgcctcatgaacttttaaagtcgttaaaaatgtctcctgaactattaagattgttggatttaatgacttttatctaacggggcggttccaatcaaaacaaacaaatctcaaatcgaatcaaaccgatccagtagaaatttattcgaatcggatcatatccgacccacctcaatttttttttttaatatccaacaaccaaacattaattataaaaaattaatttcatgtaattgacacactatattattatttattgatgatgaatttttaaaaacgctaacattatatttagaaaattttatatttctttatacaaattttttacttttttctaaaacaaaatctataaggaaaaattgcaaaaaaaaattataaactcccccaacatcttctcttatattaaattgaataaagactatagtgaagattttgattaaaaaaaatggatttgaagatttggatcaggttggatccgacctgaattattcggatcgaatttgatacggaaaagtaactcaacaggttgaatcagcagctaattcggatcagatcataatcaaatcaaatctcatgacctgatctatttacattcctatttctagtgctaaattttctaaaaatttaaaataatcctaaatagttacaacgtatgggattattaaaaaaatattgaagtataatgcaaagaataaaaatcaattttatcttaagtacctaaaagttttacacgatgtgatagtcata

SEQ ID NO: 196592 - DNA, 1442 bp, Cannabis indica
gaagatgttccattcggctaagaatttttaagccgaaggtatcaattaaaaaggagcaatcttgatcctcgcaatgaactctgtgcagtaagtccttaggggaagatgtgccccacttgtaatgtgagcccaactccaagcaccgaactagtccgtgctcacaaaagcatactctcctgcagtagacagtctatgccacaataacccctaaatgttgcacattccagcttcggtggcataaagctcctgcatgccatatgatttaaagttgtgagttttttatctatctcccagatggaatcatttaacataggtacaggaggaggtgtcttaactttcccctttcctttggatttcacgactaccccagacggagcagccaccgggatagtctctagagcagtttctagtcgaagtacctgggcaggagcctctgccgaagccacctcctccgtaggagcagcgcttggattttccacaatatccactacctcaagatggaattcttcgttcaaatccaacactagaaaaatgaaaagaaaagaaaaaacaagcaattagacacccaacatccaaatgacaatatgggcatcggggaagacctcccataaaaattcttggagagatccctgatagacccatcactctcaaaagcatgtcttcactaggcgactcaaagtgacagatcggaaacccaggggaaaaattaccagaacatggcctaaacaaattctagaaatcaagtccattcagagtcttagcaactccaaatagatgtatggaagataaacaaacctagtactcactcaaaagttcatcctatctggttcaaaccctgactctagaatcctaaaaatatgcaaatgcctacggagttcagattgccataacctaactatctagatagaattagcactcccatcgtaaaaattccaacataatcctgtcctaaagatgtaactaccattcacacatatcaagtatcctagacctagcttgaactaagtatttctatcctagatacaaaatagcaatattcacgagcatcgggatacttacttggtatatgagtggaaaatgaaaggttattagggatatctgcccaagagttgtttacccagccaattacacggtcaaagtcggcctgagcgttaaaatctttgtcgagctgggtgtggagctgttcaaggtctaacagctttgcgtctggaaagtaggctgaactaggtttagaaagtactgaatcaagtaatcaaaaacttcttgcattcaccactggaaacggtcacaagattgggggctctggttcgaggtttgaaggtagaggatcaaaaagtctgagatggtgaaaaaagagaaaaatggatttgaagagtttatttatacttcagccaaaactgtgcaatttgaaataaatggtccaaatcctctctccaaaaagt

SEQ ID NO: 196593 - DNA, 1382 bp, Cannabis indica
ataaatattacaacaacatatattatactagttgtatatgtatttatatataatatagaagaagaagaataatagattacaaaatattacataacatatatatatatatgaagaagaaaaagacaatcattcactcacaaccttgagtgtagaatagtggagatccccatgaattgaacgaggtattgtaccaatttgtccaaaaacttatttctctctatctctaagcactaagggaactctctaggaaatagatttgaaaattatcaaactttaggattttctagcaatgtgtttttatcctaaatgagcaccgaagactttcttttataatgtttaggtgatcatacgtacatagaattcaaacacactacctcatttctctcatataaatgagtattaatatatttttaaaaactatatttcataacctttaaatcctattatcaattttgtgtaacatctcttttattacacaaaaatgtgatcaaccaaaagaagttacaaaagcaattaatcttgtaattcctctccatgttataaagtgtaggttacaattttaagttaaataattaaatcatatattatacaatttatttactaaatatttaatgtatattattctcatattaatatatattactatattttaatctacatattatattattaaataatgtaacacacacaaggaagaaaaacaattagattttcaacatttcttttccaaaacttcaagaaagtatctcaacacattctctatacttcagtgaaaatctaacattcgaagacacccaattcctatccattttaaattgttataacaattcctatccattttaaattgttataagaaacaaaacaaaatactatacacatgacattaaagtccaaatggatataggtatttcatccctaaatcaacctaaccatgaacatatgttaatcttgaaaatacacctatacatatgttatattaacatcggaaaattgcaaaaatgttatcaattcaattgaaaatagacctgtcatataaaaaaaaaaaaaaaaaaaaaaattataatttttttttttgaaatatatcaaattaaaacataaaatatatttttattggtgggacaaaaaaaatatatccttactatagtcttatccaatcctatattaaaaatttatatgtataaaatgaaatatatgtatgtgtatataacatgcgaaataaacgaatacatacactatataactataggatcgaaatacctccagccattaattttttagtttcaaacccacacaagctttaatctgtaaaggaaactggttgatgtgggtaatcatgcttcctcgctctctcagatctctttagatggaattttgctgttatg

SEQ ID NO: 196594 - DNA, 1222 bp, Cannabis indica
tttgtccctgtcacttcaatatatattactctctatgtgattcttttatgtcagggtattttcggtacaatatatatataaaaaaagtatgtttcaatcaaatataaattagagataaattggttaattaataaaataaaagagatatttttttaatttacccctatataattctatgtaattatagtttatctgtaattgatagtttgttttttttttggtaatgtaataattcttgaagatcccaaataataaatagttagtgattttgttggtgattttaaatgatattatataaatataaggatttgaacattgatggagcttaccaacaaaccatgtcaccatgttttcttaacattatgttattgaattattctaattaaattggtcttgtagatatatatatgtatatcttcatatatactataatttaatgtctacacaactagcattttcacaaaccaagtggaatagaatcaagttcatcttgataagtatctttttatctttgcccataaaaaaaaaaacaatcaaatcataagaaagaatctttaagattataatatcacatttaggaaaaacaaacacacaaagaagaataacatgttcaactcgtttttgaattgaattttaactaaggtgaagtagagagagcagaaaatatacatataattgaaataatctagaaataatattacattaatcagccttatatcttactatatattatgagggtatataccattttggttttaaaaaagggattatttcaaaaattacaaaaatatagttaaacgaaattgtaaatgattttataatttttataattttatttacagaaaatttagtattttttatatatttttatgttatacttttgttaatttattgttgattttttattatttatatgttattttattgttgttgttttgaatattattttttatattatttttatgtagttttttttttgttgttttcgtattatttttataaaatatcgtaaaaatatatatgaaaaaaatcttaaatgtaaaaatataaaattttatagaaaataatatttatataattatttctaaaaaattgtatgatcatttcatgtaataattccactcatatatacttttttttttttcgtaagcaatatcattttctcatttatattctattttgtaacaaacaactattttatacaatatattcagcaaaaaaa

SEQ ID NO: 196595 - DNA, 2283 bp, Cannabis indica
aaaaatagagaaagagtttaagatatatatttctataagaattcacttttcaatttcttatttttaaaaatattaaaaagtattacgattaaattaaaattataagtcatattgcgattatacttttatatagtctcatgatattatatttgaattatacttttacataatttcataataagcagatttttatatttacattatatatatgtgatgtggaagataaacagtgtaggcttttaatattctaatttatattttgtgttgtaatttaatttatatttgagagtgtagaatattctcagtcttggtttgtgtaaggtcagatgagtcaactaatttaacattattttcatactgttattgagtatacttttcaagcaaagtttaaattattagttaagcattcgtacgatgttcagaaatgtatcgaaagaaatatgatcatgtgtcagaaggaatgaaaaatgtattgctatttcttaagaaaatagtgcacagtacaagcaaatatatagtaaagtaaagacccattaaaggacacatgtcacctacacaaataaagtaagaaaagatacaaggaaataccataggaaatattttattgtttaacatcccccctcaaactcacggggctgggaagcacagtgagtttggttcaaagctcctgaaaccgagaggcagtgagaggcttagttaaacaatcagcaacttggtcttcggagggagtgaaacgcagctgtagaagaccattcttgactcattcacgaacaaagtggtagtcaatttcaacatgcttagtccgagcatggagaaccggattggaagcaagatggagagtactaatgttgtcacaatgaagagtaggagggacgggcagcggaaagctgagttctttgagaagtgattgaagccatgaaacttcggaggctctattggcaagagcgcgatactccgattcggtactcgatcgagatactaccttctgtttagtcgaggaccaagagatgagattgaaatcgaagtagacgtagtatgcactagtgctgcggcgatcatcgggacaggaagcccaatcagcatccgtaaagtaatgaagctcaggtgaagggtcgggttggagaagaattccaaggtgagccgtgccattgagatatcgaagaacacgtttggcagcttgatagtgagtagtggtgggtgaatgaagaaattggcataatttgtttaccgtaaaggagacatccgaccaagttaaggtgcaatattgcaatgcacctacaaggctgcgataggctgtaggatcatgaaggggttcaccgtcatacatggacaaaggtgtaagagccatcggcgtgtggacatgcttggtatcaaggaaaccggttttggtaagaagatctcggatatatttggtttgagacaagtgaatactagccggagaacgatggacttgaataccgagaaaaaaatgtaggggtccaaggtctttgacagcaaaccgtgtgtggaggaatgcaaggagtgcattaattgttgaagaagatgacccttccactataatatcatccacgtatatcaataggataatgacatcaaaaccagatctgtagatgaagagtgatgcatcggcttgggaggcaacaaaaccccaatcaaggattgctgtactaagcttgaaaaaccatgcccgtggagattgtttcaaaccataaagggacttagtgagcttgcaaacatgatgaggatggtcgggatcaacaaaaccttcgggttgagtcatgtacacagtctcggtgagatcgccatgaatgaaagcattttggatatcaatttgttcaaccacccaattcaatgaaaccgccaaggaaagaaccaaccgaatggaattcggtttaacaaccggactaaatgtttcatggaccttgagtttgatggaaacctttggccactaagcgagccttataacgttccacggacccatccgcattaagtttaatgcgatacacccacttgcagccaatgaccttgaaaccgtggggagggggaactagaatccaagttccttgagactttaaggccacaacttcggtgtccattgccgccaaccatttgggatctttgctagcctcccgaaaattagatggttccaccggaatacttgctgcaacactaaaaaacaaacggggcttatgaatgcccgatttagcacgagtaatcgataggatgcacattatatgggcaagaggaagtttcacatggaccatgtaaatctaccatcaaggg

SEQ ID NO: 196596 - DNA, 585 bp, Cannabis indica
aggtttggcagtagtgtttaatcggggaatggttgaattgagggtggtttgagcaaaacgagtcaaaagtggacaagtatttcccgtggaaaaatcagttctacacttgtcataacctattgtaggaagtttggctcctttcatccaaggtctgtagaggaaatcattatcattaccactatccatgcgctccaggaaactaatgcacttttcaaaaggatggccaagtaaactacattcaaacagaacttcgatagacgctcatatcaaaaactcatttgtaatctttgggaggcttatcattcaacctcgaggaagtggcttaacaaccgagagtttaactcaaatacgaaaaaaaaggaccccatccttcatcaagtgaatctttgtgtacttctaagaagtaaccaataagatcacccaacgcttttgccaaggccttggattttcttaagaaaggcaagcgataaatctgaactcaaaatggtgtcaagatcaaattattcattgagacattctgcagaacatctggagtgtacatcacagtaagatgattttgaatgttccaaggttctttatttagca

SEQ ID NO: 196597 - DNA, 5345 bp, Cannabis indica
ttcctccctctctctctctcatctctctatatatatatatatatatatatgtaaagtgctttccctgtaatacttcacattaaagatagtgtcggcaccagtcttttttcttatttataaatgataaaataataagtggctaccttcaccgtcgtgaattggtatccattagctagtaaatttttattagtacaaaattaaaataaggtactagttaaagttgaggttagtttaagtggccataggtgggtgtgtgttggttgaaaatcctggttcgagttcgaataaagcatgattgtaatatataaatgcttaaataaaaaaaaaattagaataagataaataattatagaaaattatagtatgcatcttctacaaatgaaaaataaaattataaaaatagtaatagttatagaacttaataaaaaagatacgaatggtaaaaagaaaaaacaaattatacaccttatatttatgtttgtattgacaaaaatttaaatcaccatgttaaaaacttaaatcttattatatgtattttattatattatgacattgtgcctttgtgtttagaacaagtttatgtatttttattgaataactattaggtgaaataagattcaattaataatctaatgtattagttattagttttaactattagtattggtgcaatttaattttttaatcatatacaatactctaatttgtatatttttttcttctcccaatataaagaaatcaggtggtggcggtcttcaccgtgcaggtcgttggccgactgggttaggagactaagaccccaaaataattccccgccaaacgtgttctttgaatttggactggtggttttgtcatagtcgacaccttctcgctgtgtgtagcctcttggctacaagtctagctttaaaggtctctacgtccccttcaacatttatattcttcttgaaaatccacttacactctatgggcgtaatatccttaggtggagtttcatattctcagactttgttggtgcgcattaaatccatttcttgatttatgacattgtttcacttgtctgagtcagggtcttccattacttctttataagtcaatggatcgtccttgtatgtgtcagagataagaacatgtgcttaatgttcatagcggacaggttgtcttacaatcctcccactacggcaatgtactggggtttcctttacaggaactgtggtaaccgttgtcagtcgttcaactaatagtgttgaaatcattagttcagaaatctgatcatttcatttcctcgataaccacttaactgtgtggtttgtgaattttcatatagtcatatttaagaaaagtagcatttgtcaatacaaatactttgttgtcttgatgactatagaaatagacaccttgagtttcatctatatcctacaaacatacacatttcagtcttaggagcaagtttcctaaacgtgggtttaaacatgagcaagacaaccccaaatataaagatgtttcaaactgggttttgtcccatttcattggagtattacttatgctctttgagggtactacattgaaaatgtaggtagctgccagaagtgcgtaattccaaaagttcagtggcattgatgagtaacacatcatcgatatgaccatgtctaacaaggcctagtttcttctctctgcaacaccgttctgctgaggtattctaggtattgtaagttgggacaagatccctaattccagtaaatagtctttgaaatcagaatctaaatactctccaccacgatctgatcaaagtatttttaataaattacccgattgcttttcagccatagccttgaagtctttgaactttccaaaagtttcagacttcttggccattaggtaagtatgattgtatctagaataatcatcaataaaagtgacaagtcataaacaccttgagctttaatattaataggtctgcacacatcaatgtgtattagcttaagttgttctttggctctattgccttttcagccagtccttatgttgcagaattcttgaagccaagtatctaaggggacaagacatcctcaagtgtaaggttaaaacgtcagaatcttggttctggaagagcgtagtgaaagcaacaagcatccttaggagaggggcatgcaaagtaattactgatggaaaagatacaaacatctgggaagacccctggatcacacatggcaaagagttctacccaaaattggctaggaacccatctcataattacactttggtgtctgagcttctaactcagtcaggtaactgggacactaacaaattgcatgacctctttaatcttgagacggttgctgccatattgaaagggggtaaacctttaggacaggggaaagatcattgggtgtggactaaagaaggaaatggtcgattctcgagcaaattggcctacttaatccagactcttcaacgataacctcactgtgaggtggccccttcgctttggaacaaactatggaacagccagattcttgagcgccacaaatttatgtggtggagcgtcctttcaaacgctctccccgtaagggctgcgttactcaaacgatttcatattgctgacagcacatgcccgatttgcggcacggaggaggaatccattgagcacctttttccttcattgtaacctggcctttcacctatggcgctcatcaccctggggcattttcccagtaactggtacagggattcgtatgtgcgactaggtgaaatttttgtggaaccttcaaagcagagacatagatgcagatgaggttttcctttatgcctccattgtaatcgacacgatttggggagtcaagaacgataaggtacataatgacaagatggataatgtgaatcaatgtattgactgtatttctcactctccgacccctcccgttgcgtgtaaacctccccccaagactggctcaagttaaactgtgatgttaaagttggaggggagcatatgtgtgttgcaattattgctagagaccacctgagtaaggtggcttgggtgcacacggccaaactggacttttctgatgctcttcgtggtgaagccgcacggtttgtttggctcttgatgtttccaaggacaaagggcttaggtttatcctggtagaaagtgattctaaggtagtgtttaattctctcaatgacttagaccctagatgggaaattgaaaaatactccttattttgtaaaagaattgcttcatcttatattacttgtttatttgtattactgctagaacctgtaactttatggcccacaatgtggtaaaatgggcttttacccataaccaatttgagtgaattgatgttgatactatccctataaacattttttgtaacgaccgagaggtctaatttttcattaatgaacgtttatcttcaaaaaaaaagaagctccaattaactagattatttattaagtctcatcaaccaaataatctttgtttattaattatatgattatttcactataaatatagaattgaactcttagtaattatataattatatttactgaattttattgtagtatccattgatataattaattccagtaattagcgctccatgtgttggttcataattagttttgttcaaattatcattttactcttctaattacttctttatcctttagtaccattaactcccttgtggaagtataatttagatcccatctaaatttgtgcacaacttttcagttctagaattaacacttaaaaagaaccaacattcgatctgttaggaaagtcaggattctataaatatagatcatattcccggccatccatattattagattcccaaaataacgaatgaatcaaagaaactaataacatgaacatgagtttatgattcctcaagatttaggctgatctactattgatcatcattatgatatgaattagatttttttagtaaacaacatgttggataaagacaacttcattcatatcaatcattgtcatatataatctctattatatacaacacattcactttgatgtcatactacatccgtaatccgaactgagcttacttggaccaaagaacgggcatcagtgaattatactagcaactattgattaaagattctataactttaatatgttgttgactgttttattcatagctaagtggtcttagttctctgtacaactacaagctacaatctcatatataaataaagaattttttgatatttcatgtaaatcattcgattataaataataatataacattcaagcttatataaaaaatcttcaactctttattaataattagaaatatctttataggtttttcagggcataaaccctaacacatgttccaattgtcttcccactaaggttcaattgaaaaccaagcacgtaactaccgatctcaactgtttttggtgcaacattgctcctgaatctttcttacatttgctggtttgttgcaacttttctcacaatgttgagaagtctttttggtgttattagggacattttagagggcctctttgcgacctggtttcaactaagtctctcttcttgggttcgtgaggaagtggagttggtgtctatgctttgttgggcattatgaaaatgtcgtgatgatttagtttggtcaagcattctgtcgtcgatggataaggtagtctcattaagcaaacatactttcaatcaataaaaatttactcaaatttactccaaaaaattttctcaatttgatatgaaatgatgagaaaggtgagcaatgggttaaatcttactttaatatgatcaaagttaatgtggatggggctattttcacccaagtgaagtgctttggctttagcttcgtggctcgagatcatgaaggaactctaatcaaagcctttcaagcatcaaaaccgagtatggtttctgctgtcatttcagaagaagtcagcatcaaaaaggcgttgagttggatcaagcaccaagattggtcaaacatagtaatggaagcggactgcattaatgttgtgcatgctattcaaagtactggtcatatgatctttccatacgacgtttaattaatgagtctaaacttttattattagaattatataatgtgtcggttaatcttgttaaacaatctgcgaataaggtgtcccaatttcttacacaatactcctattctatagctagttgtatcatgagtagggagtttataccaactgatttgttatctttgtattgaaggatatataatgaagttgtatttattttatataaaaaagataatattacaatttaaataagaatgagcaacgaagttcagacagaaggctctggtgtgttg

SEQ ID NO: 196598 - DNA, 1266 bp, Cannabis indica
acagggggaattccctccccttaatacagaccagttgaaatattagagactttaactttttttgctaatccatctgcaactgaattacaagagcaattaataaggagaagttacaaacactagaactagcactcaagtctaaaacttccaacaaaacagttaaacatgaccaatcaggggtctgctatccttcgccaaagcagtcatcaggatttgggagtcagagagaatatggatatcgttccacttactttgctttgcccactgaagagcaagcagaaccgcacgacattttgcttccaaaatagaggaagcttttcaactgttgaactttaaacgcccagaagttgtctgatcgattcacaacaaactgcagtgatacccacattaccctgaaaccaagaggcatcagcaaataacacaaaatttgcctatctccacctttgacaaggcaccatactggactctgtagttgactgagtctccacaccagagaacgaagaaaactcaataaatttggcattcaccctcgaaatgccaagctagaggttcccattcactccaccacgactgaggcaattacgttgcaaccaaacctcaaagaaaatgcatcccatgaagataaaaatatttttttctattatttagggaggaacctgccaagagaacttctgcaaatggaattattgaactgcctgggacattatcaattaagagatttgggcaccccaagaaccataatgccctcgcaaagctgcaatccttgaagagatgaagacaaagtttcctcctccgatccacataggagacattctttgtcatataggaaaggaagcttattctttttgtaggtagtgcttcatttaaacctctccaaataaggatagcaatcctcggatgtaaatctgaatgccacagccactttcatatgtctcttttaggagagaaacgttgttcttgatttacacaataagcactttcaaccgagaacttatcattcttgttaaccttccaaactaagttgatccggatgaggacttgggattgtagaaatttccaggatttgcttccccaagtcctcaccaaagatttgcaggagctccatgttccacgagctaccaatagagatgtcagcaatcgaacgagttgtgtatctattggctttaaggtcatccataaccatagtagcttaaagtcattcagatttacccaaaggatccaaggttgattccataaatcaatagactctcctcccgcaccgtagcc

SEQ ID NO: 196599 - DNA, 1010 bp, Cannabis indica
aagaaccataatgccctcgcaaagctgcaatccttgaagagatgaagacaaagtttcctcctccgatccacataggagacattctttgtcatataggaaaggaagcttatttttttttgtaggtagtgcttcatttaaacctctccaaataaggatagcaatcctcggatgtaaatctgaatgccacaaccactttcatatgtctcttttaggagagaaacgttgttcttgatttacacaataagcactttcaaccgagaacttatcattcttgttaaccttccaaataagttgattcggatgaggacttgggattctaggaatttccaggatttgcttccccaagtcctcaaccaaagatttgcaggacaagctccatgttccacgagctaccaatagagatgtcagcaatcgaacgagctgtgtatctattagctttaaggccatccataagtagcttaaagtcattcagatttatccaaaggatccaaggttgattccataaatcaatagaatctccccccgcaccgtagccaaagaaaccgaacccttggcaattacatctctgacttccaaaagaaagaatggttgctctttgctttaactgaccagaaattctcgaatcgacagtatttattaagaacatagttgacccacggtttatcaacttcctttgcaatgtaccacgccaattttgagagaagggttttattcatgtccttgaagcgtctaatgccaaggcccctgaaagttttggtgggcaaatttgatcccaagcttaagggctaggaatctatccaagttaaaaaaaagctataaaataataactctgcttcaaattttaatcttaacgaagcaaaaacaaaatgatgaaataagaattgcacattcaaattctcacgacatctttctccaaaaaagtccaacacgatgcttttcaacaatttatatttgaattataatattatatatgtgtatttaatttatatacataataataataattaaaa

SEQ ID NO: 196600 - DNA, 636 bp, Cannabis indica
ggtacactatgtttgattttaaaagctctgaccatctaactcttaaaatagcaagtcaagtttaaatttgtgcaataaagtcttcatagattcttaagtagctttgcttgtttgaatttcattgtacccttttgttttgtttgggaataataagacataaagttataataaattatattatggggttaaagtagtctgagattttaataataattttcttgttgagagtgtacttgttaaatgacacataatttaactagattaaggctcaatcagcaatgagcctttctcaccatgcagagtacagcacatttatagcgaatgagcaccagaaagaaagaatatatggttatgaaattaccaaaatacccttgttcacttctttaaaccaaagtctaaaagcgccactttttcacactacacagtacacacacaaccatttttgttgattcttcttcttctttctatctctgattaatgagtgagtaaagctttagagagagagagagagagagaaagagaagaatggagaaggctctgacaaaagtgggtagcttaaaagttggaagcttatggatttcaaagaaagcaaaggaagaactctctaatatctctgaggaaatcactgtgagtaga

SEQ ID NO: 196601 - DNA, 1088 bp, Cannabis indica
aaatagtaataattgactacaaatgattgagagaaagagaataatcaaacaaaaatattctaataaaccaaaataattaatatatattattttaatatatattaattatatgtaaaaaataaaattttaaaaattagtaaggcacgtaaagatggaaccaagaaaatctccaccactttcaacaaaccaccaaaccagccactagtaactgctgcatgcgtcctgcccattagtgactaacaagaaccaccaaaaaattgacaatcccatatttggtcacgcatcaacaaaaaacaacaatataaaaataaaatttttaaatatgaatataatttttgatagagatatgcagtgcactgaaagatctttgagaccaaatcacataaaaaaacctcaacttattgaaacaagaactttgtaaatacatactataatcataaagagaataaattttttaatggatttatgaatataataatttaagaatataaaggtaggaatgaaaaaacctggagctttgatgctatcgtagtacactttaattaaccaaaaaaacctcaatggagaccacctacaacctcaaactggatctcttcttcttcaatctcattcatccatatttaaaaacgctaagcccaatctcagattctccaaatggaaaaatagtttccaaaaatggaccacttaatgacaaaacttcaccaactgcatcgatctcaaagctcccacaaacaacatcgatcccgaagccggcagcggaaactccgcccaaatgtcttccaccgccactccgcccattatatttcaatagcaagaaaaatacaaatatcaatattatatttcaacagcaaggttagtttcagagcagtaaaaaaaatacaaaaatgaagaaatttttggcagattccaacattaaaataaaataaaaggaaaattgaaatcctaaaactaatcagaaaatacaaactaaaattcacaaattctcatttgatccaaaaaaatcttaagaacaaacacaaaataaatcaaaactttggctccgcctgtgactatcaaagaacggaccgtcggcaagatgctcgagcctc

SEQ ID NO: 196602 - DNA, 2016 bp, Cannabis indica
tacatcccgtgagtcactgagacccaacaaggaaggtgaataattttataagtaacataacattcatttagtcacactataacatgcttaatccatctcacaacctcataatcacacaattcccggtacttcataaagtacccttaccagtcgttaaccacgagctacatatgtctctatcgttgcccgatacagcaaacgataagtaagaaacctatctgcagtttcaagagtaattactcataacggtaatgaccatttcttttacttgatcataatcgagtcactacgataataatcgtttcatatcatttccctcgatcataatcgagtcgcaacgataataatcatttcctattatttccctcgatcataaccgagtcataacaaatacatactggaatcttgatcataattaagactgtaacaaccataacgttaaccatatacggtgcttaatacttttcttacctcaatccagtagtcaagtatgcgggccgacctcagtggaactacgctcgacgatcccgggtcctatatcacgacaacgaagctcaataaacaacttattacaaactttggaataaccctaacttcgcaatcggacatattctaactctccactggttcaaaatagcttatacgttactaaaatactcaaatctagtctctgaaaaacaccccgaacaaaactggtttcgaggctacaaaccaaagttttcttcccctgctaccaaaaccggttcaccggtttcactgcacctgtgaaaccggtttaccagttttccctactgcagaaacgggaaaaacttggtttttgctccaaaacaaaaccaaaactcctccaaacctaatgaaaccttccagaacagtataatcccaccaaaataatataaccaaaacatcaattcacaatatttcatcaaattatgcaaaacaccatgttagaaccaaaaatcaagtttctaacttaaaattgttaactacaactctagcagccacttgaattacataatctaagctcaagcatactttaaatcggacctgaaaacttatccttaattcactttaatcctacagtcacaacatcataaaaccctagcctaaaaccaacctaacaactagaaaatcaaatccataaggcatgaaacttaccccaaggcttctaggccgaaattggatgaagatgtgataaaaatcaaagtgaataggtgataatttcctctagttcttggctggtttcttggctgctcgaagggaaagagtaagaggatgagttgaagtcttcctaactcttttaactctttttcgaacttttactataataactatttttttaaacttaatattattaataaaagattagccactaactcaagtaaaacaaaataaacatctaatattcacaaataaccattttacccgttaagtaacctttaaacttaaaacacacctaggggtagtttggtaattctaaatcaacaaccatacactcaaaactagtctggtataatttccatttcgatccatattttttttcgtgacatttccgaccactccgttgagttctcacggtcacgggcccaaaaatattttatttcaaaaatggtatctacaatacccacataatccaatatagtctcagtaattaataaattacgctttattaactactattaaatttttcactaattatcacacaattagccaaagtaagatcataatcttaccccaacatcaatacaatcacatatttaataaaatatgcccaattaattatcataatagtttttaggatattacagcttaggtagcttaggtttaggaaaataattttggcccaataaatacatagttaatcatttttttatttatttaaatcacttattcaaattaaattaaataataactataattataatttaaattattaattttacactaatttatgttggttaattctttctcttaatttaaaaagaaaaaaaattagtaaagtattataaaatggtacca

SEQ ID NO: 196603 - DNA, 594 bp, Cannabis indica
agagagagagagagacgccatagttgactttaggattacttaataaagtatatttatatgtatcgatgatataatgcacaaattagtattgtcgattaatttaatgtcacaaaaaagaatgcgataaccacccagagcactcccaatataagtgatcagttatatatatgtttatgtataaaaaaagaaaaatgataaaaatgagctctgagtacgtacgtaacctaagttaaggtattttacgcacgtcacaaattattttaactaattaagtggatttatctaaaatagatacgattgattaacttttcttaaccagatatataagtgtgtaatattaacttataaaaactgtgtggacatgtatcattattttgaagaatagagaagatttgtttaatacggattgttgaaaattattgttaatatgcatagctgattctaatcctcgaatattgttaaaccataaaagaattcatttgttatttccttgtattattttttgtattatttgtgacatgtgtctcccaatgtgtctttattttgctataaatattcttgtagtgtgtgctcttttccttgaggattagcagg

SEQ ID NO: 196604 - DNA, 3031 bp, Cannabis indica
  modified_base (78)..(78): a, c, t, g, unknown or other
ggagaaaagctatcttgccaagaggatagaattttccagagtttgtccttaatatcagcaagaaaagtttgttgtctntcccagagtaagaggtaagcctagtaacattcatggcatggtgaattggcatgtccgaatttattggaaagtcgcttgaacttgtggaatcgtgtttggagaaaaggagaggacagattttgctgcattgagttgttgaccagaggcacggtagtaagttgttagagaacgtcgaatagctttagcagaatggacattggctttgcaaagaactagactgtcatcagcaaaaaataagtgtgaaattggtggtgccccccgtgcaacacatagacccgagagattgccattgcgttcttcaaactaaaacaatcgagagagtccttcagcacatatgatgaataaatatggtgataatgggtcaccttgacgtatgcctctagttggaaccaaatctccatgagttgaaccattgatgagaaaggaatatgatacactagaaatgcagcgataaatcagattaacaatggagagaggaaaccccatagcaagtaacatcctatagacaaaatgccattccaccctgtcaaatgccttactcatatccaacttaatggccgagtagccttctttccctcttttcaagtgtttcagcgagtgaattaattcgaaagcaaccaatactttatccgttattaacttggaagagagaaatgcactttatgaatccgagatgacttgggaaagatacggtttcagtctcaaaataatagacttggacacaagtttataaagaacattacagagacttatgggtcgcagctgagtcatattgattggctttttgaccttaggaatgagtgtaataagtgtttgattgaaacttgtagggtcaccaccttcattgagaactttgagaactgaacgagtaactagatcaccaataatgccccaatagtttgtgtaaaacatgacaaacatgccatcaattcccaggctgccatccgaattcattgactttaaagcttcataaatatctgcagcagtaaaaggctgagtgatagctctattatcagactcagtgatggtacatgggactttggagaagacagattgtaaggcttcattatctacaccatcagtagtgtaaatgtttcgaaaataggactgtacaacattggcaattgcagcttgagaattatgttccacaccatgatcatccattaattttttgatggcattattcttctttcgactattggccttttgatgaaaaaactttgtattggaatcccctgacttcagccaatttatgcgtgatctttgtttccaataatcctcttcttgtgctaagagttcatcaagtatatcttcacaatgttttagctcttcaaagtgatcaaaagtagtaagattggaattttgaagagtagaaactttatgatgagtactgtgaatcttcttttgcaacccaccaaacttagttcgatgccacgatagaagatgggatgagcaggaagacagattattcttaatctggagaataggatctgatgatgcattagtccaatgtttgttgataatgtccaaggcctcttcctcattcagccaaattttttcaaagtgaaaccgtgatttatattgtctatgagttcctccagctacactgccaacggaaaccagcaaggctctatgatcagattttaaaaaatccaagtgactgacctcattcgcaccaaagtcagggagccaagtattattgataaaagcatagtcaagcctctctttgacattagtgccattaacactattattgtgccaggtataacgagccaggacatcaacggagcagtgtctttcaaacgcttcaaaatctgccatgtgaatggtctttgagaagtggcaggtgctccataaaaacccaagaaatgaaaaacaggaccatcagtagtcgaaacataacaatcaataaagtttataccataattcagaacatttacatttacatcagctttctatagtaacagtaaactcccactaagaccaactctaggaacttctaacccattagaaaaattaaacttagtacgaaatttagaaatagcacctatattaagcttagattccataataaatagtacatcaggtaactgcttagagatgagcaaacgaagctgtcttaatgcacgggggctggccaaacctcgtgcattccaactaatgagattcatgatgattggcgaggctgtgaaccagccttcgccaagagagcaccatcatcctcctccactagtgagagtgtagataagtcagaaatgggttctggttgttggtgcagagttgtgttggtaacatccgtgagtgtagagtccctggttcgacatctttttaacacttgccttatgttcccaccttgattgaccatttgacgttttgtgaaagtggaaggtagttttgctgcattggttaagttagcatccagagatgttgctgcagaattgcaatgtatgtatgcaggaggggtggccacaggtacaataattgctttttgtggtaaataaccagggggaaattccttagaacgatcaatagctggtaatgcagtaaaagggttgctagattgcccaatatcttaattgattggtgtattagttttgcccaaattaagatcatcaacagcaatacctttacccttgaaatcaatagtccaatttgcaccaggcacatccaaatttgctcttgaatctgcagtggaaagtgttttggcatgcggtgaaccagaagtagcaatcgcaacattgagagttggcattcactgatgttgaagttgagtaacagatgctagaagaccagtagatggaaatcatttcccttgatcagatgtatgatctttgtcaaagtaagatcatcaatagcaacacttttacccttaagatcacttgtataatttgtatctgacttatcataattcactccttgagatgatgcagcagaaattgaattggcatgtgag

SEQ ID NO: 196605 - DNA, 816 bp, Cannabis indica
aaatttttctactaaaaatactaaaataataaattagtactaaaactaagcaaaatgaatgaaacaaacaaaatataagaaaataaacctaaaagactctaacctagctaacataaatttaaaaagtaatgttgaaaaaactaattctattttatagttatcaatttttgtaaataaaaattttaaaaatataaataaaacacaaaagaatatatatgtttttaaaaattttcctttattcgaaaactgatataatacttaattgtaagttgctttattttatggtgtaagtatttttttaatcaactaaaaatattcttatttattgacaattatgtaaaggatatatccagcttcttaatttttgtattttttttaaatgccataattactatggtcactaataaatctatggttatttatatatactcgttaaaatccaaagtaaatttaggtggggcaaaaataaaaataaaaaattaaaagaaggcattgcaggctcatttattcgaattgaataagttatcaatatatatacaaaatgtgtagtagctacttgtgaataatagataataatatcatatatccagagatatagaattaatttgagacagtactggaattaaagttggaacagagaatattaatttctggtctaataatcaatcaatgctaattttatttattgatgaatcaatattagttattgtgagtattattatggtataggtgttagaactgttaaatttgtttaaaatttcatgaacttcttaggttttattagcaactgtggttctcatttcaaattaattattc

SEQ ID NO: 196606 - DNA, 1432 bp, Cannabis indica
aaaaaaaaaaaaaagatattcctttaaaatatggagtaaaaaaatcttccaccctatttcctattttatgctttttatgtatatatattgttagttacgaatgtcttaccttatgtcgagatttaacatttatttattttttttttaaaaaataaaacgtttatagatagaaaaactaaaacatagcaattgaactttatggtcattataaacaatgttgtttggtatagaagacaaatcaattaagccagtaatacctttggtaaatgcttacttaattacattataggctgtaaagttataagttcataaaacaaaagaaaaattacaacttatcaaaaggttagagagtattttacattgattcacatagttattaatattcaagtagaatatgttcctttagcgtcttgataattgtctccgaatcactctttattaccacatattgatgcttcaacgaaacaaccgtttccatatttaacagacatgctacaacttctctaatgagagaatcaaagaaattgagcatgtttgacgctacttacaaaattgtctcaagtgatctctaactaaggccaccgtatacattgaaccttcaccaattttaacatcactgttgattttgattcaatcgtccgggaggggctgattgggggacacaacaaccttcatcaaggcaaaacatacaagactcataatctatgtaacaaatagagattgaatcaacattaacattcattgtctaaactttgttattttattttcgaaaaaacatattttccactctcatttttcatctcttttgatctctttatatttgaaataaataaggaatatttatattaagagaagtagttgtaggtaaaataaggtcaactttcctttaatgagcatttgtatacaaatttaaagacgtggaggcaaaaatatactacgtacagaagttactaattattcttgttttgtcaattaattggaattaaatttatgttaaatacttttctgaaatagcccatgtgatgcatgatcatactttgagggcaaagtgtcctagggagtatatagataatgtgtagaaatttaataccatatataagatgttgagtgagtacttcttttattgtcaatttattttgaaatagaactttatagaccctactatacttaccttcatcctaattcaaaaagtaaagccaaaaagaacagctgtaagccacttgtaattgagctgtccaaaattagtaataaagaaaatattcaccatctttagagggaatgttaaagagtgtattcatatataagatgtatgagttattttatttattttttttattgtcaattaatttctctcattattaactaattttaagatggaacttcatacattttaatatacactcacattcatcttactttctttttttttttt

SEQ ID NO: 196607 - DNA, 725 bp, Cannabis indica
gatatacaagcccttatccaactcgtaaaaggtttggagaaacccatttgatcaagaacgacaataatgaaatcccaatctagtttatcataagccttttccatgtcaatcttgatcatcatgaagcccctctttccttttttcttcttcattgagtgaactacctctcttgcgatcattgtgttctctgctatgcatcttcttttaacaaacgcagcttgtgttggcaatatcagttttggaagaattccctgcatccttgtggcaatgatcttggatattactttataggccacattgcatagagcgattggccggtagtcttttgtgtaaacaggggtgtccttcttcgggatgagaacaattgcagtgtcgtttatgaaataaggaagctcagtatgggtgaagaagtgaattaccatttcttggaggtcactgttgattgtatcccaatgatgagaataaaagcttgctgggagtccatctggtcctggagctttatccttccccatttcagatattgccgcaatcacctcctccgagtttgggatagcatttagcatcaagttttcttcaggagtaatggatttggggaatagatcattaagatgtggagtgcgacaggttggatctttcctaaagagatcatggaagttttttagaaaacagtcagcgatttccttctgatctcgtatccaatgccctttttcagcatccttgatgca

SEQ ID NO: 196608 - DNA, 1477 bp, Cannabis indica
gatagatacatgatgatggtgtacgccatctcctcaatttctacaatttcctctggtttcttctcgaccaaaagtttctcatctccaagaaccttagataccttctggtacattaggattccttttaaaatttctttccatagggaaaagtcttctgttccatcgaatttctccaattcaaaatcttttcattgatgacatataagtttttccaagaattgcagcaaaacaaaacttaattttgcattcttgatcgattaccaagctccgatttgtgagaaaattacaactaatggtgcagagtcaaaacgactgaactttaaataatcaaacaattagcaatgacaaaattaacaaaaagaagcagttttcggaggaaaaatagggatgaacagagtatgaaaaaccaaaaaacaattaaagcaaagaaatcaacaccaaaatatatacgggttcaagtttgatagatcgatgtgattatggctctactctagttctgaaacaccaccaaatcctctttattgattgagcaagaacaagtacagtacagtcgagatcgattctctgatgagttctctcaaagtatctcaactctcacacttacccaagaatcttcttcatctacagaagattcttcatataaatctcaaacccaatccctctcttttctttgtatgtttctctctcttcctctcaatcttttctctctatctctcaactcaatctgatcttcatgtttgaaatgataagtgttggtggtatttatagacttaggataacgatcctaaagttggtggctgcgagaaattaggttgttaagttagttgggcaataacaaacttaaccaactcccctttgagtgagatctccacatcagcataagcgaatgtgcttctaagagcaagcatgagagcttccagaaacacagaccaatactcgctgaaggagcatccagataagaaagagccaactggagtcgactatttgagactcccttctaggaggtacaacttaccattcggaactcctttcaagaggatgaatagctttccggaaggtactacacccggagtggacatgatggtcatcctgaaactcccttccggatggcaaccatcattccacgagacttcttctagatggacaagtaagatgtctaggaacatactttcaggagacatataacttttcagtaataatttttggatacctttttatttggaggaactacaccacaaattcttttaaacattttaattaaggacaacaaattataatgcttagcaaagtatgtaatttttaatgtcaagatataagtatatataatgatattttcctcggatatccctgaaggtactatgctgatattttgacgaaaaatattaagagatactttaagatgttaagtaccacaaacaatgacatattgttcttagtacaattcaatatcgaagttcacatattttaatttaataaa

SEQ ID NO: 196609 - DNA, 1002 bp, Cannabis indica
ctttctcattcttattcgattcatttcaactaaacgtcatcttaggttgtgtttggttagaggtaataaaatagaatagaggaatgactattttatttgtaagatggaaaaaaaaaaaggaccaaatctaatgcaagattgatttattttttttttactatttttaaattttatttccattctatcttttcatccattctaatgtcattctcattcttatattttcatccattctaaccaaaaacaaccttaaattatttatcaatttaggttaaagcattagctgctagggtatacatacagaaatttatagttctcactacaaaattaatgtaacacatatatctatatgtgcataataattgggttaacctgttttaataattgtttttttttgttgaataattgttttgttgcttttattcaatgtagatggcttcattaggactatcacacaaagatgtttgaaaatatatattacaatgaatttaagtcactacacttattactaattgttggtttggtttgtttagataaaaacgatcgatcataactctcaacatgataatattaagagcctaattttatactatatcaaacactgaatatatatatatatataaagatgatttcaaaaaatatatatagagatatatattgatagtactacatgatcatcagatttatgaccattaattaatagaactacatattaaatcattctctattaaaaatttagcaaaagtaatataagcataccacatgattttctaattagctttttgtataaattttatagaagagatggactgctccaagaataatcgataaagctcttgaatatattccagagttagagaatgaaatagaagaattgatcactctaaagaagaagaccctatcagctgttgaaaatataccaatagtagaagttgttaaccaaaagaatagtagtagtgctacattgacttcaccagtcaataattctctcacagtttcagt

SEQ ID NO: 196610 - DNA, 2528 bp, Cannabis indica
taccaatccagttcttgaagaacatgagcattacctgcataacagaaatcgagattctacataatacgctgaactggatgaccccaattgcaaccttccttaacacaggtgagctaccaagtgacaaaaataaaactcaaaaaatgcaaaggaaagtagtgcgatatctaattatggatgaagtgatgtacaggagaggcttctctgtgcttttgctagggtgtgttactaaagaagaggatgcgcggttgtcaactaaagttcacgaagggttttgtgataatcattctaggggcaacaatcacttcaaagaaagtgctagattttgtggtaaaacatataatattctggttcagacttcctcataaaattgtttcagacagtgggaagcaagttgatagccaactgtttacagacttctacatagagcaaggaatcatcaaaagctttttggtagttgcacgccctcaagataatggccaggtcgaagcagttaataaaactctcaaggacaccttgaaaaaaaggcacaaaaaagctaagggtaattggcctgaagtactttggtcgtaccgaataatagaaagggctgccattagataaatcctattttccatggcatacgactatgaagcaatgttgcccgtggaattagatcctctatcccacagaaggatgacatacgatcatgaaacaaaccatgctcttttgacagaatcacttgatgaaattgaagaatgaaatgacctggcaaacctaaagttaaatgctaataagaaaaaagtagctcgacacttcaacaagcaagtgagagagagaaagttcttcgtaggagatatgatgctcaaacgagtatctttaaactccaaagatagtgcaacagacatactcaagcctaattgggaaagcccgtatcagtaactgaagttacaaaattaggagcatataagcttggtcggtataatgaaaatatggagctgattttggtaccaaggtactggaacggtgaatttttaagaagatactaccaatgaaacatcactcctaagtaagttgattagtctatgattaatcgctaaagtaagttaattttgtttataatcagtcttgtggtgatgttgtgctttttgaagctcccttgttgttctttgtattgtgcacaaaatctttgaatatgtcatgaccttccacaaaagtaacactttctagaatcttttcctcgagattatatctcgaaattgaatgtgaatgactccttgagtggttctttgttggtgtttatcctctggcaaagtatgattcctctttcttagtttctttctccaattgcaattcaaagtccttagacttcaaagctctaagaatatctcttagagatataacatctctgtcatatttaatggtagccttcacaattaggagtgatctaagaaagataatatcttgactcttctcatcaactttgtgattaatgttggcaagacctagaatgattttattaaacttatcaatgttatcatctaaagaaaaagaagaaatcattctaaaaccaaataattgctaaagtaagttgatcttgctagagatagaaggtttcaaatatagctcttcaagcttttcccatattccttttgttgtaacaatgttggtcaatttcttccttacgttgttggaaagatgcattatgatggtgtagtatgccatctcctctatttcaacaacttcttcatctttcttctctgatagtaacttggcatctccaagtactttagcaattttttggtgaaccagaattccctttaagctccctctccataaggcaaagtaccatatttcattgaatttctctaatttgaacttggccattgttgacacgaattcttgaatctctttatttaatcaatcttgccacgaatgaatcaaaaccttgagtaatctattcttagagcgatgaacctagctttgctttgtaggattttcaactttgattagttggaattataaacatgaaacttaaaatgtaatgattagtgaactcaaaataaagcacaattcaaaatatcaacaatggcaaacaatcaaacatacaatggatataaaagaactataaagatcaatctataaaacatagaaacattggttcagatcctaagtttgatgtaaacttggtcctacttcaacttggaactcgatctcacatttcttattgatcaacaacaaattgagtacgtcacagttgagtatggattctcaatcttgagtcttcacaagtgtttcattctcacactctctcaccctagcatacacattcagacgtttgtgtatctcattacaaaatcctttccctttggaatcccaactctttcatagctaatcttcttgcacactttctagatttgtgcttctatcgagttctgaaaagtgttttgaataataaagaagacttaccttatataggcagctaagcaagtatgtaattgattcaagaaaagttagttagagcattcttggataataacatgggtaat

SEQ ID NO: 196611 - DNA, 572 bp, Cannabis indica
aaaattaggattccaaatttatcagattaaatagaaattctcattatgttgtattacgggcttcatgtttaatttatttatttctctcatttttgttcaatgtatatatgtgtaaaaataaatatgacttgttggacatttttttgttgcatgtttctttgatttgatcaactaaaacccaacagcttgactcctgttattttagggaatagttttgcttaattaactatagtccctccattagtgaggtacattgcaattaacattttttgggttaatccgatctaacacacaaaccaataaataaaattatattttattgtaaaaggatatgaattttttgttcttaagctaaaataatttgaaaaatcttaattaatagcattgattcaattaccaaatcttattatgggatcgaaaatctcaactgttgtaacataagctaaactctaatatattgactcgtagactaaagttaaactgagctgattttactaaataaacatttacctaaaaataattatattaacttggcatttaatttaacacaattattttctaataaataaaaa

SEQ ID NO: 196612 - DNA, 2101 bp, Cannabis indica
taaagcttgttcttttaaagagagaatatcatttacaattttacaatattaataattaatattttcttcaaataaaaaatatatatttatatatttttttattacgggagccccaaaaaaaaaggccagatatttatttatttatttgactaaatatatattttcttgaaaagtcttaaatttaaaaaaaaaaatcacgaaaggttaagtctgttaatttattactcatcatttaataaaaaatcttcaatttacgtacactattatctttatttttcagatattataaattatatatcatcttttaaattcaaatatacaatatataatatcatatcttttatatatactaatccaattaagattaggagtgaaatattatgtatatatatgtgtatcaaactaaatattaattttacaaaacaattatatattattttctttgaggatcgatcgatcatcatataatataatattaatatcaaacacatcaacaaataattaatttgcaacgttcaataaatatggcaataatagataataatgttacatggaaatttgaatggaattttgtgagcataacagccatagttttagtaatattcatggttatgtccatggtggtatcaaccttttggttttgttggttgtattaccgcgaccacgacaatgagggtgatgatgctcgtgacggtgacaatgagggtcccgatgcttatcacggggacaatgacgatgataatcgtcgtcgtcatcatcaacatgaacttatttcgatagtagttattgataatgtgaatcaaaatgtgatcaaagaggaacgtaaagaagataaatgcgtaatttgtctcgaaagtttattcaaaatcgatgatgattcaacaataggtcaagtggttgttgagtcgaaacaatgcaatcatgtattccaccaaacttgtattactaattggactcgagtccacaaaacatgtcccatttgtcgtctcccattgcattatttgcacaccgtgtcctctgaagtcactgcaaaacctgtcgatcgtgctgtagagaatatagtttaattctacaaaatcatatttttttaatcttgtttttaagctaatctcgcggtagattactattttcaaaatattttttttaaatcaatgtaattctcaataattaaaagtattgtacctttgaatacaaatttgatcaaaatacaaattttgcggcagtattcaatatgtagtggtagaaaatctcattttaatcaattgtcaacttctactttttttaattttttattaataatattaaaactgtgcctataaaatactttcaacaacttcaaaaagttttactaccaaaattattactttaatgataatcaaactatgtataagtgcaagaagagtaaatactcaccaagaacattctctgtattaaatacactcataaatatacagactcgtggactaaggctcattaacgcttcaactacgtaaaaatccttctcttaatttcttacagctctttaatctttttttattttattggttgccgaaaacctcggtcaacatcgttattaatgtaattaaatattaagtctcatataattttaaaagataacttttaagaatattactaaccaagtataaaacgctacctataaaaagtactagacactattagaattgagagttttaaattatgttttctcattctcatgagctcataagataccatatgagaattgaatgtaatggtgaattattactgttcttagataattaactacaattacaaacttgtgtaaaataaattacttcatataattactattaaatatctaaacagtattttaaaataaataataattacatattcccaaatatttacacaaccacttccgatcacatttcaaaacagatttgatataactatttatttaatttttgaaagaaacatgtcctataattagatagaaaaaaaattaaaaaaataaataaaaaagcttatgtattaaattgtgaaagtgctaatctaaagatgtaatgcccacaaagcaccgtccattttgtcaaaatcagcactaaaatccatattttcattt

SEQ ID NO: 196613 - DNA, 3490 bp, Cannabis indica
gacagatcaggtcttattatcgttaagtattagcaacttacaacgatacttcatgtagatagtaggatcagcaagcttatcatcaccatcctggctacaatttttaattaatctccataggtgtacttgcggatttacatcccaagtatcctaagtcttaccaaaattacaaggtataaggtctttgagaaacaaaattcatttgtttgagcttgcaggctaagaagtatttgagttctccaagattcttcatcttgaacctatcatttagctttactttcaaagcttctaaatccttgatattgttactagctaaaataacatcatccacatagactagtatcaatattaaatgcactccattatgtctaataaacaaggattgatctatggtagaatgcttgaaaccttcctcaatgagagttgttgagaattttttaaaccattgccttgaagcttgtttgagaccaaataagaatttttgaagtttacaaacaacttgaggtagtagctctcccttaggactatacccttgaggtatagtcataaacacatcctcatgtaaatcatcatgaaagaacgcattattcgcatctaatttgtgtaaaaaccaacctttgatagtagcaggagcgaaaattaatttgacaaaaaccaacttaacaactggagcaaaagtttctgtgtaatcaactccttcttgttgattgtatcctttagccacaagtttggctttgtatctttcaatagtcccatctgcattatatttcactttgtaaacccatctacatctaatagcatgttgatgagtaggtagagtaacaatgatccaagtcttgttggcctctagagctataatttcagaagccattgtattgccccaatctagaatacccttagcttgattatagaactcatgctcataaacacttgagattaatagcgcagtagctcgaaacttaaaaaacatcctactgtaatcaagaaatttagacaagggatattcattaatagtaacgaaaacttgagaatgcatactgttagaagacaaaaaataatgatagtcatttagataggatggattttttgtatttcgaacaggtctatgagcaaaaggatttaacttagtattgtcatgaatttcaagttcagatgaaatagcaacaggagggtcagatatagaagtatatgcatgatgatggggtgcagaaataggaaagaaatcaaaggattttggtgacatgtttccagcagagacaaaagggaaaacatgttcatgaaacacaacatccctagaacagaaaatcctattggtgttcaaatcaagaaatttataagctttcatacccatataatgccctaagatcaaaacaaaagctacaactctaggagagaacttagttctaacagcccccaacgtagaaacataggccaaacatccaaaggctctaagatgatcataattgggcactttagatcaattcagaatttcaaatggtgacttgtgttggagatttgaagttggtgttctttttatgaggtaaaaagaacaccaacttcaaatgaatgtaagactaacaaagaagagctccacacacattctcccaagtaaggcaaatgaatgtaagactaacaaagaagagctccagccacattaaaaactctcaatacagagttttgttgaggagtttgaacacaagaatggtgatatatgattccaaaataagtgtacagtttagggaatttgaagttttttgacattatctgatctaactcatttatgtgaacattgtattgggttttgataagttggataaaggttgcgataatattttgggcatcagatttgttcttaatatgatgaatctaagtgtacctagaataatcatctactatggttatgaagtatctaaaaccctcaacagttggaacatgataaggaccccaaatatctatatggatcatatcaaaataagccttggcaatattatgattagacacaaagggtagctttctttgcttagaaaaataacatattgagcaataaaaatatgaacaacaagaacattgtaattgtaaatttttattcaatgaatgagtttttaaacaagaggcatgaccaagtctataatgacatatagtactcacaactaattttggaatcaaaaattgagaaaatagtaggtaatgtattatgtttcaagaagtagagttgcccaactcattcatccatcccaatcacttgattcttgaaaatatcctaaatcacaaatttgtttggaagaaaaagaaaagaacagttagaagagttggacaatgaagtaactgataacaaattgcaatgaaattttggaacccaaagaacattagtgaggataaggcttgatatatgtatagttcaaacaaaagaaaaattgcattacgacctctaataatccaacactggtaattttataattgttttgaattgtatgaaacaaagagggatcacaccatacatggtgagtagcaccagtatcaatcatccaagtagatttagggacatagaagttattacagaaatgtttgacactacaagttgatcagcagactgagatgatggtgttgtttcttgaactttctatggtagcatagccatgagtttctgacattgagatgagaaatcttgatctcctgattttccagcatgagtatcaacatgacttggaaaatttgttgaaggtcgatcttgttaatgattatgttgattgctaggtttgattgccaaaaagtgtttggggttctcactgtgataaggatgtcgagctcttgaacaccatgcatatttcttcaactcacctatcatcatgtcatgctcatgaagttttccttgtccatttggttcccatgcttcaatctggtaaatgtttctaatgaacttatattctttttgtttaaaatttcaactagtactaaaattgatttggcttatatgattttctcaaatagtgtcccttgaaaaggaaaaaaatcaaggattaatcttatttttcatttgatttataagattttatatgaccaaagggaattgatccttgagaatgagtccattgatgcagtacttgttgttcctaccttcaaagtcctaaaaaacctcctcaaggtaagtcatcaaagctaaaggctcatttagcatcctctagttcactagatgaggcacttgttgccttagcttttacttctgcaactacacaattggcagaattcaatgtttgtttgggcaaattggacaccaatcaaggaattcttcttagaaagatggatagcatcatgaagttctttcaatccaatgatgatgcttaagtgatttattttttaatttttaattaatttccatgttttgttaaaccttttatgacttttttttaacttttttgtcgtatttggcttcttgataacaaaaaaaagggaatatagtagtatttcttttgtattttttggttacaattct

SEQ ID NO: 196614 - DNA, 743 bp, Cannabis indica
aaaatttatataaaataaaaattgatgcacccaaaatatatatagaaacagaaaaagagaaaacgtgagtgaatgaattatgattgttttgttgtcaataaaatccataaataggttgccaaaaataagaataataattatttcatactttattattattattattattaagggatagcaatgaatttgatgtgacatatatagaaatgtttttggagataaaatcaaagagaattggtgttttcaatgtatttttctgctctgccattgaaatttctgatttggccccaatcaactaggaactcaatttaattattcttattcttttttatttattattattattattacaataatttaggacataaatatatatttaacttctaattaaatgtcaattcaataactatggaagaattgttaattgatctatgtcattaaattttttactttttatataaaaattaatttaaatatataacactcagaaattacagttaaaaaataaatttagatattaatttataatctaaaatcaaacttaaatatttacaccacaaattactctaataattattgttcttaaatttaattactccttcaaataaaaaaaataaataaataaaaaaaataaaagttaactatttccttccaattgcgggtggaccaaataaacatttttattattatttataaatattacaaaatatcatatgaaaaaatatagtaatagattttttttt

SEQ ID NO: 196615 - DNA, 1427 bp, Cannabis indica
ttggaaattttgcatcacacgaaatagaggcaaaggccatcttccatagtttgttttggatcctccaattgtaattgccgattaaacaaatagaggcggacgttttgatggtttcaaatgctttagaaaaacctctttctgtactttttttttaaagatataattgtagatattttaagttttttatttttttctctagagttgctgttactcatgtcaaactttgtgtcaacataactgcttacggatatgctttaaaattagatgaaaattatgttcggttgaatttattcctcttactctttgttgtaaatgactcacagtattaattaatttatgataataaaatatttctctcattaaaaaagggtgcagatattttatagggactggctcttcagttagcattctaaatgatccctggctccctgctgaaatcgatggttttattcactcctctcacccggctctacataatcaatatgtctcttctctccttaaaccagatgccaaagaatgggacattgatatcttgaatgatcttcttgatgatcgtgataaagaccttgtccttcagctccaactcccctcatctggttctgaagaccactggtactggctaaaagaaagaactggtatttacacagttaaaaccgcataccacctgctgcagcaattaaaaggtgattggggtgttgaccctttgtcaccattctggaactccttatggcaattgcctctgcctcctcgtgtaaaagaccttctttggagaacatgtagcaacagtttacccaccaaagtgcaactccaaaccagacatgttgcaattgactctacttgctcactatgcaatgcttctcctgaaacttcacttcatctctttgttaactgtccctttgcaaaaaattgcattcgcaaagttctcggttctgcaagagatagtgttgaaagttcttttcctgcctggtttcatcatgttctctctcactggcctgcctctgaaatcgaatccatctcaatgctctgctgggccatatggcgatgccgtaacgacctcatatggaatcaaactcagccttctgtcgaccgagttacctcatctgcaacactcactttagatcaatggaaaagtgctcaatccctttcaaagactctctccaatagtgctactagtacttcagatagtcttgagcgctggactaaaccgacatacccaatgatcaaggttaatgtagatgcggcaacctttgctaatcagaaaagcttcgggtggggttttgttgcaagagaccatgatggcagcttcttactggcctttcaatcaagcaagcttggttctgtgcgtgctgaaatcgctgaggcggtagcaataaaagaagcgctcagctggataaaagcaaacaactggcagaatgttcaagtggaat

SEQ ID NO: 196616 - DNA, 671 bp, Cannabis indica
aaaaaaaaaaaaaattgtaactattttattaaaaaaaaatggtattttatataattatcccaataaaaaaaataatgaaattaaattagaactataatgtttggtttagcttttttctttttattttatttttaaataaaatataaaaactaacaattcttttaggaataagttgagaactatttatttttattacatattaatcaaatataattgtaaaataattttaattaataaatactcttttttataattaaagtaccaaatataacctcacatagcttatcaaaatttgagtccctaatacacacaatgagaatataacttataaaattaggtataaactaaagagtaataaaagaaaggtaaaaaaattaaaataaaaaataaaaaaataggtataaaatgtaatttcttcatatttataatacgtagtgcatatatttttcaactttatcaaatgtaattatttatatgcaaaagaaaatataatctaagttatatgtaaaataagttattttacatataactatgtttttctctccttttttttttttttcttttatttttgttttatttaatttttacatataattatttttttctcgtttttttttaatttttgtttttctattttaatttgtagatcaatatataaaataataatttat

SEQ ID NO: 196617 - DNA, 792 bp, Cannabis indica
gatgcttttgagttatgggttatatttagactacccaaaattgctattcaagaaagtttggtagcttttggttaggttaggagctagttttcggggcctataatttgggaattttggagcccttgtttcccaataggagcttccatgattggagagctagcttccatgattggggagctcccatgattggagagcttccatgattggagcttccctgattggagagcttccatgattttagagcttccatgtctggaaagcttccaggaagggagagcttcaatgattggagagtttctggaaggggagagcttccatagtggtgaagcttcgagaattggactttaccgaggggaccattttttatattttggccataacttttcacttggatgtctattttagatgttctatggactgttttaaagctggtaacaagctctaccatatgaaatataagttagagccgaattatctatttatttaagggtgttttaactttatagtttggtagaaaaaccctaagttctatttgcgcattagagaagtattctagagtaaacacttatcaattttacattgtgacataggaccttcgttcaacatgtaaatttctaattaggttgaacgacacacttgaatcaagaaatgagattagattagtataaaacatgtatatgaatatgtgtatgtatgtaattgcatgttgtgtatgtaattcgtatgctaccaatagtagtacggtagcagtatggagtgcattggtatggtatatgatgttcaaagggtacg

SEQ ID NO: 196618 - DNA, 1514 bp, Cannabis indica
tgaacaagaggtgagtgatcatgatcaccctgtaactgatctaatgcatgacactagtttaggtgctgcagaaatagtgcagacaaactaggaaggagaagaaattaatgtaacataccagaccttgcaaccaaaggtgccaactcatcctatggtcactagagccaagactggcatcttcaaaccaaaggtttatctcaacaaaaaataaaaccctctaactgaagaaccaaggaacttggaggaagctctcaattcaaaggagtggacaactgccatgtcaacagaagttgtggcattaaaaaggaagaaaacatagatattggtgccctactcacctaagttcaatttaattgaaaacaaatgggtctataaaataaaactcaggagagatgggacagttgaaaggcttaaggctaggcttgttgccaaggggtttcatcaaagaccatgtattgatttcagtgaaacattgagtctagtcattaaagcagcaactgctagaatcattctagccattgcagtgttaagaagccgggccataaggcagctggacaccaataatgtcttcttaaatggctatctcgaaaaatatgtgtatatggtataacctcctagttttgaaaaccatgaaaaagcagattatgtttgcaagtcaaatagatccttgtatggtctaaagtaggctcccagggcatggtttaacaggctgaaaaaaatattgctatagtagaatttcacaaattcccaagctgacacttggctctttcacatgaaaaaaaacaacattatttttgtcctaatttatgtggatgatattattgttacatggaataatatcaatgaacttaatattttcatctcaaagttggacaagcatttctcactcaaagaccttggttccctgcactattttttgggaatcgaggttcataaggatgatttaggattgtatctcacttaaacaaagtacatcactgaattgttagaaaaatatgatatgctaaacaccaaatcttgtccaacttctatgattactggcaagtctctgtcaaaacatgatggcactattttatcgaatgctacaatgtatatgagtgctattggagcaatgtagtatccaagtcatacaagactagatattgccttctccatcaataagctgagccaatttctacagtgtccaacaacaatcattggagtggagtaaagagagttctaaggtacttaaagggaacaatgcaccatgaacttcacattggttactgtgagaggctatctctggtaggatattcatatgctgactgggctagttgtccagatgacaggagatcaattgcaggatattgtgtgtattttggtgattctctattgtcctgatcttctaaaaaataagctgtggtctcgaggtcaagtacaaagtcattgtacaaggctttagctcatgttgcctctgaaatcacatggattgagtcattgttgaaggaattcaagttccagttaccaaagatgcc

SEQ ID NO: 196619 - DNA, 2285 bp, Cannabis indica
aaaaaaaaaaaaaacatatgctgtaaaataagaattataacaagaatggctatacatacatctgtttctctaacaatagctttcattctttgaatttttgaaggtataactcttttgtttccactgtaatctttgtgttttggtctttttactataaagctttacagaaatatatagatttgaacaggaatcgccatgcatcctttcaacaaaaaaacaaatcgcataaatccgaacatttcttcctcaagcatggtattcccagataacttctgtttatgtacattcaaagaaatgtattaacctatattattaatagccatcaaatggagaatggtcttagtttgttaattggatatttaggaatataatctagcttagttttacatgagatatttatttaattttgttactggttatattctgagagttttaaggaattaggcaacttctttaaaaaaaaaaacaaatggtgactcgtacgatagcaaaaaccaactatagtatgtatgtaagaatcggtgtcattgtgatgaacaaatatgaacaaaagcagcaaacaaacatttgtatggctacgactaagggcaacgcatagtgagtgcatatacaatctaacttcattccattttcaaagactagcatagcagcacagctcagctggtgaatgtgaattgcttcatagtgctgccctcatggcttctcttgcagcttctcgcttcatctcagcagccttaccactccctcggaagtacatgtatacttgctgcaagtcacaagttcacgacacagcaacgaacacaaatgtaaataagaggtgttattaattcaagaatcttttgttgagatctgagagttgaaacttacctgaataacccagacactgactaaagactccaagcaaaacaagccaaacccgatgaagtaaaagatctgtttatgagcgaaagaaaatacagttaatgaatgctattgctattccttctcatgtgttaattgatagagcttaagaagggaaaaaccaataaacattcttaccccaaccaaagcattccccccaataagatcaattgcaggaagaataccactgttttaagaggcacaacaaattgttatagtgctgaataaagtccaaaagatcataagatatacatcaaattgagatcatgttcatgtacatacgtgagagattttcctttgaaaacaataggaggagcaaccgcagagaagatgcagaagccgatatgaagctgtagccgaagatattaaaaacacattcttcatttcataagcaaaaaaactgaggcacaagatacacataccagataaaacaagaaaaaccatccaaacttaaatgcactttcagtcctgcacaagaagaaacaggagcactcaaattagatgataattatgtgtggataaaagtaacatacatgttggaagaacacataagcattctcaaggtaataaaaatcataagaaatatgtacctaaaagcacggtataatggacggtaccacagcacataagaacctgggacccctgatatgaagtagataagagctaagaaccaaatcttcacccctgcaaccaagaacagattatcacacatcagataaaaaatgaataacacctatatatgaaagtgatgtaaagtgattttatatatgaaagtgatgtaaaatgattttgtattcaccttctcctttaatccatgctgttgtaactgctacgatattccagacaaggcaaactgtcaatcctgcatagtgcatacaccaaaattcataattaaatcatccatctattatagaacgtaagcaacttgagtctttaatagaataacataacttgagcagccaattactactacaagcaaatcaaactataacatacaaaaatcatcagtcataaatcaaaaaaatcaagcactgatttgcatacctaaccatgttgagaatgcaagatactgcattttctgtaagtgtattggtatttcgtttccaatatcatgatgaattattggaaagaaaggtggccaatttttctcctcaataactattccagctgcaagaaaagggagatagatctatgaaatgactatcacataaataatcattttcgctgtgcacttcaaacactttatgttaaggtaccagccatatttttctatgactagaatgaaagatggtactggtagtcaattaagaagagaaagaaaaaacagacaggatgacttaccccgagctgcagcttcttctctccgtcttagatcctgagcaaca

SEQ ID NO: 196620 - DNA, 657 bp, Cannabis indica
aatatcagcttccaaaaattttacttaaaaaataatttgagaaattgctaaccaattattaggtaccacattagtatagtattaagcacttaaggtgtcacataacaataataatacaaaaaatattttaaaaaaatagtataaagatcattcataactaaaaaaataacaaaaataaataaataaataaattttacaacaaattttgcaattgtgcattggagcataatgctaaaaattgatgaaactatcagattgttttttttttttttggccaaatatagtataatttttacataatctcattggagatgttcttgcaaactatcagagccatttccaactttttgttcctttccatgaaacacttcgtagtggttacaagatcaggcaaaaaatgaagacaaggctggaagttgttcaatctccagcacataaaattcccgtcctcatagtgtttcttgcagtgctcacatgtgaccggagaaggaagtcgaatgattttcttagctaagaccttattaaccaatttgttagagtcctggagaaaaaaaagctcattcaactccacaaacatattggcaagagattgtaaattagtctagtgaattttctcaaacttagacagacgcgacttgaggttctcattctctaatt

SEQ ID NO: 196621 - DNA, 711 bp, Cannabis indica
tatagttaggttttttttttttttttttaaaaaacaacttttatatctaatttttaatctctcactatatattagtggcaaatgacattttcgtttttttattgttatttttcttgattcaatataatattatcctatgctacccactaactaaaccctatgtttggttaaagagaattgggtaaaaagaagcttgcatatcattgatattaaattataacattttattaactttgaatttaatgctacattcataattaattaagaaacaaaaattgacaactaatcctcaacaaatcacaacaatggtgattctattataatttatttgtttatccatttcatttttaatcttctaattaattaactatttacaaatacattaactttagatgataaatcatatataatacctataatcattaagaagttcacaattttaatatacatattttgatattcattataattgatgaataaagagtgctttaattttttattaattatttttatataaataacattttgaattgttataaagaatggggtcaccagaggaaagaggaaaaaaaacaatgaaaaaaggaaaatgcaacattatattttttatgcatgcattgaataaaaggaatggaattgggcctaatttccttggcccataatcttatatgaagctcttgaagtctgaaaatatgacagcttaataataag

SEQ ID NO: 196622 - DNA, 869 bp, Cannabis indica
tacaattaaaaatttaaaaataatcaatctagtaaaattttaatgataaaaaaaaatctaattaaaattttaagattatatcatatacactaatcaaattacactgaattaactctataaaaagattacatatactacatatatttgttatatattaagaaaaatatattataaaaattggtaattttattatagaatgtatgatgttgttgaactgtaaatataaaaattcaaaccataaattgcactctacgtgatttggcaaaaatataaactacaattacactgtgaataattttaactatattttttgtacagtatgggcagttagtgcagtataagcggttttacgaatacccctactaaggtcatctcgaacctaacaataaaatattatatatataatgtgagttttttcacaaaatactttaatttaactgtaaaacttatcctatttttgtgatagtctacataataataggtattgtagactagagtattttttttaaaactttttaataattaaataatactttttagattagaattaaaaaaaaaattagtgataaaataattaaataaaataatattgttgaaataaatccccacatgccctttacaatgttcagatcaacatcaagcaaagattacaaagcagtaaagatcctaggtggccttcaacctctaacaacctacatagattattaagttagttacaaagtatgttaaaactttgcaactaactctcagctctctctgttcagctacacatataaatacaagcacagaaactcagagaaaaataacacatatcaaattttactatagaggaggagacttgtagtggttaagtcttaaagccctagggt

SEQ ID NO: 196623 - DNA, 1011 bp, Cannabis indica
gaatattagaacataaaataggtaaataaaattgacaaaaaattcaagtgaagagcatatcgattctccaaaagtgtatagtacattactgtcacaaagcacaaaacacagtttaattagttccaatacaaaagcttaaattaaaagaagagtttaatccctcatactaaactaccccacaaaaatatccatattataaaaataaataatagagagttagaaagaaaatgttacataaagtattagtattgcatctctatttgctgcaagtgttctgaaatcatcttattatacacaaaagtagttttccttattttcctttgtcaagatttgtatagccttagtaacagtctagccttttttaatgtacagaacttttaaaggaataacattgtttaacatcctaaagctcaataactaatcaaactgagccattaataattctaatattatttgcaatctgtccttgatccttaaaaaatttgttatgccaataccaaaactaatcaaaataatccttataattttagtattggttagttttgactaagatgcatgaacaaaaatatataaatgaatatgaatcaagggaaaattacacaaacaaattttagatacccatcaccataaatttgtattaaccatcattcaatctagcagtaaaatagtttacacaaacacaaatttatttggttcttcatctatgctcaacccaaaatttgtatggatttcactttattgctgggtatttaagtttttcattgtttatttttgcaaagagatggatgaaatatagatatatgtatatattaagctattattgctcttaatcacaaagaataattcaaataaactacgatttccaatcacaatggccaaaaaataaaaggaaaatgaactatagtccaagggaataaggaggcttcaaactttcgatgaattaaattttcacgacaaaatttcaatggacatcacatttgagctcccagtgatacatagactgaagaagac

SEQ ID NO: 196624 - DNA, 1207 bp, Cannabis indica
ccttggcaaattgatgactaaatataaattaagtttttgtaatgagttggcgaatgtcaatccatttggctccggttgctttattttttgctttttgatataagtaatgaatttgcattttggtattccaactcaataacaaatatagtaaacaaaacaaaagaataacttgttaggagtgtatataggtatatagttatagtttaacatgttaaatataacatgatctttaattctatttataatttctcaagacaactcacaaaaaatacatataagaagagtatagaactttttcacaatgagagtgacaaaaataatagcacctctactttaagggaccaacactaccattttgaaaaacaaatatggcatgtatattttgtgataaattggggtttgaactcattttatttgcaaaaataaggttaaccactactttgtgcaatctcatttttaccttaattatttttgtggatgatttggtccaatctcccattttgaatcaaaagatagatatgagggcctcaacttagggctattaattcatcatttttctcaacagtgcaatgaaatgagagtttatggtatgtaaaataaatagcatgggcaggtgcgtgtgtgttggaggtcctgaattcgagtcccagattatgcattgtaatatatgaacgcttaattcaaaaaaaaaaaaaacttgttaggagtgtatataggtatatagttatagctcataacatgttaaatataacatgatcttcaattctatttataatttctcaactcgagacaactcaccaaaaatacatataaaaggagtgtccaacctttttataatttctcaactcgagacaactcaccaaaaatacatataaaaggagtgtccaaccttttcacaatgaaggtgacgaaaacaataacacctctattttaagggaccaacagtaccactttgagaaacaaatattacatgtatattttgtgataaattggggttagaactcattttatttacaaaaataaggttaaccactactttgtgcaatctcatttttaccttaaatcaatcaaaatatgcatggcttcttattttttgtttggtccaatctcccattttgaatcaaaagatagagatgagggcctcaacttgggggtattagcactgggttctcaaaactaagtatggtattaattcatcatttttctc

SEQ ID NO: 196625 - DNA, 1018 bp, Cannabis indica
tttactaattcatattctaaaatctggtcattacaagagggaggcaaacagggccctaaaagggcgcttagaggacaaaaggctacaagtccgcaagagggcaagcgtgaagtcagtggtccataaggccaaaaaattggaggacgttcatgctccacctcctgtggggcctacagtggaggtcgagaccttagagaagaggctgtcatacagggtgggtagagaggcttcacctttcgcggtcgaactcctagaccaggtagctggaactacctctgaactgcctatagagacctgcgcgtcctacaataagacagacgttttcatgctagcctattctgccaagcagcaggcgattcgggtaaggcctcgtggcattgcctccacttttctcattgttttggtttgtttgctttgcgccctattcagacactacaacctttttaaacttggcttgttctgacatgtaaccctgaagatggagagagctgctgcagaggctggtgtgctggtgacagagttggagaaagtcaaggtggccaactgtgacctctgtgccaccgatgagaccttccagacagaacttacggatgctaggttccagattaggggtttgcagcaagcaaactagcaggtggaggaggagaatgcccaccaggcacacttcatacggagcatgaaggttgttcatgatctttacacagagaccgtgagacggatgtccagtgcaggctcttcctcccagtcagacggtgtctaacgttgaaccttcgttaggtttcccagattaatgttgttttctcttttaattttttttatatatatatcccacttttaatcatacttctttagccgcagagaaaattaaattttgccctggctgcaggaggctataatagtaaatagagtccttttttgttgttccttacttggagatttggtgtggtagacttttaggggctggttttgttatcaaagcacccaatggccagtgcttcaaccttttcccattagtctt

SEQ ID NO: 196626 - DNA, 613 bp, Cannabis indica
aaaaagaaaaaaaaaacattaatttgcaggcaactagtaaaggggcaattaggtgtagtttctaaataaccaataaaatattaattatatgtgcctctattcaagttaataattaaatccatatatagttattgctttcgtaagcgtatacggtgtaattacaattaattcctcccaacatggaggctctaactttacatctccatttcccaaaatttaaataaaaaataatagttcaaattaattttttttaagttttattaattcctttcaaacctttattcatattcaaatcaaactatgaactgttgaatgtgcattaataaacattaaaaaaggtatagaaaatggagataaagaaagaaagaaaatgaaagatatgcttcatgcttgaatatactagttttctttttcctaattgtaaaatttctaatagtaaagccgaggaagaattgaaatgtagtcttgggttgaaaaagcgtagccttggaattttcgattattatctcatgtaactattaataaataaataaataaataaatttattcaattcaaaataactaaacaaaaaaatgtgttggagaaggaggggaatccaacagctgccaccaa

SEQ ID NO: 196627 - DNA, 1878 bp, Cannabis indica
cttcaaagtggctccgcctcagattgcaaggttctagatatgttttttcttcatccatacttccattgagtataccttccacattttcattgttgcattcatccaaatttatatcagaatttttttctaaataaattgcatcctaaataaaccattcaacaagaacgtataattatacaaatcatttatctataaacaaagcattataaattaataatctgccatatatatgctagaaacaaacaaaagaaaataaacaaaaaaactcaaatatagaaactcatgatattctattttaatgtaaattatatataataaacataaaaaaaaagacaaagagttctacaaatcaactagcatatatataacataaataaaacttaccttttccattaggatttaggagttgaaatacttttgttactttgtacgatttctttttctttttttattgagcttgaactgaaaaataataaagagaagttagcattagatattatttaagaggtaatacataaattgaaaaagagatgaaagtagtgattacctattttatatcattgaagaagagttctttgctttttatactagaaaatatttatgaagatgataagattaaaaaacaacttttcgtctgtatataaaattaaattagtggaataataattattgtattaatttgattaagatggcacaattgtaataagatggtatgattatggttaattaacatgtagtaggtacaaataagttaatttaaaaatttgacatttgtcatttagctatagagagagtgtccctagcactcctcttttagaaaatacatggtcaattgtgtcatttaacaaaagttctcattcgtaacttttgcaaatcacaaggtctaaaatggtatctaccgttttttttaaggtaacatttgtaggttagataaaagaaatgtcatcacccaaaaaatggagagatttttttcatctaataaaatgttgtgattgacttaagagagatgcttctaatgaactaaataataagaatttaatatcaaaaaagatacctccatcgcaatttagtacaatgtggtggactactctaaaatcaacactaagacgaatctaagaagatccctatgataggtaacccaatattttgggctcatctcaatcctactctacttttctgtctcaaaaattgtcaaaaaacttgtaacatataatcaaccattagaaaacaatcagtaatcttagatcttttcaataaagttaatgatatactaattttaagaaaataaattataataaaaacttatcctatcgaaattttggattcttaaacaaccaagtgaataaagtaaaaaaatacctaaaagataagtaggtaaaaggaattttttctataataagcaactaagggcaccatttgatatttttaggatgcttcttagggacttttgtcaaccgttgcaaattattttcttctaatgaaggcataacgatgtccttggtcattctgctcttgaaatctttcattaacttcccaacaatgaccatgcaattttgtttaaaatcatcttaaactataaaacccgtgtacttttaaggtaaacaaacatgattagagttaacatctgaattaatcaaacacaaatgaaaattctaacaaataactgattacttgtatatctttctaaatttagtttttaagttcagggttgacttgcttctaattttcataggacatcccaattgtcatacgacatctaactcctaaagtcaatactagcttgacatagtttctaccataatactcgtttattggcgatctgcgcttcgattactaaggggtcattatggggaaaacacacatttctagcatgatctt

SEQ ID NO: 196628 - DNA, 779 bp, Cannabis indica
gggaatccaacagctgccaccaagttgcaataatttgagtaaatttatatgtatattactcatcaacttgggggaaagaaaggcaagtggctttaatttttcccaccatacatatatttaaaatatttatattctttaattagctaagagtctctaatctcatgtgtatgaataataatgtagttattaatacatagagaaagaaaattaattaaaatatgttgtgtaacttggtgttgttttatatataagaaataataattaatattaatgacgattgcatagcaatttgcaagttggtgtgcaagttgacaagcaggcctttgatcatgtccttaattttccttgttttccaagagaactgatcatgaaatcagagccagccattctcatccctcttatttctgtcgactgatttgacttgaccagaccaaacccagccactactattctataatataatctatactatactcactcatatctgttacccctattacttatcacatatcaaaaataaatagattataaattttaaaaaaaaaaataatattgaaatagagcagttcagttcctacaggtcagaccaaaaataacactcctatcattaaaaaataataataaaaaaaataccacacggtaagactgtgtaatttataccccatgtttagattttcttttagggattggataaaataatcatacattttaatttatctttcttgattgggttaaaaataaaatagtctaagtggattgttttcttttctttttttctt

SEQ ID NO: 196629 - DNA, 713 bp, Cannabis indica
tcattgccttttgtcggggtcttcgtcaaagctcttggcgggcatcttctctttcttggctttagactaagccaggttgtaatagtgtcgggaaagctgttgatctccccttagacatcaggccccatgccttgttggaaactttaggcataagtggtaaatcgatgttaccgccttcaggtcatataaggatagccgacctatcattgcattgaatgtcaatggcacgtccattacgacaaattgtgccatcagcgttcttgttatgggactttctccaactgtcagaggtaatttgatgtatcccaaagctggaaggccttggccaaaaaagtcgtacatcagttgtgtacatagtgctaggtcttttaactaaagccccatcttttcataagttgacttgacaaggatgttggaggacgctccattatcaaccatgcagctagcacctgtcatgttccctatttgtgcagttatttccaaagggtcattttgaaggaacctgacgtaggcaacatctccctctgtaaaggagatggcagctcttcaagcttgtgttgagcatagtgctctctagcttagcttgtttgaccagctatgtggggtccacctattatgacccccaggtgacctgccattggtggttgcattgggtccccattctaggcagcttgtgcctaagcttagtcattttgcacataacgacacaagtg

SEQ ID NO: 196630 - DNA, 752 bp, Cannabis indica
agtactactactggtactacttcattaattgatgatgattatgatgagaatgaaaaagacaatgatgatgatggttgcagcgattacattttgagtaagcaagaagcgagtaattttgatgaagagttgataagtactgatgaactcaacaaaaagattgaagagttcattaggaaaatgaaggaggaaatcagggtcgaagctcagcaacaacaacagcaacaactaatagccgtttaattattcataataaggttatttacaaatttaattttactaataattatttatattgtatctttgcatgcatatatgcactagattgagtatacgtgttcttaagtcttttgaatttaattatagctagtgtcttttacttcttcttcagaagtactacttctttttagattagtgcttttgaggatgtttcaatgatcaacatcatcattacgtaccaatatgttaaatcaatttcttagttgtgttttaaaccaaattccatatagttctcatatttcaagattttgatgtaattaagaagtttaattatgatttattatttatttaatgtgtgacgggagttttgtagaaagaactagaaaaggcaagactcgtctacgtaaaaaatagggacataaaatttacagcaataataataagccgtacaaatacaaaagaatatgatatatctatcaattaataatttgggttgtgtgaggaggaagcgtgattatataagggaaatttgattt

SEQ ID NO: 196631 - DNA, 2507 bp, Cannabis indica
aaaaataacagaaaaataacattcagacaatatcaaaataatattaaaaaataacatacaaataatgaaaaatcaatcaaaaattaagaagagtataacataaaattacatcaaaacgccgtatttcatgtaaataaaattataaaaatcgcaaaaaatatttaaaaaattaacctaaaaaatacctctcagccacaagcaacccagtcactccaatttctctctctctcctcgatacataacacttatatttagtaatactatataatttttaatttttattttacagtatatactacatttttatttttattttacagtatataaaatttgggttaaagaaagaaaaagcaaattatctgtatttattaacaaactcactagagagtattaattgggataagggagagtactttgggaaggataggattttatatatattgattctgtaaatcaattaatgctcaaacagagtgaagttttagtaagtatccgttaaatatgtgctggcaaaaatatgtgacgtggagtaatttaagtggcgggaaacaaaaagggaaacgctaagtacatttcttctcattaaacttgatggtcacgaattcaaaatccaacctttaaatacaacttccctccttaccattacagcaacggctatttctctctctacatgcttcttcttcttcgttttcttacactacagttctttacgattacagctacagctctttctctctctacatacttcatcgttttcttacactagctctcttcaatggcaatagcgacagcaatcactcaagtagtcatccgagaggtatggagagaaaatctccttgaagagtttcaactgatcgggaaattgattcacgatcgttatcgttacatttcatttgatactgagtttccaggctgtgtatttcgacctccaacaatccccaatcgccattacaaaattcaccccattgatcagtaccgactgatcaaacagaatgtggatattctcaatctcatccaattgggtctcacccttaccgattccgacggtaactttcctgacctcggcggccaaacatcggtggtttggcaatttaacttctgtgatttcgacataaaccgccataggtgcgcactagattctatagatttgttaaagaaacaggggatagatttcgagagaaatctcacccacggaatcaactctgcccactttgctaatctgatgtaccactataggctcgtgttcaacagagatattacatggattaccttccacagtgcctatgattttgggtatttggtaaagattcttactggttgtttccttcctcactttttgcctgattttctatatctcgtgagccacttctttggtcaaaatgtgtatgacatgaagtacatgatgggtttttttcctggtctgtatggtggtttggaaagtctggctagtacattgcagatcgtaagggaagttgggttgagccatcaggctggttcggatagtttgctcacatggaggacttttcaaaagatgagattgatctgttttgactctgatcaaaaggagttgaggaagtatgctggtgttttgtatggcttaaaaatttgagtgcctcactctagtttatatgaatatgaatatagataagataggatatatatatattactgattaatgtagtagtatcttttgtaaagtaatgtagctaagacctcttcaagcaattttgaattatggttataaatactattttgtttgacttaattgatgatttggacttattatgatcagtttttccttttttttttactgttactatattttatgcttttggatcatacttggtacttttagattaattaaatctttcagaaggtaagattgacctgttttgactctgatgaaaagtagttgacaaagtatgttggcgttttctatggctttgaaatttgctgtgcttcactctagtttaatgtaagcaattttgatttgtgattataaatactagttttgttgacttaattggtaattatgacttaaagatcagtgcgtttttcaagacatgcaaaacaaaaatactgctactatgcttttggatcatagttggtacttttggatttattaaatcctattgaataaaaaaaagtcaacgtaatttggagggtaaagtaatgacaatagtgaatgtttcatgccaaaaatgctattttgtgaatcaaaggtgtttggttggagagagaggaaaggccaaaaatgtttgagaggcttgacctaaggcttggctcaacaatctcacttctcttgaggtgtgtcattcaaatctccttatttctatgtggtagagtgaaagttatgtaagctagtactgagatgaaaggggtactttctgtttgatttcagggtttgaagctgtgtacaaatttgagattgttatcagtcacggagaacaaattggagagcttgaaaggaattgaaccacttactcagttcactgtaagtgtagctt

SEQ ID NO: 196632 - DNA, 1961 bp, Cannabis indica
cataaataaaataccaataaatcgtcccaagtttatattttggccccgaacccgatttgacccgaaatacctggttgtgactataccgcaccgacttgtcagaacacacctgaaaaaagggaaaaacaagcatactatataataatatagtccataagcacgtaattaaattaaattcatagttttacccttctcgagtcaaaattactaaaatgctcctagctcaccaacggggtcttaacatgtcatatatcatattaattcacatataataaattatataataatacacaattaaatagttagggtttgctaatctattctcttaatcttagggtattatagagcacgtgtaaccctattcccctagtacatgggttgagcaagtccacgtaccaacagaaagttcccacgcggacttgggggcaactgttattctaaattttgcacagtgcgatgtggcgttcatctagatgacacgtgaaacattttaagacctagactggtgattcctcctcgacatgtcgtccagggtaggttatttcacaaaaacaacttatttgaaggataaattggagcatccagacaatgtaaatgacaccatccaaccagtgtcaatctcgcagtaagcccacatataccgaccaaggtaaatgcagctaaaatatctttggagatacttctcttatttattttattaattgaattactattttaatgtgattttcacatgttattgttgtaaaatagaaaacatttctactttcccttattattttcattcatttgggaaacctaattgatgtacttattccctataaataatgaatccatttcattattcagggggcgaattctattcttcaagagagctcttatgctgcaaaaatgtaagctttcgagtgagatcaagaaactcaattgtttcttttctcataagtaatacaagtaaagggagagtaggctattactattatcacagggccgagcctctataaatctttgtgcacttatgcttaatttcatttaataactatcattattccttatcgctttgattgacttagcgtcgttggctaaaatcgagttcaacacctcataaggtgagagcatctctctatctctagaattgagagctcataccttagctagttttcttgtaattttcgtgagaaataaaaacataaagtagatgtagctttattactgtcgtgatgtagataggggtgagcaacaaccaatttggtcagttttttacactaaaaaaaatctaaaattcggttttcagttttcatggttataagccgaaaaccgactgagtattatataaatagtaaaaaaaaaaaactgaccattttaatccacggtttggcccgtaaaaatgaacaaaacagagcctaaatttttttttttaaaaaaaaacaagtctttaaatttgctataattatttgaaaactaaaaaaaattagagtattgtatcaaatatcatataattcaataacacaaactttcttacttaaataaacaatgtaatttttttttttttaaattttgctcaaattatttgtactactagtatggtaataaattttattaaaaaacctatattactttatgaatgtgtgtatataatacataaatacattaaattataataaaataaaacaacatagaattgagactttaaatgaaaaagataataagtaaatttagtttaataaaattgtatattaaatatgtacaaaaatagttatatttatagagtaccatatatatgttcggttagtttgccattgacattaaaactgaccgtgcaaaggcagtttcaatcgaaggcaattttttcgatttttgatttttttcgatgttcggacagacggtgtattcggttttatcagtttcttgaatttttttgctcaatcctaagtacaagaagtgaattacagtagaacctctattca

SEQ ID NO: 196633 - DNA, 824 bp, Cannabis indica
tgtgaaattatttcagtatttacggtaagctttctcacccattcttctatttccgttgattgtactctgccgcggttcatttccgatcatctactccggttgaaaatggcttccgcccaatcatctctctggcaaagcatctgaagaccactccactggaatcaccgctcacttctccttctcaatttactctacctctctgatcactaaagccctcctcccaaggttttctccttcttcccattcctaatttactcataaacaaaaggcactacattattgattgcaatatttatcttacggttttgcatctctgtgcatttggactttactaatgtatctgtcccttctgatgtcgttgccttgtaggtaaaaactggaaagagcagtttggaacagatatctaaagtttatggaaatcaagtaattcactctctattttatagatatctgctaatccatgctttttattaatatggaacagtagcttgtattgaaaatgagggaacgatgtctaaagtttactgactacagaactgaacataacaaatacacaacattttattgggcctaatttttggatcatctgtagttcaattttggtgtcagtttgctttatctttcattctcttcttgctatatatttattctttatgtcctgtgtcctttgtttgctctcaaatatgtcgatttaaacataatgttgcaggctgtggttgtaagcattgatccccgtagagtctacatcaatgatcccaatgatgtggagtttaagactgtaagggtcacaaatagaggtaaagggacattttccatttctttat

SEQ ID NO: 196634 - DNA, 1076 bp, Cannabis indica
atgtcaacttcaatataagtgtctactttaagttttgactccatctcacttggcttcttgagatcccttagcccctagttatgcttgcttctttcatattttccctatccttttattgggcttgattcgagaaacatagtgagtaaatttattcttctcctttttttagcttgcttttctcaactacacactgagaaattaggtcagcgacactccatcttttattataattgttgtaagttgtattgataagactaaaagagacagaaagtgcatgaagagcacgatgaataatctaagagtcaggaagaggaatattatgatctttcaacgtggcctgaacatttacattttttcagaataaaatctcttcccacgaaatacttttctactgttgacaccacaatagccacactcctatatgccattcttcatgagaagtccattgatatgggcaatgacatccaacactctattatggatcatgttcgcaatatcagaaagggattggctcatccaaatctaattacagcgttgtgtgccaaggttggggtaaaatactctaccttagaataaagtctacaaccttagcatatttttgacaggaatgttgtgtcttggtttattgatcctaaaacaaagaagacattgacatcctcatctagggaagagccacaatctgcagaggagcccagtcaaatgactgtgccagagcaccttgaaataatagagaataagttggcttctattactgaagacatgaggcaacaccgccaagagatgaggaagtgggtgatgtgctaggatgcttggctcgaatgaatgctatgagctttggggtcgaaatgtcttcttttccccaaccaccacaatggatgcagcaatacaacccgagggactgatgaggaggcaagagttgaaatgggagatgaccatagagatgccatggagttattaaaagtgttgttcagggagtttttctttacttgtttgtgttttttttcttcttatttttgttgttgcaataagttctattggggacagtattgtgtttaagtgtgggggagtgaacctcc

SEQ ID NO: 196635 - DNA, 2052 bp, Cannabis indica
ctagaattttcccaaagttacaatacatattacatatgtagtttcgtgcatgatttgaagagtatacagtgtttattacaatattgatttttcaatgcttgcaaataaactgtacgtgtacaaatttgctaataatattcaataataatccaaaaagttgtatatataaatgcatcaacttatagcttatttatagctaataatacaataattgaaactaagaacacagccatatggccttacaaaaaaatcccatcatggtactattattatttgggttattacaactaattgtagtaacaaaatctgaaaataccacaattcaagggtgcccacaatactgtggctcagtcaaaatcccatacccatttggctacaccaaaggttgttactacaacacttcctttcaactcacatgcaaccaaacattcaaccctcccaagccatttttccaaggtagtaacgtcaccatcctcgagataatactcgaggatggtgaattactagtcgagagtcccatagcacgggattgctacgacaagagagggaaactgatggaaaacgagagcaatcaagtggcttacactatctcgttttctcggtttcctctcagcacgcgcaacaagttcatcacggtgggttgtgacacagtgggagttgtgggaggagagagagggagactcttcgtcactggatgcatcgccttttgtaacaaaacaaacgacgttgttagcgggtcgtgtgaggggattggatgttgccaaatggatattccaaaagatgtttgggattttgggacgatttcggggcctatattgaataatcatgcaattgttcatgatttcaatccgtgtggttatgcttttgttgcccaagaaggtagttacaatttttcaaagcttgaccttgtgaatttgaagaagaaaaatacttctcgggttgttttggatttgactattgggaatttcacatgtgaacaagccaaggttatggatgattatgcttgtcgagctaagaatagtaaatgcttgaactcgagtaatggacctggttatcgttgcaaatgcttggatggctttgaaggaaatccttatctacttgacggttgcggtggtatgtattcaaatatgttatttttacacaatttatataaaaaagtaaggttattttttatttttacacaatttgtatttttacggaattctacataaaaatcttttttacaattaacggagtaacctatagcaacccacataaaaaccatcagatttagaaatccaaactgtaaatttaaaaaaaaaaaattaaaaaatagtaaatggagtaatttcccaaaaagtaaaatgatacttttcaaaattttaaaaatttgtatagaaattaaaagagaagtagtatttttctgggctttatatacgagtctttttgtgtgggagtcaaagatacaggcctagcctactgagcgttggcctgagatttgaatttagtaactctggaaaagtttacaagtggcatatatcactatcagtgtaattttttttgatttaataattaagagcgttgctattagcatccgtagtgcttagcactttctcaacatgtcgcgttgcgattggctagcgatactccctaaaaattattatattaaattatatgggacccgatactaaattggaatagcaatattgacacataggagggtgttagaaactactaatgcccctctagtatttctcaataattaatatatcatatcactatgtgttgatgttaatatttgaatgtaattttaatattgttgatttattcataatatatataaatttgaaagttgtaataattattttttgaagatataaatgaatgtttgaggccaataaatccatgccaagatagatggagttgcaagaacttaataggaagttttaagtgctcttgtctcaaagggttcaaaggtgatgggaagataaatggaacaagctgcactcctattgatcatacaacctctaaatttgtcacaacactttcaattgctttgggtaagcatcttat

SEQ ID NO: 196636 - DNA, 749 bp, Cannabis indica
atggttacaaaacaactataatgatacttgtatggtctctaacaaaattttggatctaattggaatttttatcaccatcaactttgacatctaccaaattaaaacaattgccgcattagtaaattgaatacaaatgaacaaaagtccttgaatcccaaggatctatatgacaaatttttaactactcgaaaaatttgttatatgataaagttcatggaaaacacctagttagcttttttagaaaattaatttgataacaaaaattttcataatcactatttctacaaaatgctcagaaaaaacaatcaaataaagctaagcttatagatcagaagtaacgagatattagagagtgatgtagtgaaacctttctcggcgttgttcgggggtcaatccatcgtttttgggattcttgggcttttgacctgccctagcttgagccctttcgcgatcttttgctctttgattaccgcgttcgcttcagttaaagaaacacacacaaacaaaaatataaactaaaacataattacgaacaatcaactcaaaaaataattcctctgctttctcagcttccaaacaatggaaaaaaaaaaaaaaaaagtaaaaaccgcagatcgaaggatatgagtcattatagagccgaaattaacagaaatagccaaataatactcacaaaccgaatataaaaaaatccctgtaactcaaggcaaaaattaaagaatcatcaatgatccgagacgagaaatcaa

SEQ ID NO: 196637 - DNA, 1578 bp, Cannabis indica
aaaaaaaaattaataagcggtatatttattttaaatgacacgatttaattagtagtgtcataagttcatgtagtaaaaatttaaataattataataatttatataaatgtgccaattgaagtaaaataataaaaaattatttattattattgataataaaattaatcataaaattatatttatgatatcgagattcattattacttttgatatgaatttactcaataaaagatttgaaggaaaaaaaacttattaagttatttggttcatacaatatcaaattacagagttttattttaaaattaattgataataagagacatatataattaatatttttataaatgaattaattaattccacggcacttgcagttataaacactatcacaaataatgaatgtaagtgtacacaatcaacaaacagtataaactcatgaatgttatcttctctacaaggattgagcttagtaataaaaggtaaaaatataatacttaacaataacatttttataaacataaagtaaatatttataaatattattaataagagtagaattgcttacacgatttcgaaaagaaaaaaaacacatgtaagtgtaataggtgcaaattttcaaccgttaaacaaagatattttagtccactttactttttttaaaaaaaagtcaccaaatctactgtcattaaattgtattgactttgatatgcatgtatcattaaaaaaatctcaatcagaaacacgacaataataaataaatatgagatcaccaacttaaatttaaaattgggcaagaaaatatgttaaatttatgtacataattatatgtggaatatggattttccctttgttgcttttgttgctattaatgttgacaagtcaattctaatgtattttttttattattttaagaaaaattcactctaaacaaatagtcaaggtttattttaaattataaaacttatattaatagatataatttgaagcataatactttagtgttattcattaattattgaactttttcttttcataatattactataaattaaattaaaatagctaatagctaattgagtaatgtttggtaacacttttatttttaattttttaattcaaaaatgtaaaaataattttttgtttttgttttttgaaaaacaaaaatatgttatgtaactattttgttttttaatttaaaaaataaaaatatattgtatttgagaacattgtcccacatggattaaatataaaagtattgagccatatataagaacatgacctactccactcatcactaattggttttgagatagaacctcattattcttgtcatggtatcagagtcttatccctagtggactttcgatccacaccttgttagctggccgaaagcgataaactacaatggagtaagtaggtttggggtggatttaatctccccaaacatagttttattttttggttggttgttcaaaatctgttaaaaacacgagacatgttgtatcatcataatatggcacaagattgttcgtgtttaatatgtgaaaatgggaaagaatgggttacccatttgttttt

SEQ ID NO: 196638 - DNA, 613 bp, Cannabis indica
aaaaaaaaaaaaagagtttgtagagaagaaaagtggcacatagtatagagtggtgtacacctgccatgccatgactgacactactatatatacatacaatacatacatacacatgtaataataatatatctcatgcttctactttgtctttcttactcataataataacttcacttcaccattttctttaattatttcttttttatttttcccataaataaaaaaaaacattaaacctgctcacccgtgacaaaacaaacaactatactattactattattatctctgtttggaacttggaagaagatattagaaatggggttgttagtcacattctccatttttaatcttcttcttcttcttcttatattattagtatgtgttaatggtggaagaatcccaagtacagttgatgggccctttaagcccattacaattcctcttgataaaagctttagaggtaatgctgttgatttgcctgagtctgacccacgtgttcagagattggttcaaggttttcagcctgaacaaatctctgtttctctttcttcaacttatcacagtgtttggatatcttggattacaggtctttttctctctctctctctctctc

SEQ ID NO: 196639 - DNA, 1402 bp, Cannabis indica
gtgtggtgtcactatttttggtagatatgattttgggtattattgagtactttttatggtgctataaaaacagcttaatagtcttttagaaatgctgtcctcatccgatcatgtgaggtgttttggggcaaatcatgttgtcatgctcttgtctccttgtgttagttgattcatttctgaaatcaagtaaaaactctttactcttttcttttttctttttttttctccagtttttggacggaagggtaatatttgttgaattggcaaaacctagatctgagctcaatcaaagacccaaacaaagccctggacggtattgatttcgaagagcaaagcaagctcatgtctctagcataatcatgtttgtaaagtataatgtatttttattgaaagcaatttttagtgaaatgtgtgattagtagcattgatattgtataataaataatattaagtagaggaagaagcaatatctcgttttaaatgtagacagattaatatagtatgtttgaaattctgacctggaaatttcatttgtttctgttccccttccgaaaccccttttttgatctcacaacattttatttgccaatgcactcagatttgtgaatttcatattattacaatgttagatttttatttgaatttataataatttttattagttttaataagttatgggttgattggatagttttttatcgtgttagttcatattgttagtgattaataattaataagcttaatatttgtctaactaagattaagtagttaagtgttctccttaattctataaatacatattattttatctcaattgtatatcttttgataatcgaataaaataaatctgtttctgatttagatatttaggaaagaagatttagttgatagtattgcactattaaattaaagtaattgatatggagtaattaggcatgtatacctaattattattgtgttctaaattatatataaattttgtatcatggtttatttcattttctaatatgtggtatcaaatcgccaattctatatgagataggatctatattttatttaacaattgattgatatatgttaatttttttaaattatatatcaattttgttattattttatgatgatttttttatgaattaatcttgaaacattagggcttttattcttcttgttataagttttcttttgatatattatatgcttaaaatcgtaatcgttcagtaatttgagagaattttaagattaaaattttagagcttatataattatataatgttaattttggaatttttgattgtgttgattataatcagaaattgattgtgtatatctcattaccgactaataaataatgtttctaacatgatttatttttgaatttggatgagatacatacgagaat

SEQ ID NO: 196640 - DNA, 1035 bp, Cannabis indica
cttgaagaagacctcccaggagtaaccgtccggtcttgtgcctgaggcagggccgggtcgggactgtaggtctgagcaagggcatccaagagctcatccattggcctagctactttaagaaacatgcagataaaggtgttagaacattaccaagaaattatgcatgcaagaacaaaacagtaaaactaatcctacctagacaatctaattcagccctagcaaagtcatgcattaaaaggcaggtgtcgtcatccctaagaaaactgttcgaggggaggaaccagctggaagacaagtaggctaaatgatctagagggataggtgcgggaggcccggaccccatccgggaccggcctaaaagatgacctaagttggaaaaataaaaactcatggcatgatcgccccattgggtagggggcattctaaatctaaggagactttcatcaaactctacaggcctacatcgagaataatcttgagcagaagggacatgatgaacaactaatggaaactcactggacccagaagtactggcgtcgggagccccagtgttgaaaaccgagaacggtagcttaggccgggaaggcacctactctttgccaacttcgacccgaagagccctcccggtagcagcttgacccttgatataagctaactcttgctccctcctaaagaggtacttcttgtaccggtcttccacggaggcgataatgtccacccggagtgccttctcggagtccggactgcgaatattgggacaaagaaccttggataagttaaaatcatccaccgagtggctctcagtgattagctaagccctcctgcagtttgtagtcgtgactaagtcccccacattcaacccatccttgtcgtacgtggagaagaccttgacatgctggaggaagagctgggtaggggcggtgcaatgcatcggaggtaccccgacccactccgtgagcagttttgggtgttctacgtcttggaaatcagaagaaaagaaaaaccggtggcaatattccttgacattctttagga

SEQ ID NO: 196641 - DNA, 1207 bp, Cannabis indica
gccatgattatttattgacgttcaattttactgcttttgttattcttgtcggattatggttattttccggtgtcctggtgttgttgtggtggttatgtctgtgattgtcaaagatggaggcctcatacttttgttttggtattgacagtaataaaagaaaaaaaaaagggaggacagtataaatgttaattctgccgtgtggcagtaaaattgaaaagtattaccccaaatccagtatttttgtaaaatgcccttttttatttactataatctactgattattataatttattgacttttattaaattttatttactttatttatcatgttactattatttaaataataaaaaaaataataagttttgtaaataaaatatgaaatagtcatcaatataattaacattttatttttttttatatatcttgtgtattaaagtacaatcataaatagtagcacaaactttgcacaaactttttttttttacttaaatttatcacaaattttaactcttctattaaaaatagtctaagattaatttagtggtgaaagaagaatgaaaaaaaaaattaaactattaaattattaatactattactctctacaacaacaacaaaaaaaaagtataattagattgtattgtatattataatgtgcacgccgagatgggaaatcccagaagagcattgacgaagaaaacgtagggtgatctcagcatttccctacaagtgcgtgcgtttatttcccttcattattatttatcactgccacaggtgagatttcagacttgagagagtgtgagaatgcaaaacgacaaagaaatacgacaaaacgacgatcattttaactgttcttcaacaaatattgaaacatgggtggggtgagcttgctcttctctaataaagatatttcttttcaaaagaaaattgaaaaatcaaccaaccaataaactagccaagccagccataattctcaatctgatgcacaagaatagcaaaaagccatctattttcttctctttaaataggcacaccttacaagctcaaacaaacaacaaaacatctttctctctctctctcttcttaaacttgaaactctattattttttctcttttccctatcctctcatcagaactgaaaaaggtttaaagagagaaggggaagaagtggcaggagagtgagttatacttgatttgcctgaataat

SEQ ID NO: 196642 - DNA, 526 bp, Cannabis indica
gggtcgagggatgattggcgggtgaattgtctgctgaaggagcgacggagggatccggcgccggcggagaattggcgagagataccccgcttcaattgggcagctatgttttccatataattgtagtaatgttttttgttgtgagtttgattaattggaaagaatcacatgagaacaaaacaatggagttggaatttgggttgattcggatcgagagcttgagaagagaagagagagctctcgatgccgattgtgggattggattttggaactaattttgtccaaaaacaaaaacaaccaaccaaccaatactctcctttaaaacagctacacctctctttctcctttcttctttctttcttctcaatttattattattattattattaacaatactctttctctttcttcattttccaatcttcattaattaattaattaattaattaatctattaataattaactattagttaattatatgatggtcgcgggcagcggctatcctatctgtcttttcttttttt

SEQ ID NO: 196643 - DNA, 1649 bp, Cannabis indica
ttcttgtctccaccgtccttaacactgccaactatcaatcatagaagagcgacatcaccatgaatttggcagcaaagaaaaaaatctccttaattgatgaatctcttccacgacctgatgcaagtaataacactctcaattcttggcttcattgtaacaactcggttatgtcatggctagttaacattgtttcatttgaaattgctcaaagtatcatgtactttgatcttgctgttgatatgtggcaaaatctagccgaacgattcaatgagggaaatggcccttaaatctttcaattgcaaactaagcttactaaattgcaacaaggtgaccattctgtcactttttatttcaccaaattgaacttcgtatgggatgagtgcaaagaatttcaaccgaatacaacttgcacctgtggtgcaatgaaacactttcttgactattacaaccagaaccaggcccttcagttcatgactggtttaaatgaatacgcatttgtttgtgcctcaatcttgctcaatgagcctattccaaatttgtcaagggtctttgccatgatcattcaagaggaacaccgacgcacctttggatccaatataatcttccccttgcttcctctgtcagacctccctcttccaatctcccaagaaacaagaagtctcaaccttcttgttctaattgtggcaaacttgaccatctaggttacaaatgatttttcattcacggttttccacctagctatggagacaagaagaaacaagacaaaggaaaagctaaggcaaatcaagctttaacaagttctttctctgatgatgcagctgcacaatccatcacaactgatctttcctctaaatgctaatagttgatttccctcctcactcaataactcaatcaagctgctcctcgagctgatccggctatgactcctgcaactttcaacatggatagtaatgaacctatttttacttctatgacatggattattgatagtggtgctacatactacatgtgttttaacaagctatgtttcacctctttttctaacacttcattcccaaaacatgttgttcttcctaatggtaacaagatttctgttaataatgtaggtacagtccatataagttcataaatctgtacctaatttcaaaattaatcttctgtccatcactgaacttatggataataccccttatcatatttttcttattaaaaaatcttgtgttatccaagatccttctcagaatgtggtgattgggacatctaaaaggcacagaaagttgtatcttctgcatcaaaagactacccccatatccactgccagtgaatctcttttttttttcttcaatacaaacaatgtagatcaatggcacaatcgccttggtcatccctctatgtacatttcaaatgtattcaataaaaagaatgactcttcttttatttctcatccattataatcactgctatgtatctcaaccagcaatataaaaaaaaaactcccatttgtttccaataacaactttgccatggatttcttagatttagttgacatggatatatggggtcccttccacataataagtacagaaggaggacccagaatccaagaacaatgtatgaagaacctaaaataaacaatggtagagcccatc

SEQ ID NO: 196644 - DNA, 514 bp, Cannabis indica
aattgttaatcaattataaaataaaatctcgtaatggtattaaatactttagtgtcccataataatattcacaataaatatatatatcaatcttaattaatatgtttctttagttaccctcctttgataattttctagataattattagtaaattaatattttcagtgatcatcgaattatcattataagtaaagttgcgttgttaacatttgagcaattgttattaagcataataatgtgcttaatattacaagaggtagtgtttatgtaattaataattttttatattttatttttttaattaaaaaatgtaagacataatattgaatcataggaccaataacaactaacaacataccacttacttgtattgtcgaactttaatctaatgtttggaagaataagaaaaacatggaggattttgattttaggaaggaaagagtatattgaaaccaaattcaattataatattgtttaatttaaacaacatatatttgttttaaggtgtttcct

SEQ ID NO: 196645 - DNA, 963 bp, Cannabis indica
tgttgtgtgggagtttgctttcagatatcagatcagctgaagagtcgtttctcttctggactttctcttcctcaaatttgtgaaaattttgttaaagcagcttatgatcctcgtatttctggtgtctatctccacattgattccttgaactgtggttgggcaaaagtagaagaaattcgaagacacatattggattttaggaaatcaggtgtttctcatagtgcttgaattagtactttaatatacacagtacatgatgatctaaatattggatgttccttggtttcttggtaattttttgtattttatggtttaaagtcaatcacaatttttggactgccacaaatacagaatagccagtgatgtatatgacatgatcatgcgttttatagctttaaactatgaacatgcatttaatagctttaatatgttcttatgaagtctgaggaaactttattaatctaaaagcattttcagtttatgactcataatggttctcataggtaagttcattgtggcatatgttcctgtttgtcgagagaaggagtattatcttgcctgtgcttgtgaagagatatatgcccctccaagcgcttatttttctttgtttggttttacagtgcaagcatcgtttattagaggtatgttgaccatgctgggtcttccatttatttttatttatttggtagtttagcgttgttcattgctgatcgaaattattctttattgcagtttattaatttttgtaaatgaaaaattatttgtaggtgtgctagacaaagtgggaattgagccacaagtggaaaggattggtaaatacaagagtgctggtgatcaacttattcgcaaaaccatgtccaaggaaaactgtgagatgctaacagcattgcttgataacatatatgggacttgggtggatgaagtctcttccgcaaaaggttattttccatttgctttttggtt

SEQ ID NO: 196646 - DNA, 957 bp, Cannabis indica
tctctgtacctctcaatctttctttctctcaatctcaagatctcctctttaaaagtcgtttgaactcagcctctctgaaatgataactgtaggtggtatttataggcttaagataaagatcctaaggtcagtggttgtaattgatgggttgttacgttagttacgacataacagacatggtaatctcctcgtaacagaatctccatgtcagcacaatgcaaaatgcttccagatgagacatacgctttcagaacaaatgattgaagcgtatgttgaagggactttccgaacagaaaaggaggcaaccagaatcgactatccagaactctcttccaagaggaacatctagccatccaaaactcccttccggaagaggactagctttcttaaagactacacccggagtggacatgatagtcatccgaaagctcccttccagatggtaactatcattccaagagtctttttccagatgtacaagttagctatccgggaacatactttcagaagacaactaactttctattacaagaataatcttatggagatcttttcatttgaataaactataccacaaggcccaacaagtagtttgcctcataatgtaaccctataaataagagtctccccaaatttggaattccatattttttaataatactcatatggtactttgtagcttaaagttttagtactctaaatttaaatttgattaatttgactaaatatttatagatcattaaataatcaaattttaatttgaaagacatgtaattgaaggtatttggttgtatttatataatatgattgatcaaatctaacttgaaggtatcacatacctaaatacgtgtgatttcaaaatatatatacatcctatattaattgatatattcatcggttggaatttagaaaagtttatggtgaaaatattgtaagtttgctcatgtgtagtgggac

SEQ ID NO: 196647 - DNA, 995 bp, Cannabis indica
agtcttttatttgaggaattacagttagatatttataactgatatttatattggattgataaaactatactataacgcgactaaattgatcgatgtacacccctagcttcaagtgggtaatgcataagctcactcccattttcacctttattttaattcaagataacatcctcaacctatgctttataataactaataaaattatctataatataatatacaaattatatttaatgaaactattaaaaattgtggcgctaatcccaaaagtttcgaattcaaaaagggtgactcaatttaggcctatttctctttgcaatgtcacgtataaagtcatatccaagatacttgcaaaaaaaaaaaatcaagctaatcttaccgagaatcatatgccctactcaagcggcatttgtcccaggaagaaacatctaggaaaacaatgtgattgtccaagaaatcatccattcattcaaagctaagaaaggaaaagaagattttttcgctattaaaatagacttggtcaaagcttatgataagttgtgttggcaattcattgatcatgtgctggccagctttgatggcctgatgaggttccgtaactaggttaatcaatgcatctccactacttctctcaatgtttgccttaatggaggccaggttagaaaaattgtcccttcgtgcggtatctggcaaggtgaccctcttttcccatatctgtttatctggactatagaaatgttgtcaagaattttggcagaagctcttaatgggaaggggggggggttaaagggattaagcttagtcaacgagggactcgcctatcccatatcttctttgcggatgatctgattatggttgaaagagccacaattgatgaagcggttactggaactgcctggaaaagttttgctcttggtcaggacaacatattaataaactcaaaatagcaatttttttaagtaagaacacaagtaatggtatgaaaagatggatta

SEQ ID NO: 196648 - DNA, 1186 bp, Cannabis indica
gtattagtcaccatgagtgtctcattacaatgctctaaaattatttttaatgggtggggtttggattttaattttcaactcttaaattttgagtgtgtaatatttaagcctcagaccacaataaatactaattgccactctactttttaacatttctataatcaaatacttttttaaagctgattcaacatatacacacataaatatattatctctcaactttttaactgtactctgctgattatcttgctccactaatcattactattataaaatataaatttctttgaaagctaacataggtgacaacatgttccttaaactagttcactcactactcttggtctttaaaaccaaataagaaaagaaaaaaaaaaagaagaaactttcaacagatcagtataaacaacagacaagaatctaaggatgtgataattatatgataaaaataatactcatcaaatcattttaatttattatatccttaaaagcaaaagtactgataggcagtacatgtatatatatataatgtaatatatatactgaccaggtgtagggatgtaagtgacaggaggataaacatggaggagataaaggcgagcagcaggagaaacgacgtagtttagtgtccatttcacaacatcacagtcatccttacctacggcaacataaacgtcgtcgtttcttccctcggccacatggttatttgtaactgtaagagtagtactactcctattctcttcttcttcttcttcttcttttaattccactatctccaaacacaaacttgttggtacaacaacaaggctcttgttaattttactatcatctttattattattattatcttcttctccttcttccactgctactatatctggttctggagacaactttcttagattatcatagtaatccttagcagataatgatggtatattgtaatcttcaccttccatattttcctctctctatggacacgtaaaaaagaaagaagaaagagaaagaagaaaaggtaagttagcatgagagtagtgatgaagtaacaagatggtttagtggttggtctgctatctacaaggaataataaataaagtaggttagttacgtctaactgtcatcaatgcctacgatattctagtcggtagagaagaaaaaaaaaaaagtaaaaaagaaaaagaaaacg

SEQ ID NO: 196649 - DNA, 835 bp, Cannabis indica
aaaaaaatagtatttttttttatcaaattcaatgagctacatgacaagtatttgtagagctgtatctatacacatattataaatttaattaattaaatattaatgtaaatgaaaacatatttctttgtttagttcacactttaaagtttttaattaaaaataaatcttgctttttaaacaaatatgagaatgacgcgttacgtgtttggtgttatacatgcaaagaaagaaagagaattttcagacaaaatatgacacatttctactataccatgttatagagtttttcattattggaacttaactagtttagtttagtttatttttatagtgtcatcatctactcttttctgtctttttcttaatctattatatgtatataatatgtatgtgagtttacaaatttaccacatgaaaaggagattattataataataaggttaatcaaccaagttaattgatgtttttggcttctacacattgaaaaaaaaaacatgcaaaattaaactcttcaatcaaatcatcaatactttaaaacaaaacaacaacaaataaaaaacctcaaaaacataataagaagatatctactactcatgttgttgtgttgtgtttgtggggtttctattaggcatgtggcaaaacatttgtctacattggtggatggtatcaacttttgactatagagataatatattagctaggaacaaaacaaggcaaccttaactaataataacaacattcatggccaaaataataacaaggaacaacttcaattttcctacgtataataccgtcctgtttggccgagcttctactttctgagaacaaaataagg

SEQ ID NO: 196650 - DNA, 1602 bp, Cannabis indica
ataaaatctggtgtttatatatatatgtgctcttgaattctgacatataaaatctaacagcaaaaccttaactgtcctggggtcctgaaatttggtgaacaaaaaataactaacaacaccttttgcagaagaaataaggttcctgattccatcctatctaagtgtaactatttcgtctatttaatttcctacaaaaaaaaaagtgtatttaagaagagcatgatccagacaattagttgtaattaacatatattgttgttgtattagtatataaaaagaaaaaaggaatgaaaatatgcagagttaagatggagcctagaggctccgaaagcaaatagtcccatatagaatatattatgtctccggtcaaacaagcaagtctcaaaatatcagacatgtttcttacgagggaagaagatattaagtatatataaaagcaagaaggacaagatcctccggtggccctacattattcaatcaaaatcctaagaacgcctccctagccacaatttcaaacatggaaaaagtatactgacccacgagggggggccaaggccaagtactcttttggcctttgatcgagaaaagccattattgagactttgagacttttaaccatctgcacacaaaaagaaaaaaaaacgtaattaatttttaattatatgatatacccttttgttattattgaaatttgatgcaagttcattttgtttaccattaggtacccttgaatttgatgcaaggtctagccaagagtctgctgcagctgtgttctttggtggccattccccaaagaaatggtggagtggcttttgggtttctgattctttaccagttttatttattcccctttctgatttgaaatcagtacccaatatgaaacaatgttgctggtcttgatcagctgattgttttatggcttctttggactcgtctgtaagaccctgaaactgaggatgagagtagcctctgtaagaattcaatagagaatgacatgagtcaggaaagcttcttgcgtttcctgatgattcaggaaagaaagctagttcgtccatgctttccttactcccttggaaatacctatttgtaaccacacaaaaacgaaaaacaaaaccaaaacttactcaatcacaactaaaacaagaaatataattaaggaaaactacatatataaaaaaagggaaccagtttgattctaaaacacctgtaatctttatcaggctctggtttgaggcagaagtaaggagaactagtattgttctgtggtgacaagccatagtcaggaggtctagaagaggaggaatgagagtacacaaagggataagctgaagggttattgtgaggattgttatgggcaccggagaggggttcacacattattgatgaggaagagagttgagagtaggaagagattgtgggacctgttccgggaagatttcggttgacagatgaaatggaaggagatggggtttgcataggtgttgttgatgatggtgataacatggttgtagtatttgaagaaacttccacaggctttcttgaacgatttctgcctctatgcatatgtctttcacagtattttgagtctgggtatgcttcttt

SEQ ID NO: 196651 - DNA, 1522 bp, Cannabis indica
cctagttccaaaaaaggaggccccggttcttgtaacagatttctgaccgatagcgctttgcaatgtctcctacaaggtaatttccaaagtgcttgctaatagaatgtgctacattctcaacaaaattatttcaccaaatcaagcggcttttgtcaaaggaagacaaatagcggaaaactctatgatcgcaagagaaattgtccattccatgaacaagaagaaggggaagaaaggcttcatgatgataaaactcgacatggaaaaagcgtacgataaaatggagtgggactttattatctcagttctaaataggttggggttccccaacatgtttactaagtgggtaagctcttgcataatggtggaagatatcaagctattacttaatggtgtcgtggcaggacgaatcaagccagaaagaggactaaggcaaggagatcctctttccccagcactcttcattctcggggctgatgtgttgtctagattaatcattgacaaggtcgacaagggtctgataaaaggctttcgaatgggaaggaacggagtggccgtaagccacttattattcgttgattgatgacattatcttgtttgggcaggccacaacccgtgaagcagcctctttcatggactgccttaatgaatattgcaagctgtctggccaaaccgtaaacatccacaaatcggcggttttcttctctaagaaagtccctgcaagaacatcgcaagcaatatctcagcttctgggtatgaagcggatgtctaaaaaggcctcctacttggggatccccttgttccgatctctaaagcgtacagatgacacaaaattcctggccgaccgggtgctacatcgagttcaaggatggaaagccaaacttccctgatatgctaggaaggcttgcctcgttaagaccgtgggctcttcaatggcaaactatgtagcagcatcggatgttataccatctaccacagctaagaatattgacaagttccttcgtgacttttggtggggtgactcggaacagaatagaacactacatacaatcgcttgggaaaccctctgccgcccaaaagtaaatggaggtctcggttttaaagcaagtgaagcaatcaatcaagctttcctcatgatatgggcgtggaaagttctaaccgacaaagaaagccttcggcgaaaattcatggaggccaaatatctgaagacttcaagcttccttgacatagatataaaaccaaccgactctctgctttggaaggcaattctgcgaactagaactcacttggagaagggactctatcgaaaaattggagatggaaatctgacttccatctggtttgactcttgggtgccgggggggaccctccaacctacgcccaaacataatgacacatttggaatgagcatggtaagtaactttatctctcaaggccgttggaatgaatcactaatccgacaatggtttcaggaggatgatgcaaagtgcatactcaatattaccctccccaacacaccttgtga

SEQ ID NO: 196652 - DNA, 625 bp, Cannabis indica
taatgagtgtaatcagttgcgagtcaagatacaatttctcatcaatgaaaaacatttttctcttcagcggtatgtatgacctgacgctgcagttggggcaatttgggggccctcacctagttggaaattcaaggaaggccttagaaaggtatgcaagatcgctctaaaatgaactgagagttgaagtcttggaagttgcagaatgtcctccaaagcctcaatgttatgggtgtgaacctatcaccttcagagactttgactcatatcatgcagctaccctcataaagatcccttagttgttgaggaacaaataactaatatgatagtggctagggtgatgattgatgatggagcatccttgaacatcatgtttaaccaatccctaatcagatgggtttgacactagaaaacctaaaaccatgtgagcagctaatgtatggtttcagcatagccagtattgctccatgttggaagatcaaactaccattcactgtcgaaattgcccaaagcagaccgccatcatggccatattcatagtggtggatgtgaagtccccttacaacatgatgctcataaggctagccctatatgtaatatcctggtaagcctaatggtaaataattag

SEQ ID NO: 196653 - DNA, 1549 bp, Cannabis indica
atttttgtatctgttaaaattttattttcttgtagcattgttaaatttaatgttttgttagaatctgtttttattttggtatttggaactagtttcatttaatttttatgttctattgtataatttaggtttttaattggttattttggttatgttatatttttgttttgacctgtgggttatgtatgtgattcatacggttggccttaattttgtatattgtttaaccagttatttttttatatatatatatgttcattaaaatgtcgtgtaatgtttatatatcagtaatgcttatatacctgtaatgtgtattattgacaattcttattccagttttggttctgcgtataatttggtttgttttttcagtttttttgttttcaattttaattagcattgatttttcaggttctaaagataaggaagaggatcagaagcaattgaagaacttacctaaagacgatcggagctgtagaagacgatcggaggcggcaatcattgctgaagctcagtcttcagtcgttaaatttcatggtttaggagaagacgatcggaggtgactgatccttgcgtttgagttcgattcgcagatcgaattacagcgatcaatcgcggctgctgattgtgcgattctgagagtgacgatcgaagagaaaaccgtagagattagggagagagagagagagatcgaatgagatagattctgttatgtttcagtttagaaagtatgggtttttccattttaagcttatttatatgtttttggatttccatatttttccatttaattaattttttttccatatctttttgatttttttttgtgccataaaaagtaatggcaacaaaaatctaatatttatgaaaatcctcaataaataataataaagtgaaaacttatcaataaataatacattacaaagttgaaagttgacattgagaagaaaatatgagttaaagcattacctgtagtaatgaaaattattcatataaaataagttaaagctttaaacttaaatataaatatttatgtactttttactttttaattcacaaattatattttcactgccaattatttcttctcatttattattttatttcacttctcctaaatctcatgtgcggagaagcacagagattatactagtatacatataaatacatttttatatttaatttttgtaacattttctctctcttacaaaaaaaagaaaaaaatcaagagcactcatctatttttttttattttttacatgatataaaagtagtatattttttttgaatatcttgttgtttattcagagttaattaataaataatttgtatattttaacaagattgatttctttttatttttctgttgatttatagttaatttacttatttttatgttgttatttaggtgttctattgatattttatagttatttttatgtgttttccattttgtatagttgttgtttagtttatgtgtatttttgtgtgtatattttcaatttattctagagaatattttgttgtatatatatgtgcatttattttg

SEQ ID NO: 196654 - DNA, 1098 bp, Cannabis indica
aaaattattcaccccctgttcatcaaaaataaagagtatttataggcacacaagggataaagggcataccctttatcgacctagggttttgtactctacacgctgataaggccgatattatcataggacaatctgaccattggttgataataacattcttcatcgtgtggcgtacaactatattaagggattttgtacaaaccaggacacgtgtcgtgcaaagttctctcctttgcgaaatactctttaactaggccgttgggcaaaaatcatgtccagaggtgcgtacgcgcactaccatggcctggcatggggcacacgatctaattttgcatttgaaaaaggtgtaaccatctatagagtaatttttatatgatgctgacgtggtcattgcctgtgagactgttattaccctttgggtccatcacttaaaggatttacctcaactactctccaggttcgggagatattacttgtccgcaaatggctcattccatcaggtttctagtgcacacttctaggattgctgagatatcccctccatgataccttaggagtgatttttgactaatcctttcagctaatacactttgtctcttaatcgtgtgccacgtgtcttacgcataagaatacagataacaccctttgattagctagggttaggatagaaattaaaaaaataccgcaacatgccttagttagtagggtgttgcacttttgattgtggtgaaacatcgacagtgttagctaagatatcaaggaacaccatcaggtgtttgggagagagagaaaaaactttctttcaagcctttgtgttggtggtcctcccttctggtatcatcggtgccaagataggtggtggtgttgctgaagcagatgaaggaggcgacgatgaattctgagcagcgagctgttggatttgagcgacatggctaagagctttttaggctagctcatttagttctctcatccatcagtccaatggactaggcttatttcatggagggaatggtggcccttttaattttcaccaagctttttctctaaaaaattcaaaacctcaaggaaaaatttgagggaaatagtgaagaagaagaa

SEQ ID NO: 196655 - DNA, 619 bp, Cannabis indica
attttatttttattttgtagataaataaactaatctatttttttgtcagatgtatagtaataataataaaaataataaattgattttaataataataataataagttgccttacctaacagatagaaataggccaacttaggcttataaatttggactcatttcattacataaccaaaccaaaccaaaccaactttcaaaaactcaaaagttgaccactaaaaaagctttaagaagaagaagaagaagaagatgataatggtggctgtggttgcagagcttctagaagagtattacacagcaacactggctagagtaacacagagtcttttatcatcatcatcatcatcatcaccaactctaactacttttcatggttttgccagaaattttcattctcattctcaatctcaacactcatctaattctttcattctttacttctaattaaactacttttgattacatatttatagccttattttcttttcttgtaataattatttattcataattaataatatggtttcattttcttaatttacttctcttcatgtgggatttttagttcattagaaattgttaatgttttgtgtgattttttcatttttttttggggg

SEQ ID NO: 196656 - DNA, 739 bp, Cannabis indica
tatcctcaaattctaacaaatttcgttctactactcttgtttattaatgtttttaggtaattgtgaactcgtttttccttctcagcttcaccggtggagacaccggtattgcaatctcaaagaaggcagggatgatacctctccaaatggaattgggaggaaaagatgcttgcattgtgcttgaggatgctgatcttgatttggttgctgcaaacattataaaaggaggtttttcttacaggtgaaaatgatgtcaaactagttaaaccatagtcattttgatggtgttatagattcccatttattgtttttttttctgtttttctttattcaacagtggtcaaaggtgtactgctgttaaagttgttttggtgatggaatcggttgcggatgaacttgttgagaaagtgaaggcaagggtagcaaaattgagtgttggaccacctgaggaagacagtgatatcactcctgttgtttcggaatcttcagctaattacattgaaggattggttaaggatgctaaagagaaaggagcaacattttgccaggaatacaagagagaaggtaatcttatttggcctttgttattagataatgtgaggcctgatatgagaattgcttgggaagagccatttggaccagttttaccagttattaggattagctctgttgaagaaggaatccaccactgcaatgccagcaattttggactccaggtacatacttgtatccaccatat

SEQ ID NO: 196657 - DNA, 794 bp, Cannabis indica
gctgcatcctgtatcactcctcccagtccgacaaagccccttccccaaaccacggacgcatccatcgctagagcaaaggattcaggaggaggtggcaaccattgagtaggtcgctttacacctgggtttgcaaggctcattcccaattaaaggtctcgccgaccatacttcttaaactatgatagatggttatggactaaatctagaacaacatccaatcttgactgcttgttgccaaataatacttagtttctatcatactataaccacaaaagggttgtcatcatcaattcaaaagtctcacgggatagcctgtcatagagaaataagagaatttcttccatttgtccatatacacatcgacggagcaccgaacacacccccaaccgatgccacactggagacaagccagaacacaaaaatagggcatgctcaagagtttcagattcttctccgcatcgtgaacaacaaagaggtacatgaactttctgagagataagttgtgctgctatggtaacgccaaatggaacatacgataaacaattttttttacctttggtgacatattaagattccatacttcattctacaaacgagttaactgggataaatctgccactccctcctcaacctgaagcgaccacgccaatgagtagctactcttgacatttcaaatgaattatacttttcttttcaaatgggatggatttcacttattccactcatcgtaaagataatgagtgttgctcttagacaccaacaaagtgatgtcttttaaatttaaatgtttattt

SEQ ID NO: 196658 - DNA, 1506 bp, Cannabis indica
gagagagagaggttgaagaaattctaattttctaatttcttcctaaatgaataaaagaaattattctagtttattcaacaatgaaataaacttaagaaagtcaatatctcaatttaaacaaaataagggaaacaaaataagggtaaaattactaatttactccttgcttcaccaaaaagtaatcttctcacctaagggtattttggtcacacttataatcccaaacattcccgatattctccatgtctatctaaatcgccatgctatttctaaagttttcaaactacaataaagtgactctatgagccttacttcgcataccacttttaccgagcataaaataaaaaatatgaaattttacatataacataatcagcacacctaggattcaaatatatctccacaaattcgtaataataattaaaaatctaattcttaattaaaccataattatctgttgattctcatattaaagctaagcggacattacacatacggcctcaggtaacctcgcaagatgagatttccaatttcatctttcagctgacgatattcttcaatggtatgcccgatgtctctatggaaataacaataattattaggatctcacttatttctcacatgtctcattggatcaagtctgtgaaatgctatccagtttttgttggcgagatagatatttttacaagtttcattcaattccatatacaccaagtatattggaacatgtttctcatccatcttttgtttctttttgtcttttaacgagtttctcgactcatcctttctcttggtattcgagccaatgggatttgaatttttggctttggtggtcacagtgcttgctgttgcggtacttgtgttggatttatctcccgagtcggactttaatagctttatttcattttgcgcttcttccatccacaagaaaatttgtgctctttcgttgaactcgttaatgtttctaacaagacgaccttccaagtcatcccataattctcctcctacagttgacaagtcagttgtcattccagcttgaagagttgttatctaaatattgtcattgagattcctgactttggctgcagctagccgtactaaaatgacttaagtatgcctttagggattctcttggttgctgcttaacattggttagcaaagacacttctggtctccgatctcttgtagctaagaattgctttttaaaatcctttgataattattctcaagaagttatagaatggttggtaaatttatcaaaccaactacttatggctctagttagtgaagtcgagattaatatgcatcagaagtttttagaaacattaattggtctcattattatgttgaagttgtcaggtgcaccgcaggatctgttgtaccatcatattgtgcgacgtgtgagtttttgaatccttgaggaaattgtgaattcaaaatatcaggatggaatggttttgtctcttcgtctgagtcgtatcacggtaatttcccatattctccatc

SEQ ID NO: 196659 - DNA, 1877 bp, Cannabis indica
ttctttatttgattacatctttgatggctcccactcaacagtaggagtctggtttaatgcatacacaagtgtgcatttaacctcttactattgatacttagggatatcttgttgtgacattttatcttaatctaaaaatataaatttcttcttgactaagccatcaacataacattctagtattaacaataatgtaaaatatttgctttagattaagtaatcaatagagataccataaaatatttcataaggaccaggaaatgtgcttaaatcttttgaatagacattggaaattttcctatcttatgctcattattctgataaattattgctatctatatgaatggttagagtaacttttcttttactttatttttaaagttcatttcttgcacatatcatagtaggttatcactagtgtcatccaaataataacgaattggaattttaaaatcctcccactaagataaggtgcagtgattttatgtccatggacttttaatggtatcaatttattaagggatctcaatccatggcagattatctaaagatgaaaaggatgtgggctgactccttagctcttgcaggtgaaccttaccctgagagacatcttatttctaacattttatctggtttagatgcagagtatttatccattgttgtcctgattgagtctcaggccaataccacttggaagcaactgcaaagtatgttgttaagcttcaatagtcgacttgagaggcttaatgttctctcatcaagtagcaagttggtaggaaatgcctctgcaaattttgcccagaaacttggatcgagtggtcatccaatacgggaggacagaggaggttcaacacaggtcgaaatcatggtcgaggacaacaaaacactggttacacaagaggaggtaggtatagaggaagaggtcaagggggtagaagcactggtcccaaaccaacttgccaggtgtgcggcaagtatggacactggtcccatgacgaaagctacatgggaaaccagccaaatactgcaggaaaccaagacaagcatttatctgctcttgtagcaacacctgagatgctcaatgacgactcatggtatgctgacagtggtgcaagtaaacacctaacagctgatgctaacaagctgcaaaccaagaccgaatatgagggtaaggagttaatcacaattggtgatggcagccaactacctatttcacacattggtacaggttatattccaacaaacacttcaaactccctactgttgaataatatgttgcatgtacctagcatatccaaaaatcttattagtgtttcaaaactgacagctgacaataatgtctcaattgaatttttctctgatttttgttgtgttaaggatcaaagcatcgggaaagtggttctgcaagggactcttaaagatgaattgtatcaactcaactcatcaccaaagccacacaagttcactgccctttttctgctgttgctgttaacaagccacccgttactcatgttaatcatcattccctaaaagacatttggcataggcgtctaggacatccatctgttaatgttttaaatcaagtccttagaatgtcaaatgtaaaatttcctttgaatgaaactcaacacttttgtggtgcttgtcaatatggtaaatcgcatgcactaccttttcagaattctttgtctaaagctactagtttacttgacttagtgcacactgatttatgggggcctgccccataacatcacacactaatttcatatactatatacacttcctcgatgaccatagcaggtatacatggctataccttcttaaaaataaatcagctgcattgcaagcatttatttagttcaaagctatggtagaaa

SEQ ID NO: 196660 - DNA, 1613 bp, Cannabis indica
gaccgaccagcttactaatgttactggctagcctgctactccattggacactcctatcaagataccttcaaaatttgccacccaagaacaagccagtgataacatgaactcttcgactccttttgatatgctagagctttaaagctcttgtcattttatttttttgcacgaccaaaaaggccatgacatttgagatatatagccagccagccaggcgacttttaatactagctttagtttttgtcaagacatatggttggctggggagcctttaatctcaaacagattaccttttatgtttaacaaagtcatatttgcacatacttggccttcaatttttttgcattatcttcgctttaaatttttttcttaagtattttcattgtgcttgtcttatgtcgtgcgggagtaggtgcctcccaagtgattaagtaaacttatggtctcttggtcacttacaattaaccaagtgtttgagcctttgtctgtttgatttcttgggcggacctatttgcttgcatgttagatataatattaactttaataagtcaattattagcaagttatttgacacaatctgagtgaaacaattacttttattcatttacttttcttacaaatgtgttggtcctgggcaacacacatatattaaaaaataaaagcttaaatgcctcgagcttctttcaaaacaaaagtatttacatacttctacacgacatatcgtgaagaagccaccacttaagagggatatattattaatgaattcatgtgcggcataccgcctaggaacaggattagctccattttctcattttacaaactaccttattagtagtactttctgagatgctctttgttcgaatatcttagtaacaggattagctccattttctcattgtactgactaagtttgtatgccctcaaacttgtgatgtccataacttggtataccccttccgagtttgggccaagtacccttgatgtagggtcttttgtgtttcgaaagactctttgaagtaccatatctcctacagagaattttgtactcttgacatgcttgttaaagtatctggccaccttttgttggtatgcttgtaaattcaagttggcctaatctcttttttctttgactttgtcaagtgattctgttaggagagtgttgttttcttcttggtcgtaggataccctcctatgagacggtggtcccaatttgatggagagcatttcttcatagccataagacaatgcaaaaggtgtctgcccggtggctgtatgaacaaagtacttttagaagttgttcgggccaatttcccttttcctctttaagatgctttttcagtgtgtatttgagagtttttttacaacttctacctgcctggttgcttgtgggtgagaaactatagagaagcttttcataatgtcgtattgattgtagaagtcggtgatcatatcactgtcaaaatgtttacctttttctaatacaatcttatatgggagaccgtattgatagatgatgttttcaacaacaaaatcaaggacattctttgaagttatattggctaatatttcagcttcagtccattttgtaaaatagtcaatgatgaccatgtctt

SEQ ID NO: 196661 - DNA, 1147 bp, Cannabis indica
cctgagtggaagttggaagacataaccatagactttgtagtagggttacctaggactattggattacataattccatatgggtgatagtggatagattcaccaagtcagcgcacgttttacctatgcaattgacttatagtgtgaccaacatatcgaattgtacattaaggaaatagtgagactccatggtgctcagaagtcaattgtttcaaattgtgatcccaaatttacttccaagttctggaaaagtctacagaaatccatcggaaccaagctgagattcagtacagcttttcaccccagacagatggtcggtctaagagaactattcacatattggaagacattatgcgagcatgtgtgatagattttgagggatcttggagcaagttcctacctttgattatttttcatataataacagctatcagagtactatcggtatagcaccttacgtgattctgtacgataggaatgtcgatcgcctatccactgtgatgagattggagagagacgttatcttggacctgaattggtccaaaggaccattgaagccattgagaagatttgatctcgtgcttgcttcacaaagtagacaggaaagctacgctgatccaaagcgtacggtattgaatttcatgtgggaaattctatatttctctgagtgtcacctatgaaaggggtgcataggtttgaaagaaagaaaaaaggatattgtagtgtattgtagttgaattaataggtcccattgtattttgtggatatcaatgggagtttatagccactaaaatatagtgtattttaggatattgaaattgacttttaatatgggtcccactcatttaatgttatgtttaattgatgtaaaacatactcatttttttaaaaaaaattacaaataaattaaacactcattttcttttaaaaaattaaaaattaattaaaaaactcttttgacattttattacacttgctattttaactaatcacttcacaattttttagttaccaaaactaaattagtaataaataattatatatttatttttaaaatttcacatttcattttcttaagtcacataacagatttaaattttttaataattattttttaaacaattttttaaatttatattacattaatag

SEQ ID NO: 196662 - DNA, 1543 bp, Cannabis indica
tgttgtttacattttgcagttgcatgtggaatatcattttccttcagatccaaagtactttgacataagcaattaaaaatggtcaataaccaacacagtttcttctcagaagatattcatgtatgtaatctctgtacatatttgttgtacattctgttttctatcatcctttgggcaatttgcctgcttaactgtaaataattttcattctcaataagtagttgaattagtaccttagttatcattttctatgaaatgaaataaaaatacattggaggggtttctaaaggcactaaagaatagcatctatatatctacataaagcaaagaatcaagttgggtgacatgacactttaaaatcacttgaggactcttatcttaattctttaattttttatatttataattctctttttattctattttacaaaaaaaaaactaaaacatttaatctatttatattacataactttaagtgttagtttggtaagccgtattatttaatacaatactaatttgatattgatttgtattaatagaatattttcaacatactcaactccaacaccaactacgggtcgagtcctgggtctgaggttcgtgacctgcgtctgggtctgggtacggattctaagttcgggtttgggtccgagtatagcttcgcatcctgagtctcggctccgggtctcgagtctcagctttggggccgattctgaatccaggttcgagtgcgagtctgggtcctagtctaggttcgggtctgggtgtctaagttggggtccgagtccaagatcgagattcgcgttcgggtcctcgagtttgggtccaggttcgggtcgcggtctaggtctaggtccgaagtccgaagtccaggtctggaatcagggtctgggatcaagttgggtctaggtctgggtccggaactgagtctaggtccgggttcaggactgggttcgagttcgggtcttgggtcctgagtttaggttcgagtctagctctgggtctcgagtctcaggtccgagtttgggttcagattcgggtcccagtctgggttcgaggttcgggtctgagtcttgggtccaagtcccgagttctggtctcgggtctaagtttgggtctaggtccgggtgtgagtccgggtttggatttcaggtctgggtccgagtttaggtcccaagtttgggttcgagtctcgggtctcgggtcccgagtccaggttcgacactgggtcctgagtctaggtcggagattggagttgaccccgaatcctttataaatattataatataaactaatacgaaccatttgttatgtattaaataatacaatttaaattgtattaaaattttttattataataattaatacagtatattattttattcaaatatagtgttatttattatattaaattataaggttcctaaattaaacttgaggagaaaggcatctcaatgtatatatgaaggaatctgtagtgtctctttttaataagttatgataaatataaaacaatttgatgataacttatttataagtgata

SEQ ID NO: 196663 - DNA, 781 bp, Cannabis indica
tatttttatccttgaactttctcactaaaaaatcatgcctcttgtagtattaaatatatcccttgaactttattcaataatacgaaaattagtattatgctacattaatacattctatcaattttaaaacaaaaaaaaaaaaatacattctatctaattttctcaatttattttactcatatgacatgatattatctaatttaatttcctaaataatcaaactaaaataaaaataaagtttacaaaatttttattttgatttcaattttaatttattttatgttttaacttttttctttggtaacaaattagtttcaagttttttttaagtagtttacaaatataattttaacattaaaatggttttcattataaattagtttgaaattagtttcattatattctttattaagttttcttttactatataattacttataagaaattataaaagttttacataactcttaatttttaataattgataaaactaataaggcatttttaactaccccgatattacgagagacacaatcggataaatgacaaagtttttggggaaggggaataattttattctttaataaaaatcttaatttttactcactaataaagttaaggggaattttcgacaacgctaatattacaagaggcacaatcatataagtaataaatttcaggagaaaataattttttattctttcactacaagaaaaggcctttttaccggtgcatttcgccaaatgcgccgataaaaattgtcgatataaaacaaagcctg

SEQ ID NO: 196664 - DNA, 640 bp, Cannabis indica
tatatatatatacagatacagagcaacttcatttaaacacaacatccaaccaaaacaaaaagaaatatacaacaacttattgttttccttcttatgttaagtttgacacaaaagttttttttcagtttgatatcgaaaccaacaagatcttttccatccatcgaaaccaaagtcccttcctttatcagaaataccatgtctgaatcagatcatacccctcaattcaactcacccagattggtagtgaagaaggttttggccaagcttcaacatgaaggtgatggagctgttgttagaagaggcattggcaggtagattttcatttgggtcttgcaattttcttttctagttatccatatgggctcatgaattttcattctttcttttcttttctttatcgggtgatttggggaacaatatctttcattatgtttgatacgttgttttagctttagtttcttctctctggtttaatgatttggtttgtgggttctttgacttttcaggaatgatttgaggaatttggatccatttctcatgctggatgatttttcaggtacaagaaagcttttattattattattattattattattattattatatgatctgtgttaatgttataatggctaatggcatg

SEQ ID NO: 196665 - DNA, 928 bp, Cannabis indica
attgtgtaacatctatatgaaaattaagagtgttgagctacaaaaggattataagatagcatatattaatgatatgttatgttttctacccaaatataattggcaatgtgtaagtgacgttttttagatttgtcatatgacttgagttataacgtggaatttggtgatttgaagttatgagttatttgaactaaactaagctagttaacttccaataacgattttaaaaaatggtagcaattgagagaaggtttctttcaaatattgaaaaatgactttttaacttttatgacataatatgaagtaacctatatagacaacatgagaaaccaagacaatggtaaatttcaaaaacgaacataaaagctaaacctatatatttttggtgtgataacttttgcagaagaacaagaaactaatacaacttttattcttagtctctctctatgtcattattaacctcctaaatatatatctagatttctcatgtgtcaagtttgttctttcgattcttggcttagcttgcatttatacatgcatttcttttaaatttggaataaagttttactttctatattagagtaagaatagtttaaaataaatatggttttcatagtttcttacaactagttattatttatataatttgtaactaactagtaactaattttatcttaaattactaactagtaactaattatagtataataaataactaagtagtaaccagtcttaattttacagaaattttagaagcataacgactacaattaaatatttcaaaacaattaaaagctattaataacaacaaaaacaatcctaaacatgataaaaccatcacatcaacatttagcaatgcaaaaatttactacccattcgattgcaatacatatattcgtagaacttacttcagtatggatgaatattt

SEQ ID NO: 196666 - DNA, 954 bp, Cannabis indica
tcaattatattacatataaataaaccattaaaaaaagagaaagaaaaaaaaaactcatgatttgcaattttctccatagagctatagcaggcttaatttagttttagtattaaattgtatgatgacagcactatattaatagataaagaccagatcaggatctgatatttcaaccaaaattaaaaaaaaaaaatgaaatggttgtagagacagactagggtcacgtgatttacttgttttagggaaattagtcataattattccataatagagtattttgaatcattgtttaatttggatagcgataagattattcagtatgaggtggcaaccggcaaccacgccacatcatctccagtcaccaagctttgaacctgactagagtacacgcttcacatttcagtttcccttttccattattttcaaacaatacaaaagtgaaatttcttcaaaaagaaagttcttttttgtttgtttttcttttttaccaaaacaataaataaagagaaatttacctggtatactaacttttgatattttttttataggcagtatttttgacttttttactgtattttttttataagtttcatactgcagtatactgtgttaagttttcactggtgttctactagtgttttttagttgttctattgttgttttgagttgttccgttttgtgttctactagtattttataaaaacacaatacttttgaattttttttcgtgtgacagtatttttgtaaaacttaactcaaatttcaatatttttgtaaatttctctaaataaaaggttatatcaatatctatccacttcatagaacgcggcgatacgattttgaaattcaattttggttggttgggaaatgtcatcttggaagagttactaaaataatcctcaagtcaagttgaatttttagcataaaaatgaagttgatgagtaataaataaca

SEQ ID NO: 196667 - DNA, 1502 bp, Cannabis indica
aaaaaaaaaacaaataaataaagaaaaagtggagaggaataataattgagaggtgccttctagttctaaattgtcgcagtgaagaaggacaaaaaaaggtgttggagtgtgtggatatgctggaaacaccggaacatgacacgtcataataagagggtcccacgttagcatatgtccagctaggcagtcctcgttggcatttgtctactctagtatgtgggtggggcccttcaactacttacaatttttcggaagcacgagacccatgactcaccatttaattacgtaccatatcctataatctaatctaattaattccacttatgatattaacagaattcgtatttttattaattaaatatcgcgtttgatataacatcacctataaaaagtattgtagatactactggtattaacagaatgttcaatatttatctctcttatatttttacaaggaattcataatttttgggatactgatttttcttcccaccataccaagagtgttgttatagctataattattataaatacgtactaaaactctcttaattaagtttattggtgggtcttttgttatgatccatagttacatatacacgtgacaaacatgataaaccaaatattgttctctaaatcacatattcaacattgtgtggttaattactagtagggattttattagaaataaataaatatattatagcaatattatttgcttaaaaagagataagaagtgagcaattaattattttagcagtggcttcgatttcgatcgatctaattagtttgtgaacgtggccattaattaatatatagaagagattgtttttagtgttattccattaattaaaaccatgttctctcatgaaatctttgtcaccatatgataaaatgtccccttcttcatctaaccaacacaattaattaattgttctcaatatatataataatacgtattaatttacattaataataataacttacattaagtactatatatatatatactttgttgcatctcttaacaaacaaaaataaagaaggtatgaatgaggaggataaggcatttcgtaccatcaaaaagacccaagaatcattatgatatggcttattaataacaattatgggacacgattttgttatgtgatgtagtcgttagatgagagagttatttaatctggggttaataagggtaattagagttaaaaaaaatagtaatgtaccccaagacctatctaatgtaccacagaacacattccgtgaaaatacattacgggacaaaatcgtgtccctaacaattataaacccatatatatatatattagttttgtacttgtagcctagccctcattttatttttctaaatttatataatataatatattgactaaaaaatataataatttattcctagcttattgttatttctatgtctagtacttataacatttaattgtccatactactctacctaacactctactcgttttatttattta

SEQ ID NO: 196668 - DNA, 1493 bp, Cannabis indica
gcaataggacaaagatcccccataacagtcggattcttcttttttcagaataaagaccaagtttggataattcaacccatttggcatcacacaagaggcaaaaaaattcctaaccaataaaataacatccttactcacaacggaccaataagtgataaatagccagagtcataccatcacgccctggagatttttcaggatgcatctaaaacaatgactctttaacctcttcatctaaaacggctttcaacaagaccaaattatgatcatctgtaatatccaaagaaatgcaatcaacaatctcctaccattgaatgatatgatgagaaaatgttggaaaataatccaccatgacctcccccaagccatgctcttagacaacccattgacacatagaatttttcagttggtgaattgtataattcttccatctagtcgtggccttagagtgaaaatactttgtgttttgatctctatctttgagctacgattgcttcgatctctggcgttcctgctaatctagtattaccgccagatttttctttgctttgttaaactactgataagagacctcatcgcgcctgtcctgtagtttctttatagcaacccgagtggcagcaatccttgctttaaaatttccaataatttctcctctccgatccattaacctctgcctacaagtagcaaccttcatattaattgacgggccttgaagcaaaatccaagtgtcttgcacaatcaatccacacatttcctccttaagccacacattttcaaatcgagacgtcttatttctcctgccgctagtctgaaccaccggatcaagaaaaataggccaatggtctgaatgcccaaaattaagattaaaaagcttagctgaatagaacccagacatccaatttgagttagcaaaggccctatccaaccttacttccacccatcggcttgttcctctacacctctcccaagtgaattgatgtccatgaagctccaactcatacaaagcatagtctaaaataaccgattgaaacccctctaccaaccacaacggataaggaactcatcctctttgatacataacattattaaagtccccattagacagtaaggcaacgaagattcatctttaagagttattaataaagaccaagtgttgtgccgaagtacctaattagcttgcccataaactcccgtcaagcgccaatcatctaaaccaaccacacgcaccacaatatctatatgatgccaagaatacctaataacctttgtctcatcagcattcttccacaacattgcgatattccctgagtgtcccacatcatcaatcgaaaatatcccctcaaattccaaatgacaaccaagttaattaatgcgatttgtatcacaaaaagttttacatagaaaagtaaagagggctttttttgagaaacaatctcattaagaaattgagttgtttattattattattattattattaattattattattatt

SEQ ID NO: 196669 - DNA, 1095 bp, Cannabis indica
aataaagccaaatatttttaatgttaaactacataactttcattaaaaaataaataattttagaaatctatatatatataaatttgagacataaggcggtcacataacactttaaaatcacttcaaattcatctatttattctctcattcattctcttacttttttttaattttttattaaatttatgaatattgattttttgatacattttttcgtcaactgatctaagaagatcgtaaatgagtagattagactcatactatattggtcgtcagattgcaacctgttttaattaaattaaaaaaatcacatacatagtttttatagtggtcacgacctttggcgataatgggttagtccatttgttgtttaattaacttaatatcaaacacacatcagagttatgttcccaaagtagtgttcttgactaagtaaaataataaaatgtcttaatggagattttttttagatttctctctggatatagtctccaaagatatttggaaatagaacttaaactatttaggtgagtgatggctggagtttctcaggaaacacagggactaatccgtatctcaatagtgcggttatcaaaaggattgaatacaaaagaagcagtcccctttcctaggtctagatcgtaaccttatatggggctagggttgtcactccccggagaatggttataaatattcttctatgctcctcatttaaaattaaataataataaataaatgacataaaataaatatcgtcttgacttgcagaggtggttaagactttaaaaatcttttggaagcttcttcaagagacatgttgataatacactaaacgaagtctcatccttagaaaaatacatagtaggcgaccactaacactagaaaatatcagtcgtcgtgtacttcatttggcattgccacttagagttgccttcacaatgtgttggaagttggttgtcacttgtagggttttaggcttccaaaatgtctaaggaaacctcatttaattgagtcacatgagcattgacactacttttgttcaatgctcgcataagcttgccattccctcccaaaacatcttccaaatggacttct

SEQ ID NO: 196670 - DNA, 732 bp, Cannabis indica
tgactatttagaaccgtcgagaatagtgctcactgtagccaacaatttataacagcaggcaaaggaattgtcgattgctataaatcgtcggctatagtgagcactattctcaacggttctaaatagtcaggacataggcgtgtctagctatttttaactgacacatttttctttccattttttgcgatggtagaataggcatcggttatgtggcctgccgacaatacctttactcgactatttaaaatagttaggaaatcaaattttttattactgcttgaatgccttagaattagaaaaaccctagaataattgaagagaattagagaacttatttagagagaaaaagagagtcagagagagattgcaaaatgagtagtcaagtcattttgactcactttacgtccttatatattgtaggaaccatctttaattctaatccatgttattagatcactcaatgagattatttgagttatttcttgcattttacaaaaccatggaatttcctatgcaacgctctaggcaacatgtcctctaccattgggtgtaggggtgtgcataaatcaatcaaatcccataacaaccaatcaatctaattacaatcgatcgctaaacattggatgtccgattgtgatcggatcggattagatgttatttttgaagatctaattagatcagattagatgttggatggggtgtttaaaagttcaatacatccaacatccaatc

SEQ ID NO: 196671 - DNA, 792 bp, Cannabis indica
ttttttttttttttttgtgatgaagatgtaatggctctatcttataggtgaagaagctctcttatgtatatggacattacattcccacttgtattaaccagagagcagagaaagtatgaaatcttaaatattttaatgatttcttgtagggtatgatttgaatggaactaggactgagaaaaagagaaacacatactattggtagttttaaactaaattctaaagcaaaaggctttttctttctttctttccttaaaaccaaatttgcacatattgttaagtttgttttgcacatacaagctccctagtggattccaaatacctgccgttattagtgctttctttgctcgaaccttttttccccttttgatttgtaaatttgtctgcaaaaattccttctttgtaactttagtcttatcatatttattatgtctccaatcgacacgcagtataatgttccttattgtaatgcagcagaacaaactacttattatagtgcaagatttgttaagactttgttgttgaattgtgccaaaaaggcccatttcatgaccgtcccatatgttgcgaaccaaaattgagttgaagtttattgggccctcaatttaattgaaagaaaaagcctacccaccattggtgggtcgggtccaaattttgtcccctacccatttcccacaactaaatctgaaaatgatttctatggccttccacacatgggagtctcctctactcttttgccaacttggtgtaaaaaaatgttacataaattcatttcgtttactatattgatgt

SEQ ID NO: 196672 - DNA, 1149 bp, Cannabis indica
ttggctgctctttaggttctattgatagaacatagcaatcctaaagacagccacaaaatcgattccacaactatacaaattttcctaaaaaaatcttgatttgcagcatcataatcaggtttttgcagtagtaaatcaaaccaaaaaggaaacttgctaaataggtgcctgatcatgaacatggacttcatacctgtcaaaaacagtgtgcttgatctaatcttatcaagacacaattgaacacattaaagagaaagagcaatagtcaaagtttctaaataaaactaactttccgtgttctcttacaaaaagtttaaaaataagaaaatggacaactgaaaaagaattctttcctttaaaagaaaagagcaataaagacacaaaatcaaagagaacaaatcgatttaattgtacaaaaaaaccacacaataaataaaaaataattttgacacataaattatgccaaaaaatgactttacaatcgtgaatatgaaaattattatcaatgacctcacatgccatcaaattttttatttttttaattgtcacatcactcaaaatactaattcatgataatttatcaaaatatatagcattactcgacatataaagtgtttaggtatatcaaattacatatatctcataattttgaattgatagagccttaatttggtgttaaatagattaaataaaaaaaattgaactacgcagttggaactaatcaagaaattttttaagtcttacggtttcgtgatagctaacgtaagcaatatatgaccaagtatacctttggtgcctcttttaagctttgtgtgtgttttttttttttttttttttttgacgttttgtaacattgagggggagaaacaacaagctcaagttacaaagagaaagcttggacaattgttgttccaaactaattcctcatcaagccctaaagctccttttgccatttggaaagcttttgtgtgtttgattgtaaaaactctccaaactcttcacatacatttttaattcctcatttacacagaatgaatataagaattatagaaatatttacattaaaaatacaaaatgcaatctttattacaccaataccactacacggctatatcaacttttttactcttcttctttattttattacta

SEQ ID NO: 196673 - DNA, 606 bp, Cannabis indica
ctctcagggtccgcgcgaccattcacaattttaaattttttccttttctttttcttttttcaattctttcaaattctacaaattgaaatttaatgtaataacgaattcaaaactaacttttagcataaatacacatacacaaaatttaaacatacacaatctaacacaaatataaacaaaaaaattaacacaaacaccaatcttaacaaacataattttaaaaattaattaaccattacactaacaaaaaaatcacttacccatttgttgctcaatggcaagagagagggactggtaagagagagaggaactgtcaaaatatcacaaatattcacataagaaaatacataattaatatttttgacagaacttataacttaaatttgatataagagatagtctgcagttatagtaaatgaaatttacacattgcacagtcactattttttttttgtacgcatagtaaataactatttaagtttaattttttaaaattttacaaatagtcataaataactacaacgtacgtgattataattttttttttttcttaaataccgaaatagataaaaatttacacgaacaaccttatagggaatcaactac

SEQ ID NO: 196674 - DNA, 1377 bp, Cannabis indica
aaaaatttacacgaacaaccttatagggaatcaactacaaaaaatttcattattattcctctttagtactaaacataaactcatccctttcattcaaaaaattttaaataaaataaagacatcctaatgtatacacaaatctacacaaacacaaacatatacaagtaataagatttattttaatgaagtcatgtttgaaccaaaacctattaagctattaaaaatgattgtatatatctcaaaatgacattacctgtgtgataggctgagagaggcggccgaggccgaccttaacaccggtaatgatattctagggttttatgattttgagggcggagagtggaggagattcgcaaccaaatgaagaagatgaacccaattttatctatatacaaaatgactattaccggcggaccattccgccgctaataatctttgaagtccgcctctaatgctcaacaatctcacatccctaaatttcaacttttagggaccgcttcgctttcccgccaacttttccaggaatgctccccctatttccatccattacctgctgctcaaacccaaaaccgatgctctactgattatttcagtccccaatagaagggatagggcagcgttttgtggaatttcagactcggtttctgcattcaatatcttcaaagattcgaatgtataataaatgtgagattgttgaagtattgtgtttctgaaattctgattggtgaatctagaatagatgaagttgttggtgaagttaacatttttatagttattgatttctaacaataatggttttaagaactaattaagctctgtgaatttgccatattaatccctaattaacttcatgtgttctgttcgttaacttggttttgtttttggtatgttgtaatatggaatagctggaacaaagaggaagtgagtccctttaattgtgattgtttttatggaattgactcatgaattaaaagttagttgatgcttcaaagttactgtacaactgcattgaagtgggcttgtttttgattgagattatcatattggtatctgatgatcactgcttgtgtctacaatttttgtggtcactgttatgaacaaaatctagtaggtttttctctccaaaggaaatggattagcacctattatttaaaatgtcggtttatgtatgagtaaatatggatacttctgttcatcgatttagctccttttgatgtaccttgtttttttttttttttttatttctgttggataacatattatggaagaagaagagcaaggaactggtaaactagaaagaaaaacttggttctaatattatattttttcacttgcttccttgatccttaccaggattagaagaatcagctaacaact

SEQ ID NO: 196675 - DNA, 804 bp, Cannabis indica
ggttcctcggtgtttaggatcatagcaatcacctctatgcaagtggtatcttcccctgcactgagtttccatggatcctgacctggtataaacactaggaggacaactattagtagaagaggaatgaaaatcaccttcatttacctatgtccgcggttgggcctgactctatgggtttcaccgctcaaaatcctcctcttgcagtctctcctctctctgctcaggttgatgactagcatcagcggtaacaagttccctattccttatggagttacatgtaggttggtttagtttgagacccgcttgttcaaccactcattccctgcaagtacgagtattgttaggacactcagtatgatttctagctgtattggttacttgaggattgcctaaacgtgggtttgggacttggggtggacgtcgggtcctgactcattctcttccatcgactttaacctgtaatgctttcatctgttcctggatggccatgtactatgctgtcataagctagacaatgcctacagaggccaacgctcgtgtgatcggcgggaagtgacctactgtagtcgctggtgtggacgtaacatgtccagcaattttagggaatagattgaagaggtgacgttgatccgtcccacacctccaatgattgtattagtttggtttgttccatctctacgaataggaacgtgcatggttccaacattgaaagatcatgtgttgttgtttccatttgtttgattggcaaccatggtgattttcctccaaaatcgacaaaatagtttcctacagacgatgccaaat

SEQ ID NO: 196676 - DNA, 870 bp, Cannabis indica
ataaattatgagaatatgtatatatgtttttagagttactatttgttatttttaatatcaataaactaaattttaagtagtttaaaattaataagcaattatactgtaatttataatcacataaacaaattgtattttttttttttaaaatgagcaaaatataattggaagaaaatatttacaaacgatttacacagtttgaggtgaatttttgaatttaacgaacttaattgccacttaaaggtacacctacaataaaataataagatacttttaccgtcatttttttttttaaagtcatatgtgtaacaattacaaatattaagaaagtttcaccgcaaatatcctttataaaaatcttatctataattatatcaaaattataaaattttcaaataacgataataaaaaaaataccccagaatagtgagaataacaagtaaaagattgttagtagtacaattacgtacttagataatagttaagcactcaagctatgaagttaaattctgaatagtgaataaaactgaatataagtttccctaaagttaactataatcctaatcgtgtctttaataaaaaaaaaattcccaattaaattacaagatattattttaactaattactattaataaaattttataatttattaaaatttccatgagaaaaaatccatccccacgtgttaattttcactttctcattataagtaacaattttttttctttttgaataaatattaagaatctctcaaaaatatacttaatatattttttaaaaaacttaccgtaatttctatgtgagttactatgtgaattttaattgcgatttaaactattttgttaattgttatgtggattgctatgtaaa

SEQ ID NO: 196677 - DNA, 1527 bp, Cannabis indica
aaagtaagacaacgcagcagccatcaccccatttgcaacaatttttttacttgtcaaacaagcccatttcttgctttctaaagagaccaacaaatcattgcaagatgtcaaatcaaagtcttcaaaaatcctatgaccagatcataaaactatctttaaaaaacagtggtcgaaaggctgcaaataaccccatcaactcgctgccaacaagctttggctaaaggacactcaaccaaaatatatatggaggattgattcatccataccttggcacaccaaataaatgacgaccacatcaacatgtcaaccttttaactggattaatattggtaaacacctagaatatgccctccaaagtaagtctttaaccttaggaggaattttgagttaccataaagccttccaaatgccctaataattatcttccaaccacttaccgtaaagcactttgagaaacttgtaagcactcttcaccgaataaactcctgaaatctctttaaactaataccactcatccatagtattggataccttaaaacatctccaatagagaactataaatgtggcatattattattttttagaatattttgctgaaacttaatcttaatggtgataccaaatgtgtgccaaatttaactaaaattaaaaattgtgctaattaaattaacactatactattttttgtgccaaattttaacatacaataactttatattttaattatcttgttactcattaatattatttattaatgaaaaatgtttttatatttataaattaaaatattttctcaaacaaattaattattttatattttcaatgagcaccaataatagtactaaattttaagttaattatgattttttccttctgatctttgacatgtactaaatcatgccccctgaacttttaaggtcgttaaaaatgtctccggaactattaagattgttagatttaaggacttttgtctaatttcatccaattttactatttcaatgactgttatatactaaatcatgcttcccagactttgatatctaccaaatcatgtccatcgaactttgatatgtactaaatcatggaccttggactttcatccatgttagacttttttactaaaattaggaaaaaaaaaaatcttaaatttaacaatcttaatagttcagggcgcatttttaacaactttaaaagttcaaagggcataatttagtatatgtcaaaatttaggggacaaaaatcttaattttgtatagctagaggacaaatataaaaattgaataaaatataaatggatgatatattattattgatggggaccttacaaaacgtgcaagatattatcaatgacttaattaagtaacaaatttcattattattatttagtgctttttgttttatttactcgatttcttatatagttgagcttctttagaaaatttataaggttgagttaagctatagtgatagagactaacaacaaaaccaaaataacacttgtgtttataaattgatttaattagaatg

SEQ ID NO: 196678 - DNA, 870 bp, Cannabis indica
ttttttttatttattaaagaaaagaaaaatacccacttgtaacatcgtcaataaataagtaaaaaaagcacatgtaaacttaaataaagttgatttttcacaacacttggtgaaaaagaaaaaaaaaatataagcaaatcacatttacacaagctaacatatgttgtcatgagccccagatttcccataatgatattacaactaatacattaacttgataataaaacaccagtataaaaaattatatagaaaaacaaatacatatacatgatcttctgtgaatcaagctttgattttttaaattccacactagaacagtttctttacaagcaacaaccaccactaccaccactaccaccaccaccaccaggaggtgcttgatgatcttgtttctgctttaatatcatgtttctctttactgcattagaaccttcttccaatagactaggcacctccattatctgtttaaaaaaaaaggaatcataaaatttatcatcatgagctattattatgtgtagaaagaaattcaaggcattctaggattatcaatgaagattacctttaatgcaagctcttcgaagcattgctcgacattttctctggttttagcactacactcaagaaacatagatccaagctctttggctaaagctattccttcatctctacttacagctctatcagattcctgacatgacacaaaagtgtttactcaacaactcaactccctcttgtatgataataatgcattgttaaaagaatgccattgtgacattactcttagtttaaccaattttttggggacaagattattcagcataatagattataaaaacttactctatcaactttgtttccaacaagtatttt

SEQ ID NO: 196679 - DNA, 930 bp, Cannabis indica
gaagtaagcccaatattagactactagacctgcttcagatgtataaactttattgataggaatttttcatttatggaggaagtaagacaggtagtatcaatgaaatgtttacgccagggtaacatttgctcatttgcaatgtaatgtattggaaggaatagtaatgatattagtttctgaaagcaaacagaaggattgtgttttcaaatttaccaaatttgttttataattgtgaaggcaatgcgaaagagaaacactttagggctttgtaaacataaactgtttttagttgatataattacattttagcacatattttagaaaaaaagattgcattttgcagtaaacatatgctcttgattgcaaatttctacaggttgtttacaaatatgtaactgtttgaaaaacaaaactcatttttttttatggatatattttttttaacatttttgtatttttgaaaattcccatttttattttgatttggaatttctatgaattgggattgtgctgattttctgatatggattatgttttgacagtttgtgctgatttggttcgcggtgccaaggacaagaggctaagagtcaagggaccagtgagaatgcccactaaggttttgcttatcacaaccagaaagtccccttgtggtgaaggtatgtgttgatgtccctcattccattagtttttgcattggggatacaaatataggccttggtatcaatatattagtccagaggaaccaatttcaatggttaggcaaatggtttgctcgaacttggttttgggttgtataatgtatattgtagagattggttggtacttcacttttgagttttaagagccaatcataagcgctttggaaaatatcttacaggatgttggaagtttgttcagtgcacattgctttaatctcattactttcagatg

SEQ ID NO: 196680 - DNA, 1015 bp, Cannabis indica
tggttgctacattaacctcttatttcaatattttatttaacttttgtgtttgaaaatatattttaaaatatttttttttttaaattttttttattgtgatatttgttatagttacaatatcaaatttgtaaaaaagaattatgtatagttttttagtatctaaataaaattttgatattttatttaccacgcacattcaaaaaattttaaacttgtttacgacacttactactcaatttttttttaaaaaaaaatgtacaaggataatgttttaactataacaatatctctatgaaaaatgaattaaaaaaagaaacaatactccaaactatatttttaggatgaaaatttaaaagcattgctattaggcactattgatagaacaccaagaaggatgctacttataacatttctcaaaatttaaaggtgtaattaatctttttttttttttttacttttaatagattttccttgtagtagtgaatctgttctgttgtactctcttatcaccttttactgacttccaaatatgtaaaaattgctgtgtttggctttcgttttctcaaagctttcaaaacttaataattctctatggaaaaaaatttgtcagcaaaataagaataaagtataaagaagtaataatgtagtaacgtcgaccttattataaatcaaacaaatattataacttatatataatctagtaaaacatacctacctttgggcttggggactttattgtaaaagtattatttgattagaactatgaaaagaagaagcaagaaagtcttatatcttttataaatcgaaagagagagaaaagacaaattatacctagcgttaagaactaaaaaattaatcatcaataaatctaataatgttagaaatataaagcagtcaaccatcccataatcttttattcatgttgaactggttcttcaactcgaagatgttcttgaggttggttgagttccacacgttattcggattgggagggttgatgttgtggtactctctc

SEQ ID NO: 196681 - DNA, 1094 bp, Cannabis indica
tcttttctatccaagatctgaatagattgttccatgtacgataagtacgtctgaagcttgatgtcctcataactcaaaatatgggtcgaatcagacacatattttctaagcattgaaatagggaacatgttgtgaactcaagatagagcagaggggtaaagctacctgatagcctacttgacctaccttcttcaagatctcaaagggaccaataaacctagggctaaatttccctttctttataaatctccaaatccccttcataggtgataatcgaaggaatataaagtcaccaacttaaaactaaatatccctacgcttcgaatcagcgtagcttttttgtctactttatgaggtaagcatacaacctcgaatcttgtcaatagcctcattagttctctggactacttcaagtccaagctatctccgttcatcgacttcatcccagtgaataggtgaacgacacttccttccatataacatttcatacggtgccatgccgatagttctttgaaaactgttgttgtatgaaaattcaatcaggggaaggtaaatgtcctgggaacctttaaagtccaacacacatgcccagagcatatcttctagtacctgaataatcctctcagactagcctttagtctgtgggtgaaaagtcgttcttaattttaatttagtacccattgctctttgtaaactttcctagaacttggatgtaaattttagatctcaatctgagacaattgactttggagcaccgtggagtaaaattatctcattgacatataaagcagtgcattgatcaactatatacatagtttagactggtaaaaagtgcgctgaccttgtatactggtccactatcaccgatattgaatcataaaatcatgtttcccttggtaatccaaccacaaaatccatggttacatactcccatttccactcaggaatcttcagaggttgaagtagtcctgttggtttccaatattctgccttgacttgctgacaagctagacattttaacatgtactcaactatatcatcgttcatacctagccatcagtacaatgcatttacatcttggttgttcccaggtg

SEQ ID NO: 196682 - DNA, 1787 bp, Cannabis indica
tctcatttcattttctgagcaaccaaacagaatcagaaataagtgtaagcagaaagaaaagttactggagactggaggcagaggcagtagcgacgccatgaaaatgtgagaagtaagagcggacgagagagagagaaacgaggacggtggtggctcgtggtggtggactagcgtcgatgattgaggggcttgtggaccaacgtctacgagaaagagcgaacgggaaagaaagagagacgaggacgaggtggcttgtagtggttcgatcatggagagggtatgaacgagatagagagagcgagagacgtttgaaatgagatttgagcaagatattggggttttatattaataggggaatccccgatgatttaaaatcgtcgtgaatactatggtcgatggttaaactactagctatagtagctatagtattctgacgattttaaacagtcaagatacttttaaaacctagttttttttggcttgtaacttttttaaaccatttggaaaagtacaccgagtatttagtatcgtaagaagtagtccattatatttgacggttttaaacactcattaaaatattattagcaacggtccacgaaaaaaagagttttgaagatcgatcggaatagtaattttttcagtagtggccacaacttgacgctaataccaactgctagtgatggaggcttcataatcccactagcttttatccctcaagtatatattatgtatccatgtaacccctaaattatcttgtttggtgacaatcgcttatacgtatttccctatagtctatagatgcagtattgcattgaatagacctccgtaaacccaagccaccttctttttcagacttgcacacctccttccaagacacatatcctgagcccccatattcagcttcctctttccatagaaattaatcacaacaaaaccgtatttactttatcaataactgattttgaaagaatcatgatttgccgtatgcatgaatcgtgatacatttcatgttttatgttacacgaaaataaggacataggacctaatagtaaactgtcaatattgtatagctagttcaaatatatgtaaaattaagggataggcaataaaatgaatgagaattagaagtattcttattagagtttgacactaattcgatgggtgtctctcaatattttaattaattaaatagttaagtatcttgtatgtgtgtactcgatcggtgtgtgcatagacatagtattagctttgtcctttgctctttattattggataggtgaggattatgggtgtgcattaatcgatctaattcaataataactgatcagatttttaattatgatcagatcagattagatgttatttttgaatattcaattagatcgaatcggatgttgaatgaagtgttcgaaaatccaatacatctaacatttaattgaactaattaatatttttatttaatttaaatgagtaattagattttatattcttatatgtaacaaaatatatatgaatattaaaattttactttttttttacattgaatggatccaattcaatccaatggatactataattaaaatatggaatggatctaatcaaataaatattaaatttaaaatattagataaactcaaattaaatcaataaatttatatcaaatggataaaatcaatccaatttattaaatattagatccattaaatgattaaaattaattgaatcagattgaatgataaaaattgatatttaatatataattagatagaatttaaataaatttaaaa

SEQ ID NO: 196683 - DNA, 1245 bp, Cannabis indica
cccccttgtgctagtcataatataacgcccatgtaactgtgtatatctcagtcataaatacaagtggtctaggaagaaaacttattttcaattaaacatatcagaaacctgatgaagagaactgatacgagagcttgattgctactccgtttagggagtggaataaccccaatagtgtctaggtgctgccataatagaaaacaattgcagagaaactaattagaaaaggtctgaaactttcttgtcttaaaagagtagaaatttatcagaaaaagactagagacaagtacacaacttttcacctttacgaaaaattgatacttttttgtactcaacaagtccatgatgggaccacaagttagtggatccaagcataactcatatagtagctgcagaagaaatgataaaatatttattaagcacaagtggtaaaatcctccagagatagaaaagcataaggaaaaatcaaaaagaaaaacattactttcagctagaattttctttttctttttttcttattgcaaataagtttttatagctaaaatttgctttacgaaaaaatacagtacacaagatagtatttgtttctaacctgaaagccaaattcatagagcaatgcattcacatcaggcttcaagagcttctctaatatttcaagaataatctttaagcaactggaaatggacagatgattcacaaatgaatacagaaaatgaagaaattacgaattaacacactaaaacagcttgtagaaaacttaacctgtaatgaaactttggctgcaaaatagtacgctcaatattgctatcaagatcaaacttgaggagcatatgagtaacatttggagctggacgactaatattgtctatcataagctgtgggattgttaaaaaaggtgtacattagaaaaacattaacatcagaatcagatggaagaaaagaaatgtacttccaaataataacctgcaatataagcacccctggatcatcaccactgttctcaatgaactgagactcttctgatcgtaactcaaggcaagctgcataatcctcgatcaagcaacttgcagcattggatttaagcagtatcgatacaagcccagccatgcgtgagctgtcaacattttatagcatttgagttttttgcgcaaacaagaaaaaaatagacataatgacgatatttggagaggaaattcctgtactgggatttgattagtctcacaatgcctcatccagcttactgtt

SEQ ID NO: 196684 - DNA, 731 bp, Cannabis indica
cttattaattacacaccaaaaaaacaaagaacgagaaatgctaaagggcacttaaatgccttacatcttttgaggtgtaatatcactactggtgtaacttaatatcggggtcctatttattttatcttaataaaaattatagaaaatcgttaactaattatagggcagcacctcatagtggtgctagtaaggtcagccttaggcataagtaagctaggcccgcgactagggctcacccattttaagggcccaaatactttttttttaaaagtatacatatttttttaataatttttaaaaataccattcataatctttatagtaagggccaaattttttttttctatgacctattttaactcaggaccggccctaggtgccaggcatcttaggagcattgctattgggcatcagtggtgtccagcagcttctataggtagcaccgcacgattagttagcaatattttttaaaaattattttgttaagttatatgagatctgatacttaattacaacaatagtggtataacactgaggagaatgctaggcaccagtcgtatttttttagcaattctcgatgtcttttgtcccatagcaattaatgcccataagttaacttaaagatatccaacacaataaatatagattatatatgttattaatagtgtaatttaatattgagtcttactatttgttacaggttcctgattataatagtatggaaagaaaaa

SEQ ID NO: 196685 - DNA, 659 bp, Cannabis indica
tttaattaatgaatctaataataataaaaacattcggcttaataatactaaggaaatttctactaaaaccactacaagacaaaatccacttaatgtaacatttctaaaaatgcccttccttgaagcttaagttttcttttatgcttaggggtaaaatattcaaacaccataaccccacataatctcaatattcccaaatatcactaatgtttgtcctattagaacaaagtttctaagctaacccatgtgactttaacgatcatccgtcgtattttctatccctaccgagcaaaaatcataaaaattataaatttcacatataacataatacatttagagtttaataaaatctctaaaattgaaaaattacaactctaatgcatattccttaaaaatagggcatacaacaaatataatcacgtaaaattattaaatatcaacaattaatactaattgccctactaattgatattctaatcaggcggtcattacataaactcaaacatattatacatatgaatccaaatgttttaacaatataatcatactttcaatagtagaaaatcatccctacaaacctattttactgtcgtgctattctcagatctaagattgaaggaagagatgatgttagagagagagaagagagaaagtgagag

SEQ ID NO: 196686 - DNA, 1354 bp, Cannabis indica
aacgacgcaaggcacaagatcgtaggcttctatatgtcacaactttgtaagtaataatatttatcctttaattttaaaatataatttatcttaaaatacttttattataaattattttatttgtttatttttatatagggtggtcttcccgaagagcatgtggttgatgcatggagggtggctcaaacgaaacaatcatctggtggttttgttgacgaagtcgctgtagaagattatgtaagtaaataaaatattgtattattaacattttaatattatattaattatatgttctaaaattattttattaaataggatgacatgcgtaaggagcttaatagaaaatgattcaaaagacaatctcagagcgatacatctggtactgaatttgatactagctatcaattcgacgtactttgaaaagttgttggaaaaagatgtgactatcaaagaagtgtgagttatagggtcaaaggcaaaggaaaaaatatacagtcaaagtccgtcaactgggcctcctttgccccctaataaaatgtttaacactgtgacatatatgtttacaactatatgtaatattagggtgtagtctgacccctgaacaacgtgcaatttatataacccacgatttgaaaactttattcaaatgtatggtcaatcgcagtcgcctggtggttcgtcttctcagagttatgctgctcctccacaacatcaacaccaaccttcttcacaacaatacttccagccttttatacagtagcaattccagccttctccgtagcagcaagtcacgcaggggtggttcgcacttttcttcgcttgagtgaatttttttttggcatggcatgtgccaagatgtatgtaaatatgttcgatcttgcttagtttgtgaaaccgtgaagtattcacccacaactccatatggtttattacaacctcttgagttattaaagagagtttgggaagatctcgctatggatttcatcgttggacttcctaactccaacggtgttacaaacattctagtggtcattgatagattcacaaagtatgctcattttggagcattgccaactcaatactctgctactaaagtggctaaactcttcacaaacatggtgatttgtctccatggaatccctcacactattgtttctgaccgtgaccttattttcactagtgccttttgaaagaaattgtttgaactcatgggtatactaagttgaaaatgagttccgcgtatcacccacaaacggatggtcaaacagaagttacgaacaagtatgtggagtagtaccttcgtgcttttacagctgacaatccaaaatagtggagtaagtttcttgcttgggct

SEQ ID NO: 196687 - DNA, 1096 bp, Cannabis indica
attctccccccaagaccttcccgctatctactctgaactttccgatacccaaaactccacagcaatttggcagcgaaagccacccaaattcacccaaaaccctactaacatcggattgaagctcgaaaaaatgtcccaatttctcgttgatagccttgcagacggtaagaacgcgagacaagccttctccgaggagccgagcccgaaacgtctcgccaaggccttgtaaccggctccgtgtgccaggcggtaaagcgcagcggcgaggacgaagttgggtggaactgaggaatggaccgcggcggcgttgagatcaggggtgagaagcccgaggaggagggtgaacgagggctcagacatgcggaaggcatgagaccagagaacgctgtgttcaccggtacctgcagaggagagaaatcggcggaaccagcattggtttggctccggcaaattatgaggagcagagtgcagcgttaggggttcgagactctggcgacggagagagagaagggaagaggagataagcgattctagggctagagtttgagaaggaaggaggaggatgtcgttgtgagagaggaaagaatgagctgcggcagcggcgttggatacgagaattaggagttcttgtttggttaaaagcttgccattttcgttttgtgataaagtcttcatcttcttggcttttagactggttgagttgcgaccatggaggttgttcaattaaagttcatgcaagcatcaagcaaaacaaccaagcaagaattttggtttgttagttaggaaaataaacacacttcgagaacttcaataataaggtactaatctaaatatgtagtaagaaaaagaaaacctacaaaaaaaaaatactcaaatttggagttaactttaaaaaaaaaattattattacatggaatttttttaaaaaaaataatgtatttttataaaacaacggtagaacacaaaaaagaacaactaaaaaataacagtgaaaacataacacagtacacagtataaaacttacacagtattttggtaaaagaatttgccccaaagtataagagtaaaaaagataaaaatttcagtatatagtgta

SEQ ID NO: 196688 - DNA, 634 bp, Cannabis indica
actatgtacctccagtatggagtttaaaacgtaaagtggagactcatgacttccctagctatatgagttttgagctacctatctcatctcattagatattcgagttgagttgtttctcttactcaaatttggcaccagaatagagttagggtctcttactcaaaaactcttttatgttggcctaaggtggggtctttcccgcttttgcctttaccgacgctcaagcactcgtataagttccaacggatataaagcgtcagtaaaggtggcattcacgatacatttaagcgctagtaaaatttttaacaatgaaaatttatattttttcataacttttgtttaaaaaaatttcgactacaatcaaaccatctattaataactctaaaacattaaattatatgataaatagaaaatttataactcaataaaatgaacatagataataactaatcttattattatttttttttgtgaatcaaaaaatttgtattacctcaaaataattaaaagctacaacacctatttaattaagacctgaaatactcccaattacatgcatatacttttattataatcctttataccagtcactattgatttggctcacttttaaaggccaatgactcataattct

SEQ ID NO: 196689 - DNA, 656 bp, Cannabis indica
gggaggtctcatctcttgggcaacagccctagtcgtcttatcataaaaacggtcctgtatataagtagaaaagtataagctttaaagctagcacaatagtgagggaaagtaggaaaagcgaatactgcacaagttcgaactcaaaactcttgaattattagttaaaatgtttatcattatgttgtaataaaattaaatattcaatatcgtacgtatacgtacgtatcacttaccatcctactcctagggtcgagtctaagttaaggtgggctagacgcgaacctaggacccacccagcctaagagcctaaaaacaaaaaaaatattttaaaatacatatattcttttaataatttttgaaaatcatatagtatttttttaaataatccaataattttgttactatctaagacccaacaaatctcaaggttgccttgcctatgccaaccgcccttatgtaacataactaagataaaagctctcatttctaattcaaattattcaatattttacatatccaatagataatcttagtttgttcatttgttcttatgcctttattcttacacaacgttttttttctctcttttccctttcaatatatcatcacatagatattattattaaaagaaataaaaagaaaaagaaaaggacaag

SEQ ID NO: 196690 - DNA, 1327 bp, Cannabis indica
tattttttaaataatctatttgaatatttaaactacatattacaggaaacatgtgtaggacacccctaaaaatgtatttgggtagatattccatatctattttgacattcaacagagtttttatttcattttttttatgatcgtgtacattttaattatttaatataatctataaaattttaaaaaattatgaataatttacagtgctgaaaacacagttcaaagagtaatttaccacacatataaaaaaatagtcacgggtgcaacaaaatatttaaactttatttttaacactataaaatattcgaaattttctaaaaatttataagtgataattttaaataactataacatacgcgattataaaaataaattgaattaataagctgttgtgcatgctaaagcaaataggtggtctattgaaacacctcttattgacttactctatattatttaaggtaagtttatagtacacgtccctaaaggattgtttcagtagatcatttatttgtttcgtcatttaagatagcttttaggtcctatatatttttatgattgcttgcgttgcaattatataggatagcctgtaaatttttaattttttttaaatagtttacagtgctaaaaataatgttcaaatattttattgcacgcacgaatattttccttatagtggcaagcaattatttgaacttattcattttcaatatagtaaagtaaattttctaaaatttcatatgtggtcctaaataaatatgtaatcttgaaaactaaaactaattttagatgcaaaaaaataaataggaggtctagttaaaacccgtgcaccacaaaaattctctattacatataatatgtggttatatattttattggtacaaatataatgctccttatacatatagctatttatataggttgttttaaatttttccttcatattaatattttgttacgatgcatacatgcacatatgcatatttttttataagaatataattgttacttaattggttatattagatttctaacacattaatattcgtttatcatttagtagtatataacgagaagaagagagaaaaatgagaagaaaaaaataaaataggatgacgttgtatttaattaattactttctttaattaatttcataattaatttactatatattatgtgctagcaattaatgtagatatcaattcgattgcgttaattaacacactttacttcacttattttgtctgttgtgtgccagctaataatactattgggatagtaattgaattgcttttctctaaagcaatgaataaatactagtattatttct

SEQ ID NO: 196691 - DNA, 831 bp, Cannabis indica
ataggctcccaactcaagtgctatagcaaaaatctcctctataatttctacttggccaaatccctaattacaaaattctttaaccatttgggtgtgcatgttacccacacttgaggccatacaacaagcacaaaatggagttttgatcgcagcaatgcatttttcttggttattcctctgttcacaagggatacctatgtgaaaatgccaaaggaatgttgttcattgcaagaaatatagtctttgatgaaactacatttcctgcacattcatcggcttcagcttctcaggtacaatctaaaccagtctctaactttcctactgctagttttttaacttctaggccacataatattagttctaactcttttattccacctgtggacaactctggttcctttatcactgagcaacctggccatgctacaaacccacaactatatgtgccatctacctcagccactagccaaccctccacacctgtcaccactcaaaatcctataccagaacctgtctcatccgctataaaccataccagtaacttcaatccttctactgggacaaccccatactgaaccacaaacagcacctcaaccaacaaatataacccaatcctcatctataccacaaggtgctgcaggccatagagctcataacatgcacaccagatcttaaaatggcataactaaatcgaaatcctatatggcaacaaagcatcccttgactgaatccatgctaccatctgaaccaaaagtctcaaagatgccttaagtaatccatattaaaacaatgctatgagtacagattgggagcccttcacaaagctaagac

SEQ ID NO: 196692 - DNA, 1033 bp, Cannabis indica
ttaataatttgaggtgtaatttttcaatcatatgtgtgggtattaatttgtttttttgtttattatgtttttaaatttacaattaatagtcgcagtgttttatttaggatatttctattttgaactatttttttacgatattattttaaaggaaaattttatatcctcaaaatttaatatattggtgcttttacaatgcaccccataaaacgttctattgatgcacttcttatctcatttagcatgattttagagaatttttaatccaatttatataataattgtttacattgtaattatttaagatatctgtaaaattttgagagattatgaaaattttaacacactgaaaatatagttcaaacagtatgttgctcgcgatactattctattttatactcgcataaaatatgttgtttgaattctattttcagcgtattaattttttattttttctgaatttcttaaaattatgaatgaaatcttaaataattatatattgtcgataactataaaaaaaattaaattaacaaattctctcaagtatcaaatttttaaagtgtgcatattgtagaagttttctaaaatatcttaattaatatgtgcattaattgataagatatcatcaacagcctcttccattctagtgacatgcataattgtattcggtgctaacctaaattttcttgaggggacatacaaattaaaataaaactcgtttctctccttgtattctacttatctctaaaagtaagtcataattgtataatattgactagtcaagatattattataatggaagaaaaaaataaaatgtatattaatttcatgagcattcccatgaaattattaaagacaccctatccattttcgaattctaatatgcacatttcaatctacacattgaaatattttgagatcttttttgttttgttttatttttttgtttttttgaatgagatgccataattggggaccagtctatacatatacctattgcaatattaattataaatgagctgggtcctcactt

SEQ ID NO: 196693 - DNA, 1051 bp, Cannabis indica
tatttttataattttttattatttttatgtatttacgaaataatcacggtataataataaaagaacatgcaacatgaaaaggacaaaaaatgaccttttttttttaatgatacagaaaatgacctattaaaactgttgtattcagaaattctaataattagggctacatagacaacactataattaaatgaagccattagttggcttaattaaaagtataataatatgagaagaatcttattaatgacaacaaaggagtaagccacgaatataaactgatttttcttcaaatatgacttaattgattaattaataaatagtccaatttttcatccatttgagagaaaaaattgcttacaataaaatatttgatattaagtgaatatgaaccttcaactaccgcatagcatagatatttaacatttggaccaaatgagataaagacatgacctaaaggaatgggactagtgtgtataataattaagaagtgagcttggaaattctttttctttcatactaataatttgtattattaatccaataataaagaatgaaaacaaaaataaaaatgtcttcattagtgacatgcttgatttttggaattaagtccccaattttggaattttatgggacaaggtctatgtgtattagcttataaggcttccatgtgttcatgtagccatatgctattgctaccgaccttatctattttataatgtgttacaatagtttagccgattagtcatatctaagtttccaataccaaaaaatcatatgcctctttttttatttatttatttatgtatacacataataagggtaaaaatgcaacttactaattaaccattttccttctaaaatacttagcattttatggaagcactctttcgactctaatagtaggagtcttggggttgttcaactttagcttttcaatataaactcctcatacaaattgttcaagaaaagtcacggtactcatttactttttaaattatgttttatttattatctatgatttaatacttctaattgaatataatatttaaaa

SEQ ID NO: 196694 - DNA, 1042 bp, Cannabis indica
atttattttgccttaattatcaatatttatacgtgtatggtcttttttcgaggcgtctcgacacctgggggtgtttatttactagcatttaatattttggttacaggtggccttacccttccaccttccctctccttttaagcttgtttatacacgcatccttccttgttgattgtaccatcttcttaaactttctgtgttttccttttatacgtgtcttccctcttttcttcttttagtctaaaaaaatgtcaaactctcgaacgcccccccttccacaatcttcaagtggagatgaattccactcagatattgaggatcgatcgcctcctagccttgcaacattttcctattactatcgacctagtggtgaggctattgttgggagaatgatgcgggcctatcgtgctaggcgtgatgatgcatctttgtcctctgacgaggagtggcttcaaaaattttttgagaacgagggatgtaacgttactttcagctacaaccagagttcctgctgagtttcacgctctccagttgcgcgccgagcatcgtcgtgacaattgccgtatgcaagccaagaaccgtcgggcctgggatgcagacttggaacgtgaccgcttggccaatgaaaggcggatggaagaatgcttgagggaggggtttcccatctactccctggctttcctataggctgtcgtcggtgctcgaagagggtagtgctgggatccattgtgatctctggctctttatgtattctttgctggcatcaccctaaccgtgagaacttttgatgctcaggctttttgtgaaagccttttacttgtagctcttttcatgtttacctgtgtacgcattattatatatgttaatagtatttatcatttagactttgtgaatctttgtcttgtaatctccaaaaaaaatggaccttttgggcttcgatccttaaccaagtatcttttttaagattatttactacttccttactttaatttattgcacttttttattaaaaaatggacgaggtaccttggaaagtggagag

SEQ ID NO: 196695 - DNA, 2572 bp, Cannabis indica
ggggatttggcgagctttgcaattcgtcgccttgatggactgcatcttttggggctttgacccctggaattctttcctctgaagctttgggaatgcaacctgggaacaagagactcacatttctcctttcctctttccaacttggctaaagaattctcaattcttttatgtggttctgccatagcgaaaaattcaaccaatgacttaggtcgtcgcgcttgtaattctttccaaaagtcggttcttggcaagacacctgtaatcaacatacagaccaacgaagactcgggggccttgtcgaccttggttatctcagcattaaaacatttaaaataatcctgtaaagactcaccgaattcttacttaatattttctggctttgtgtacaacgatttgtacgtcatcgtggcctggaagtgcattaagaacatgtctataaaggtttcccaagttgatatcaaagcctcaggtaattggctaaaccaatcatgagcattatcttctaaagttgggacaagtatctggcacttcgctagttgtggtacctggtctactttcataatcgtattcaatttatctaaataatcgattgggttagtagtacctttgtatttgagcaatttggatagcctaaagcctttcacgaaccttgcttgttgcacttcctgtgtaaagggtgatgtcccatgaagcttataaatgggatttctctactgctcgatcatccttagtgctcgcaagagtctctcttggttaatttccctggtaagatgggattggtctatgttgtcggcttgccgctggtatagcagcaactgcgagtatgttggcagggatcattacttctgtagtcgtagctggtgcgatcgacgggtcgattggattagttgggttgttcacattttgcgtgccttgatcgcccatttggggatcatggggctcatcatcattgagattccttggtgtctgggattgcgctctgaaaaatctcattgagatgatcgcgaagattgcctctatgcacatggtacctacctccccatcgagtctcgacagaccctgacctagtataaatactaggagagtgactattagtagaagaagagtgagattcaacttcatttatctctactcgcggttgggcccgactttgcgggttttccgttcagggtctttctcctgtggtatgtcttctcttccagcatttccacgactagcatcaggtgcaatcgactccctatttcgcacggagttatgtgtgggctggtttagatcgagaccttcttgttcgttcacactttccctacgaatatgattattgttaggatgctcatttcgtcgtctagctgtggtggttacctgaggattgcctgaacgcgtattcggaaataaggtggacatcgatcctgactcttccctcgaccttagcctgtaatgcccatatttgctcatgcatggtcgtgtattgtgttgtcataagctggataataccttcagagactacgactggtgtagtaggcagaaagtggcccacagtggcttctggtgccgatgttttcccaacatgactagtaatttctgggaatagattgagaggggtgacattgatctgtcccacacccccattgattgtatcagttggatcagttctatcacttgggagtgggacattcatcgttctgacattgaaagatccagtgttgctgtttccgtttgtttggttcgcagccatgttgattctcctccaaaatcaaaagagagatttcccacagatggcgccaaatgttgtcgaaagattttggacaacaccaaatagaaagtaaataataaatatttaataaaaaagcaacgagtactcaacttaaaatatcgagtattcgaatgagactacccagacaatagaagaacagtaaaaaacaatgaacacaaagatgtatagtggttcagtcagatcacggtctgcttagtccactactgcaaaagatttttgtcttagtttattcatgttggatcactcctttatatacaaagcaaatgtcattttagttacacagaactcaatcggttatagaaccattttacattaaatattaacattaatttataataaaatgtaaaataataaatgaagaatagtttaaagttatttcacaaaatacagcaacgtatatgacttctatggtgcaagttgtatgttcatattctcgcacaagctcgcatgcttgaggtgtgttttatcattctaaagagggctaataggccttgtattaaggtatctacattctggtcaagatgcatgtatggagaccttatatgcattgataacataggacatgcaagtccttatcgagtcatcgagtacactgggtcatttggaccaattcattatgtaaaagaagtgatcttcactagggtcccaaggtgaaaggtctacgttaaatgggtttcgcaccatatcgtaaaggataatgcgctgcctgtataaactcttcttaggtcctacttatttctatatacgcgaagcgtaataatgtgactagactctgtcatggtcacatcatctcaacgtgtt

SEQ ID NO: 196696 - DNA, 1062 bp, Cannabis indica
gtagtatatcaagtagcaatcctgtaaatgatagaaccattttgtttgcccttcagatgtactaagatcattatgatcccacgcacagtatcgggtgactcagtatagctttgagatgacatgcaatgcgccaaattaagagagagataatccatgtgtaatagtgaaattataacattcaccatcattatctgcatcatcagacaaactacatgtcacgtaatcatcaatatttggaaagcaaaatcaaaagaataaagttttaatttgacaagcttagttacaacttgcatgacaagctttcaaaaatgaaaatgattaaagttttaaaagacaagcttagatcaccattgttaatatataattttgctcaaggtgttcaacactcagtcatgaacaaggggtttggaagggggaaaaacaagcaaaaaagagggtatggaaagttaaaactaaggttgtttggtaaaaagaacgagtaaatcctactacccttcacatccttcacaccataccttctcccctccctcctacaatacagatcattaaaggaatgccacattgaagtcctactcaacaataataaaattttaaggattgaggagtaatggaaacagctattctccatactttccacagtttgcatattgggcaagaataaaaatagagaacattcaataatgtgtacttatgggttgaacttcttgtggatgaaaagatggggaggagcatgatggagcaatataaactactaaaagaataaaaaaaaaaaaactaaggaagcttaaagctgaaaaattgcaaatcacattcaaaagaccttagcgtggaatattagtaatagcatccaggtggctttgaagatctttcaaatgacaaaagggctcttgatgatgattttctctttcaccagacatgctcttctgcattgctcgaagtgcaagaacagctgactctagtgcatagcgcatgtgcataagttcaatatcctgcagcctatgaaaggaaaaataaaaacgaaaagcaccatcagcatatatggaagaataatgaatgaaaatg

SEQ ID NO: 196697 - DNA, 635 bp, Cannabis indica
gtttggttcttaatcgatttcattttgagtttggattcatatttcttattcgattccttcctatttagggtttcttttggtttatttagcttatggtggcattgaattgggccttgtcttggtttcatctgtgttgaaatatgcagattatgcctacaattgttgaatgtggttttcgtgaaatcttgctttcaataacatcattcgagggttgaggatgggacttcctgtgtcgtggtattaaatatgcacgtccttcagaagcttcattatatttaataattagaattagatcaagtttaataaataaaatcttagttgatcatcttcactagaataatcggtttgcacataaatgaggagtggtagtgatgattatccactattaatattattaataatattgctcatgtaatttctgaaatcattttgacttttctatgagtatctggtttcgctcgttgattcagacagatgatttgatatacttatattcaattgaattttcaggttgttgataatctgcggcgtctcatccttatgggtttgacatagtatcatcttcccatcttttttctctcctttttcatcatgcctccagttttaaatttctttctgcctccattctttctttt

SEQ ID NO: 196698 - DNA, 1098 bp, Cannabis indica
tacattataattaattaccaattttctaatatttcatatcttaagttacccctcaacatttttctaactctttttctctcataaaaaagcaagaaaacgtttcacaaagagacaaagagattctggttttaaacccccaaaccaaaccaaactccaaaccccaagaaagagagagaaaagaagaaaaaaaaaatctaaaattttcaaaaactaaaccaaaaaaacacactaaataataacatagacaaaaacaaaaaacctaaaaaaaaaacccaaaaacaattgcagcaacttcaagaatatgtttttcttttaccaccaccacccacacgagcggttctcgaattgcatgcactgcacacacttttttgttttgtttttttcccataaattaatattttctttcatgagagagaaactaagaaataaaaataagagttacaaaacacattattactactgttatgctaataaagctttgaactttaatataaaatcagtctcaaaataaggaccctgacctcattttctcagaggtatatgtttgtatatatacatgtatatatatattattattattttatatgtgtatatgagtgagaaaaacagtgagagaatcgtgttgttggtttcccatttcttcatctaacagagtaaagaaaacaccattctgttttgagtttttttctttctataacgtattttccttaaacccatataaaaagatttcatttttactgatttcttacccctcatttcactttctcaccaactttctctccatccaaacacaaccctttactctctcaaaactatccaagttaaaatcaaacctttggtttgattctaatcacactatgaatcttcagcacttgaaaagtgatttcaactgtttaaatgggtataataataaaatatgagctttatcccatctcctcctcaactttctctcttcaaaacaagttgtgatgaaatgggttttctagatttttgagctcttcatctgagaaaaccaagaaagaatggattttcctaaccaaatggaaaacagagagaaaagagaataaagtgatcttaatgtgtttgatgaaatacctg

SEQ ID NO: 196699 - DNA, 571 bp, Cannabis indica
cgaaacatggaaaaatcttcaaaactcatctgatgggatctccaacagtgatagttaatggagccaatgcaaataaatttgttttgtccaatgaattcaagatggtgataagctcgtggccttcgtcctcggttcaactcatgggaaagaattcgatcatggaaaaacaaggcgaaaggcatcgttgcctcagaggcctaataagcactacctttggcaatgcagggcttgagactcttgtccctaagatctgcagctctgttttgttacatttagaccgaaaatggagtgaaaaagaagatattagcctataccgatcaacaaaaatcatgactttcaccattgttttcgagtgcttgttggggatcagtgtgaagcctggaatgttggagacttttgagagagttttggaaggtgtttttgctttacctgttcaatttcctggctctaagttttctagagcaactaaagcaaggtcagagatagagaaaatgattgttgaagaagtaagggagaaaaggattcaaatggaatcaagaggaggagaagaaggacaggaaggagggatgtt

SEQ ID NO: 196700 - DNA, 1048 bp, Cannabis indica
cctggcacaaaagcagcttgcgtggggcaaataatagacggaagaataggtttcaacctattagctatgatcttagcgataactttgtacaccacattacataaagagatcggcctgaagtggtttgtacgtttcagattttggaccttcgggatgagcacaatattcgtggcattaatccctctatgcattctgccactcacaaagaaatcttgaattgcctcgcagaaatcagtaccaacagactcccaatagtgtttatagaacaaaactgacatcccgtccggacccggagctttatgactattcatggcgaacagagtttttttgatctcgtcagagctaggagggcacacaagagcctccaactcatcttgagggatttgcttttgaaacagctgggagcaattgcaatccgggcacgtcacagcctccgtaaagatacccttaaagtagtccaagaattctctccctacggcttcccggccagagatccaggcattatcattgttaataatactctcaatggcgtttcgacgtcccttaatggtcgccgaaaggaagaaaaactttgagcatttatccccatctttgagccaagaaattctggccctttgtttccagtagatcgtcttaaatttaatttttaggtattgagttcttggtattgatggaagagcacaataatagctagttttattagaaaaaatgtgtaatcactaaaactttaaaattttttatttagtggagtttgaatatcttaaatattcattcgtagtaaattaggttaattgtatgtggttagatgggtagaaattatttttgcattgttctagattgttaaatattattaattgtatacttaattttttttgagaacatctgatttatagttgttatactgccgaaattttgatagaattatgacaaatttgttgacttaagttatttctttaaagttacttatctcatctttaaatttttcaaaatgatataataatttgtataatttagttgagtaagaattttgtcacctaattaagatgaa

SEQ ID NO: 196701 - DNA, 1154 bp, Cannabis indica
  modified_base (1083)..(1083): a, c, t, g, unknown or other
aaagaaagtgtttcttgtgcaacaagacctaacaagagattgtccaattcttaaatgctatcatcagaagaaggagggaaatacagatgtggtctcagattgtgatgacattgatggctatgaaagggcaagtgttcttgcaatatctaaatcaaagtctgagaatgtttggatcattgactctagatgttcctttcacatttgtccagacaagagtcacttttttgagtacaaggaaataaatcatggatctgtaagacttggagataacagatcatgcaaaattgttggaattgggacaataaaattgcagctagatggaggaagtaacactgagttaaggcaggtttgacatgtaccagaaatcaagagaaatttgatctctatggtcattcttgatagaaatggatgtactgttaaagttgacaaaggcatgttaatggttctgagtggagaaagtcttgtcatgaaggcagtaattgtgaatggaatctatgaactacaagggaagactgttaaggcacaggcaaatgcatctatctcaggtgatgataaaacaactatgatctggcatagaagggtgggacatattagttatggtggtatcaaagttttgagcaagaatggtgcttttggcaaagacaaaatcgatgcaatggggctatgtgagcattgtgtactttggaaggtaaccatattgaagtttggagtaggaaagcacaagactaaaaatatagaggattacattcactcaaatttgtggggtccctcaaaaacacaaaccaaaggttgtgcaaggtatttctagatgattattcaagatttgtttcgattcatcttttgcaaaaataagaatgatgcctttgcaaagtttaaagaacatagagtaatgttggaaagttaaattgaaaggaaaattaagaaattgaggacagataatgggctagagttctgtgcaaatgtgtttagtgactattgctggaaaacatgcattggtaggcacaaaacaatccttagaaaccctcaacaaaagggccttgcagaaagaaatgaataggaccgattttaggtagagggtgaagnatagtatgctgatctattctggtttgcgtaaaagcttttggggagagaggcgtagcaaacacgatcatgta

SEQ ID NO: 196702 - DNA, 1293 bp, Cannabis indica
tcaggagaaaagataagggtactcggtgattcttggctacctgatatgtctaatcccatggtaacttctacatctctcggtctgcaagagccaatggtggctaaccttatggttccttcttcttttgtgtgggatgtggagctaatcaatgatatgtttaatgagagggactaggctcttattctaagcattcatcttacattgacgaatcgtgatgatacaatagtttggctaaaagaggtttcggggttgtatcttgtaaagtcagcctacaaactaatccaggaattaaatggaacatggaatagtgccacctcctctgtcttttggaagaaattttggaaatcgcatgtgccgcccaagattaaggacctggtttggcgagcttgttcaaactgtctccctataatggttcaacttcgtacaaagcatgcgacggtcacgatggaatgtcctatttgccatgaaagtgaagaatcgattgtgcattgcttggtcgagtgtccagctgctcaaagttgctggaatagggttggaattagcactggggtgcccacgactgctggtttttccagctggtttgaggcgtgtttttagtagctcaatgatgacaggcgagatcttcttgctgccatatgttgggcaatttgggggccgcgtaatgacaaggtttggaatcaaaaaattgttgttgtattagagattgtatcatatgcagtaagttatcttgtacagtggaatattactcaattttctggtttggaaactacattatctggtctaaccaaggatgatggggcagagcaatggaggttaccatcgtcaaatagtatcaagatcagcgtagatggagctatctttgcaaatctaaatagatttggccttggcttggttgtgcgagatgacaagaggtttcttattgaaggaaagaccaagctttaccaagagaatgtggctgctgaagttgcagaagccatgatcttcagagaggcgcttagttgggtaaaataatactcaaacttgtggcagtgggtcttcattaaaactgactgtttgattgtggtacaatcgttaaggagttcctttagaatgattttagtgtttggtgatttaattaacaattgtaaaatgttgcttaaagatttaccatttgtctcgttttcatttgttaaacgatctacgaatgtggttctcataactttgctagagcgtctcgttcatactctgattgtactttcagtttgggggatgtctcaactgagctgttattttgtttggtaacagagtttgatg

SEQ ID NO: 196703 - DNA, 726 bp, Cannabis indica
tttgatcaaaaggaggcaagaagaagactttggagagcaatttttagagatcacatctttgtttttttttttttttttttttttttttgtttttttttatcggtttattttgtcattctttatgttaatttctattttgatggatgttttatcataattatgaactgatctttaattagggtttgtaattaaatctcttgaatatttgctgtgaataaatgtaaagatttcattcttccatcttaagatattttaaatttgtttttattatatatgaatgattagtgactgtcttacataatctatatgagtttgagtaaaaatttaaaaagtgagatttgagtttgagtaaaagtttaagaagtgagattttttttttgaatggagaagtgagatttaagcaagctataattgattatacaaacatttaatcttgaacaagagcattatgattgtttgtgtagtttttgagttgttaatcttaaaatttttgaatagtaattttatcatagaaatataaaaattcttatttagtttgtaaactttatattagtgaacattttagagtggatcgtagatattaaaatccctaattccctttatcttgaatcaagtttttgtgttattattttcgagtttacattattttacaaattctaagaaataaatattttgtttattgaatagaaactaaaaattaattgtttggtaattagtaattaagta

SEQ ID NO: 196704 - DNA, 1614 bp, Cannabis indica
tctcctcttgattgataaacgaggtgatcatgttttcctccctcctcattttaaggctaacatcaaaataagaagtattatcatcccaatatcggagccaagtaatcttacttttttttacttcaaataactagaaaacattctagcttgagttttaattgaagtgattgcaagaagctttttcagtagcaacccattttttggatcttcctgtaagagtaattgagcctcctagtaatttgatttggccaaatactcgttgaatttcttaagagcatgtttgagcctaagcagtttccccaatgttcaattcaaagacatacccttcaaatccttattccaatcaataccatatagatctttattctcaacctctaaagatttgacaatgcaattaatgacaatgatcaaaaaccacattccattggaaaagagcttaattttgagaaaataagtctacccaataagtctcattcttgaaaacattctagagaaaatccagtcaccattattagaccaaatgaaaaaagaacctttacttttcatcattctattattaatgaggtcacaaacaaatgaatcaagatctaagaacaaaaaacacaactgtctatatatccaataataagacttcactattttatataaactaactatttattaataattaacatttttagaggtagctctccattcctactcaaaagtcaaaagtaaatattgggagaattatagtattcaattatttacaacgtaacatccaaaccttagatgaggtaaatataaactaactagccaatgtttttttttttccctttttggtagttaaattatacgaagacatatgaatttatataaacattttttagtagtaagtttatatttccttgagactatttaatatttattagtctccttgtatataaaagtaaatattattttcaatcttatattttgtaaaaattattgattagactctatattttcttaaataataaattaaaaatttgtaatttttaaaataatactaaatagtattttaaactaattatttttatcaaaataaaacttaataaaagtgttatgacaaaactagttacgttttctacatatattcatatattcttatacgtgactttccaaccaaacatatttcaagtgcactcttgtggagcattgttattggcaccattacacattttataagtggcactctagtctacgattagttagcgatattttttaaaattattttcttaaattatatgaaacccgatacttaattacacgaatagcagtatgacaccaacgagggtactaagtactagtggtgccttttagtaattatgtgtatgtatattttttttaaaataagagaattgctaaaaggtactattagtatctagcacactatttcgtgtcatacttttattgatataattaagtatcagattagatataatttaagaaaataacttttagggaatatctttaactaatcataaagcgctacctatagaaagtgttaaggattactaatgctcaattacaaactctaataaattaatgtaggattaattgtgaaaatgtgaatgagatatctaataaaaagta

SEQ ID NO: 196705 - DNA, 1872 bp, Cannabis indica
gcgcggatctattccctagtttacaataaatgtgactttatacggggagagatattcaaccctagaatacacatcaaaccaaactgagaataattcaatctctatatatccaaacattaaaaataatcatttaatacttaataaaatttaactttaagattttctatttcttaactctaataattgtggtttaaattctattttattctaatgtaaaatataagttttaaattgttatttatcaaaataaaaagtctaattagtaacaaagagagaattaaaaagtacatattaattaatttattgagaaagcaaaggaataattgtatattgagaaaaaaaataagaatcaaatggaagtttagaaactacatacctcaaataacacccatcttttccttttctcctaatctcagtctcttgagtatgtttttttattttcttatctccttcgaatctcagtttcttgagtatgtttttttattttcttatctcactttagtagtgtgttgttgtatttatatactagtagcttgaaaaaaaaaatagtatttattttcctatttcaggttggtttagtagtgtgttgttgtattgatataataataactttaaaaaaaaaaagaaaaagataatacaatgttaagattacgagtttaaattaaagatgaataaataaaataagatatttaatttttaattcttaactttcgttaaattacacattttgccctcattttcaattaaattaaattaacttgtcataaacataaacctccaaaagttcattgtttgtctttggagaaagtttgtgtggatgatgaccttttgtttgattggagtgtggattttttttgaagcggttctcttcggccaatatttgtaccactcgtcttggtaaatctagggttggggcagtgtttcgtggtgatacttttctcgtccaagcttctagtacttggacttggaatggttgtttctctcctaatattgatgaggttttgggtatcttcgttggggacttacttgcttgtcacttattgaatgggtggtattgggtctgattgtcttgctgtaattaatgtcattcatcactgtaaggttgattagtcctattttggttgtattattagagatattattgcttattgtaaaagttttagtgatacttcttttatgtattgtcctaggagtgctaatagggtggctcatactttaacaaagttagcattcgtttatgtttagtgtcctagtcaccctgattatattgatgttgttttgtagacacttttaagattaatgatattattttgcactctttttcctcttgaggtttatcttactcggtttacttttaaacttttaatgaagtttaaaaaaaaaaagaaaagaaaatccaaaaatatttataatttaaaatctcaatatgaaaaaacaaaatatttttcacgtctttttaaaattaatcttttcgaattaatttggtagtcttctaattaaaatgtctaattattcaattttatttttcttctcaaaaaataaataaataatttgtatcgaagattgagatttattgtatttctaattctaatcactctacaattttgtccaatactgttatactcattttttgaagtaataattgaaacgagtcaatttatgtaacatgcgtcataaataaaatatttaaaaataaatatacataaacatgtcaagaagtttaggacacaacttgaagtgtaatctcatctaacaacaattgtaatatttatgaattgatgtactttaacattgttgaattaagatacttcaatattgttaagatattcttaaagaaaatatataacaactataaagatgagattctgtgga

SEQ ID NO: 196706 - DNA, 2119 bp, Cannabis indica
tctttcaaaaaaaaaaaaaacttcaatttgtaatgcaggtaatgaggtatctgtaaacaaaattttactggttatgctattgctcgcaaaatgaaaggaggatctttcccattcatttctccattttcctttccaatgaaaggagaatgtgatataaaaatggtgaatgaagttcaaaacatgacatgcatttagcttcaaaagtactgcgtacacatattaattaacatgggtaaacttccaatacatgaaatgcaaagctggaaattgttccacctgaagtcgagatcacttcagcatttgtccaaaaagggtttattaccaaaatatgaacacgattccatgatccatctagagagtaaaacatcaactataaacctcaacagctcccaaattaaaatttaaaaaaaaatgctgaagataagaatagaaaaacaaaatgagagcatgaaataaaagctccaatataccattaaaataaatagctattacaggagaatgtgtatagatcactagcaaaaaaattaatataaacaatacctatggcttcattcacagcactactttgaatcccttcgacaggaaatcatccctacttagagcagaaaacaatgtatgtaagtgcagtaatgttagcatgcaatattcatatgtcaagtttcaaacagttgctattggaaagtactataattagctactctaaaggaactaattaatttttgaacatctatcatatattgactattgctaaactactaaagtgatcttgaccaatttaacaggtacacctttacctactttctttcaattgaactctaaatatgataaagcagagagcagttttaagatcaaatattagaaatgtattaagcaaagaacaaaacgaaaaaattggccagttcttggttttaaagtaagcaatttacaactatatatgtctgagtgcaataaatagatgattaagttattatggagaaaacataaagtggtggaagataactcagctttacctcttagcagcttcctcctccttaggcttcatctccttcttcagcttccttttccacctaagcttctctgccttcttgccagagatttccccatccctaccaccaagtccaacaaggctttgcaggcacacacacacacttgaaattggataggcataacagaaaccatcacattcttagccttattactttccaaatcatacaaaataaactttttggaatcctgatccattagaatttgattaccacgatgcttcaagtatgtaacagggaatacataacagaaaaagtttatctcatctgatggcaccactgaacacagcttagtccaagattccttaaccccataatccttcatcacccatatgtcaatacgatctgccttggtttcccaaaaataagaagatcgttcagaggtgtaattagcaatcaggcaaaggcaacttcctaagacattcagagtcatgtgaaaatcacaatccacaaaatttggttgaggcaccacatagtattcctcactcacaatatcaaaagcagcaattaagttggaaacatcagatactggtttcttatatacaacccaatgtaaagcattgccgacaagaacaccgtcctctttataacaaaggtatcctcttccacaaattggcttttaggctataaactttaacctgagagtcattctctttcgcataatactgtaccaaccttattaacttgtaatcatttttttttatttttatttttattgttaacttgtaatcatcgttaatggggtcatacctaaatccgtaaactatgtaaaaaaaaggcctttcgtgcaaattcaatatcagcattgggtaagttcctgtaccttttagtaaatgggttccacaaagccacatcatcatacgaattgaacaggacaagtaagccattgcaagagcccaaaaactgcggtagtaccgcctcataatcgattggtgattgagttcgacggcggagttaagattatccaggtcgacccagtagatgtcgctccagctgagaaccagaccggcgttggagtagttgaggtgacgttttgatgaaaatcaagggccgtcgatcaaggagcaccatggctt

SEQ ID NO: 196707 - DNA, 561 bp, Cannabis indica
attgagaactttgatgtgtcatactctttagtgatgatttgttaaacataaattgtgtctttctttcaaatgtgaatcttttgttgttatgtatgttcccttagatccctacaatgtatctgtatctgagatatttaaaacattgtcattgttgttctgttttttgcagtttctattgcttgtgctgttgctggttgctgcaggactgctttggcggacctcgtggcgcgtatggtcctcctggtcctggcggaccgcctcctttctaagtcgtttttcttttactgcacggagaccaaaacttgctgttgctttatctcaatctctttggacacaaattgtattgatcgtgttttgtttaattttttttttacaagtgttggaggtgtttgttactgtactagtttatgataatgaagatcatttaaacaattatattttccataataactctccaacaaattaatgccaaagttgcgtttttccttggctaagtttattctctatcttatatatgtgacaagttaaccttttggaggttttgtttttttttttttgcta

SEQ ID NO: 196708 - DNA, 1011 bp, Cannabis indica
taatttattctgattctaattactgtatagtaaacgtgttagtactagtggtgttttactaaaaaaaaaaatcttatttttagttacaacaaaatttgtgactaaagataaaagaagttgtggctaattgtaaattattattgtattgtgactaaaagctccgtggctaaaagtattagtcacaagaattataatttttcgtaactaaatgtgtttttagtcacaatatttgttgtgactaaaattaaattagtgataacttgtaactaaatactatattttaatcaaaagtaattttttgttgtgactaaaagtcacatttagtcacaaaaaatttaatgttatgactaaaaagttgttactaaaaataacaattttttgtagtgtttagtattttctcgatatatcgcgttacgattagttagcgatactgcctaaaagctattatattaaattatataggatcaaatacttagttagactaatatcgatattgatacataataagacgctaaataccactgataccctttagcatttcatcactttttgaataagagaggattaagctaaactaaatggaaaaataaatggagacacaaagtggatgatatgatttttattgcacaaatatctattttcgttttcaaggtttaattattgactttgaaatatgcaataacctaaactaagctataattaattgtttggcaaggaagaattatactttgatattattgcatgacaatgagatcgcaggggctgcaaaaatgtcaaaattttaaatgtgaaattagcatacgatatacaatccgcacattattacagggttgctttagccagatcaatctacaatttctatcttaattcaattggtaaaaatttgatgtgtgtgcatatatatatatattgtcatttacataaaattatatatttggatggttttttttagctcaaatcatctgacagaaagaatactaatttagatagagcaagttgccaaactattat

SEQ ID NO: 196709 - DNA, 1016 bp, Cannabis indica
cttttatttaagttatagatatagagtatagattctcttgaattctaacttaacatataatcatattttacatcattatttaataaaaataactattacttaaaacttagatgataagagcataatgctctttactttattctaagctattcttaacaactatgggtaagatggccataaaccaatacccagcataaccctgatattataattatttataaatcttactccactaattctaagatattaaactgtatccaaataacataattggccaaattatcaatttttactattaccgagcataaaattgaaaatactaaaattcataaataaatggcatgcatgtcacatttggaatctaataaaatctccataattgaaaaattataacactaatgcctatttttaacaacaggacttattttttgctaatgcacatattatcataaataataagtaaatcaataatattctgctaatttatgtgtctaaatatatggtcattacaataataataataataaccataacaataaagagacacaagatgtcattaactaaaatataaaataaaaataaaagctaggaggtactaatgccatcactagagaaaatagattgatcaagagtataggagacaaaactgcactcagttaccaaatacgtaggaggcacaatgtaatgcctgatttgtgtcgtttaccacaacaaatttactaatttttatttctatattactaattattatagtataacggtaaatacaggtcgatcccacaaggactattatcaatttattattcaaaatttagtaacaagaattaaaaagggggttttaattatgaagattaaataacataaataaaaaaatagaatgagatactatgatattcaataaatagttgaaggttaatcttcaccctcaacaatcatccttaattcttagtaatgaatgttatttcaaatttctaatcaaactataaatcccgaagataacgctaaagcagtcaatt

SEQ ID NO: 196710 - DNA, 701 bp, Cannabis indica
aaaaaaaaaaaagtgttaccaacttgttgatcaagttattacaacaacttttaataagtgttattgtatttttttcaataaattaaattgagatttcttctcacaaacacttgcaatatatattaaatataaacaagatgattttataatatcgaagatgcacaagtaactcatgagtacggaaaagtagatgaacatcatgatagtctagtctgggaaaatgacttgtcaatctcttcagattcgaaactaaactttccctttctagttcaagatcacggattttgtagatagatcatcaccaatatcacaagctctatcataaaaaaaggaagaaaaaattgcagccattagtatattatattttgtattcactgatcatagtgattttatttttggtatttatactaagatcacaacatttacagaaaactcatatttacgtatatagtagtcttctaaatgaaaagggaaaaaaaaaaggttgcaactcactgcccactacgagactctgtcatgactcatgcttaaggaaacctcctaagcctctagcatttgtgaacttatagaaagctccagaaactgaagacacaaaaagttagatcgatagcaaattagactatatgaaaacacatacaacactttccaattacaaaaaattaaaaaaaaaaacacacacacacacacataaacactaaatc

SEQ ID NO: 196711 - DNA, 1163 bp, Cannabis indica
acctacttttttttaaaggtattaacattactctctttaaggatagttatattactaagggaataacattccaaaggctagatcttcaaaacaaagaagataatagattccaaacagttgaaatagattcttgtttgggaccccaaacaattctcattttattatgaaatatatttgattaaatagtcctatattatttaccatttggaatgtttttattcaactttataagagaagatgtcaatttgcttttatatttaatccatatatatttaaaattccttaatttgtaatactcttatttttcaacaataggctaataaaatcgtttacattagaataaaagtcctcacaacatctttaattgaatgatttataagtcgccaattgtgaaatacatcaaaagaatacaaaaatttttagatttctatcccgaatgaatacgtaacagatcatatttattaaatatcaataaaaaaattctaataaaaattaaatagagacatctcaatattattcaaactaaaataaaagaaaataacataaccaatcatattcctgatattaaatatctatgaataatcattgtaaatcaatggattacatgaaactcgttttgagttttcattattataagtttgaatatgtgtggggcattgaaaaagttgataagagtagaaatgagaaagtttattaagtgttgatgatgaagctttttataaaattgaactaaacaaaactcttcaagcttaacaaagtgatatggtcaaatcaaaaattgcccaagcacaattaaagttgactacttttattttgcttttttatttttctttctttttcatctacttgtagatatgtatttacgcgtggtagactttggcttttttaaaaattgcaagaaacttctattatatttctataaaaaagataataaaaaagaaaagataagatatatgagaaatattattaaattaagttaaatttgattggaagtattgaaatagaatgaaataaaaataaaataattttaattttattcttacagtttaaagtattagaatgttactctaatagaataactattccaattttaaaatgaaaggaatgattattaaaaacaaaattaataatttttgggagaattatcccataaattatttttt

SEQ ID NO: 196712 - DNA, 603 bp, Cannabis indica
gtcttatttgagaattttcaccatatttgggacattttgagaagaaaagaaaaaagggggtttatttgttaattaagactctttatgggtctaattgataaatataattacattgtattttatttgataattatttataattattaaattaaaattgatatctaaataattagatgtgataagtggtaaaattagaaaagacacattgtttcattaacttgaaataaagtgaaaaaaatctaactctatggcccattagggatttcgttcggtcatgggttagattttgagtacaattgtctttattttaagtccaccccatcttaagttaaccctaaggagtgcctatataaggaacatgatgagagacaaaagctagacctagctttccatgtcagataattctcattctcccttctttagccatttcaaaattactagactatttctctctctcaaaatgtgttaaatgtgaattgagtaccagcccacactaatcaagatgatactcagacttttctagaaaatcgtgaataaatattgcttattgggtttaaggaaagctatctaggtttagtaattggtgatactctactacaaaaa

SEQ ID NO: 196713 - DNA, 876 bp, Cannabis indica
agaataaaatcagatggaagcagttcttagcacacattaataaacaggcataccatctagcaaaactgaagattgcaaggcaccatggataattgaaactaggtggcaaaagacttttggaagtgctcacgggcagccaaacagggaaagggaagtcccttaagagagagagacctcggtggcattgtgtcctcaacaggattcaaatccgagtaaagcaaatacaagatgacagatatgtcttgtaaaagaaaataggataaaaacttgctgagaaataaaattcctcagctactgaagggttgggcaaggcacccaccaataaggattatatcattattaattattggtttgatacctcaaactcaagctaattttcgaactactttattaccaaattgctgacacctaaaacggtttaagaattagctttaacctcttttcaatagaaagaagtgcaccatagctctacaatcagtaatgaacaaaatacacatactaatagagtcatgagatgaaccctaaatctgaaaaagtttatgcattttcatgtcaaggacaaataaatatatagaagtagggagatgagcttggctaattttgaagataaatgaggaaagaaataagcttacatgacagaagaaagagaatcatttgaaaattgagatttttccttgaagtaatagtagtgagcagcagcaaaaaatggaatccgagtaagcccataagccaaggttcctgaagtaaaagggaaaagttatcaaacagttttgttagatcttctcgttcatgttcatggattccaaacgagtaaagagaaagagagtgagaatggaccttccaatcgatggcgtggaagaaaccgatgaaattatc

SEQ ID NO: 196714 - DNA, 1160 bp, Cannabis indica
aaaaatatatatttttaatcattaagttagaactagatcaccctcgattgtaactagcaccttctattagcaccttctataagtgtcactctcactctataatttgttagggatattttataaaacttactgagatctgttatttaattacactaatagatctgttatttaattacactaatagcgatatgatactaactagctgtagtgccctttatcaattctcctattctcctaagttcaagaaaaaaagaaaaagcaacttcaaaaacacaagtaggatgtgctgcattaattgtgtttgttgggcagtacagcaaaacgtttaactaaatttttaatgtgccataacaaggttgataggtttgacttttgagtaggtgctgcttttattgaaaatttgaaacgatagtagtagtagtatagcagcagcactagtgccacttattttattttgttttctttcttttatttctgccaattactttctcaactatcaactgtaaccattaataatagcttgttctggcctctgtgttttcctacctttttcctttgaaaaatcaatcgacatttgctgtacaagattacattatatgcatgcattttaatgccatgtagtatatgcttcaaatatataatattctgtaaataaacataatcaagagatgtgaaattagagaaagaaaataatttcgaaatgttaattcattcttttgatatatatatttatataatatattttaaaagtagatagatcttctctaaagttattttgtaaattcattttcattgaatgatgctttgtaaaatgagattacataggtagtgttgaatattttttatgtttacaaaatatactttgcaaaaaattaataaaaatgtcattttagctagaaaatattatattgtcacaaatatcatccaaagaccaccttggatggaaaactgttgtgaatatgtaatctgtaaaaaatggatactaagtatcattattggtgttgtcttactagagcttctaggcttagcccctaactccccggacgctgccatattcacaaacgcaaatgccacatcagcaacacctgcggcttcggcgacgccctccacaacaggaacaggatcatcccaaccccagacaagtaacagcgactctagca

SEQ ID NO: 196715 - DNA, 2177 bp, Cannabis indica
agtaaatcaattaatatatatttgctcctaaacgtggtttgagacagggggatccgctatctcctttattgttcattttgtgtgcggaggttctctcaaaactcttattggcaaaagaagaggaaggtcttattcgggtttactcggttggtagagagggttttccgattacgcacctgatgtatgcagatgatcttcttatttttgctaaagttgagaatggtaatgtgactgcggttttggatgctctggataaatattgttattggtctgggcagcagattaatgtaaggaaatctaaggtgttcttctccaaaaacttccctctccggcgccgagaatcaattaaaaacctgttgggttttgaggaaatggatggcggggaaagatttttgggcaatcctttgcttctcaaaggcaatagaagtaaggattttgagtttattactgataaaatcagttcccgctttgaggggtggcgggcgaggctcctttctcagcctgctcgattgacgttgattaagagtgtcttggagggtatcccgatttatactatgtctgtttttaagctcccaaagaagacaactaatcggatagatggcattatacgaaggttttggtggacgggacaggctaaggatgggcgttacctctctttaaaagcgtgggattctctgtgtaagcctaaatcctgtggtggtctgggctttaggagggctgaagacattaatttctattttcttgcaaagcttggttggactatggcgtcggaacgaacttgcctatggaaatcaatttttattgatagatattgttttgagacagcctttggggactcggctttgccttcaaatgcttcgccagtggccaaaagcatatgggcgacgaatgatttcattgtgaagaacagtgtctggctgattactagagaagcaagagtcaagattggcaaccatcaatggtcgggtttcgatggggatttgattgactcgggctgtttaaatccgatggtgtatgatgatttgtgtgtgagggatttgatgatggaggatggtctgagttggaataatcatttggtcgccacctggtttcgtccgacttcggctgaggccattttcaagattgctcttccctcttcccaacctttggaccatctttgttggaaagttaatcctttggggtagttttctctcaaaagtgcctattaggctctaaattcgtctcatttgaatatgtggatgttgtttgtaagcatatctggaagatgcatattcatgagagactgaaattgttcctttggaggcttgtccaagatgttctccctttcggttctaaaatggcttccatttttggctctaacattgggcggtgcatgctttgtggctcagaggaaatggatgttgtgtctcactttgtcttggggtgtgatgttactagatctctttggttctcctccccgtggggtcttagaattcagagtttcaatttggggggaggtagagagctggtttcttggctcttagaaccaaggtttctagttgattgtggtggaaaggtgttgaacgagttttttctttatggtgcgttttgtatcataaattgtggaatgttaggaatgatattttccataacaatggggcgctgtgtttggcggaggtgcggaaggcaattgatcggagttttgcggagcacaaacctctcttaaaggctggctgcgacattgaaagcaaccaaagggctatttgtgcggttcggtgggctctaactcggccggttagaatgcgatgctatgtggattttgcttctgcaggtgacgttggtgcggttgtagctgttttatatgatgttgcaggtgaaatttttgctgcagctacttctaaggtgcgggttcattcggtggtgcagggtgagctcgaagccgtgcggtttgggctcaatatggctgtgttactggaggtggatgtgggcactttcttctcggataatcaaactttcgttaaggctttggctgaggaaagttcccctctttggcaattgcatttttcttttgataatgttcttaggactgctgacattaggaatgtagctttttgttggatcctcagatgaatataaggcagcccatgctcttgctagatggggcttgtctcatagttgtaatggtttgcttaattttt

SEQ ID NO: 196716 - DNA, 637 bp, Cannabis indica
ttttgttttcacctagtgacatgtcgtttactcttaaacgacagtgtccaacgactttggaggagtagaactagaagagatctctaatctctatggactattttttttgtttgaagaatatggtatgcgatcgtatcactattaattaattttcttaactgttatcatatttttaaatctaacccaaactttcactctttttttttttgattggcctttaaggttgcatagaagactcattcgcaatattgtcgtttttgacaataaaataaaaatctcaggcagcagtggcaattggcaatgtctgaggcttcgttccgagctccgtgagagaagaccagtagcctagccagtaggagaagaagagtgaagcctactctatagatcaccagatctaatatactctcatctccttcttttcagatctctctttcgcaacttgcagaaatttaaggtacgtgtctttctctccatttctctgcaattgctcatcaatagtagctcatttctttatcggatcttggctcaatggctttcgatccgagttctcggcatttgtttctttactgtgtttcttttggttgatgctaatttatgttaggcgtcctttttgattaacaattttttttttcttttt

SEQ ID NO: 196717 - DNA, 886 bp, Cannabis indica
gtttaggtttgctaattatgatgttaaataaagatattgaataaataaatgatggttggcaacatgttactctcagtcacatcatatcaaattgaaagcaaaagacatataagggaggacatgatgtaacacatttcaaatgttgtaatgttttgttatatcattttcagcaatggtcaccccatgacccattaatgctttaaacaatactattgcatatacttattatataaatatatttttatatatgttttagttttaccattggcatgtaacataagtgtctttttcttttcccttttccttgttttgctctcatttttgtatgttttcctaggtgcacatatgggttagcaatttaaagttgatcaattatttgtccaaaatttggaaaaggtcactcactaactaactatttgaacaacattttgtctattttggttatttcatcactctcaaatcttttaacccttttccactgaacattataaatatggactgaacatagtgagacaacaatacataaaacccttatggacaggttgggaagttaatttggtactactagtactgcaaaagctttcattgtccaaactccaaaccaaaatttttaattgtcttcttttcttttctgctcaaaaaattaattaaatttggataaatagtaaagaagagagagagaaaagatgggggggacaagcttaggtatgcaatgaatttctttagtaaaaccaaaccatgatttggacatgtcagaaacaaggctttgatttatctctcctgccccccatgtgatcgtttatagcaacgaccaattctcctcacccctgttatgtcaagtgtaaagtgactctatcaacacttcaaaccccccctctctctctct

SEQ ID NO: 196718 - DNA, 2555 bp, Cannabis indica
tttaaggccatagatggctttatgtaaatgaaaaacatgatctggtttggtgagatcttcaaagcctcttagttgtagaatattgactgtctcttctcaaatgccattaacaaaagcattagagacatctaattgcttgatttcccattgaaatgaaacaacaagggtcaacaccattctgacagtgactggcttcactacagggttgaatgtttcagcataatcaattcctggtgcttgtagataacctttggccacaagcctagatttgtacctatccacactaccatctgaatttaatttgatgcgatgaacccacttattatcaatgagatgcatatgaggttgatatggtacaagtgtccatgtaccatttttcttaagggcagtaacttccttattcatggatgcatgtacaagcacgatcattaagagccaatttgagagacttaggttctctggggagaagagattctggaagtttatgttttgttgccaaatatgccttgggtttaaagatgccatgttgagaccttgttgtcatggcatgtgttctctaagatgcagcagaaggattatgcaaattctgtgtaggttcagatgaatcctgtgaagaaccagtgggcatagttgcagcattggatggtgatagagtctgatgtagtgatatagaggagctactggatgaatggcctaagtgcaagggagcagcaaatgatgaaagagaatcattgtgctcattgacagcaataggtggaatattagtttggggaaaattctgttcagattgagtaaaaaattgagttgtgggaaagaaaatataggtatgagattgtaccagttgtgtgttgctagtgtgaaatgcaggaaactgagattcattgaacaccacatttcgagctatgaagaccctaccatctttattttcacacatgtatcctttatgtttgggagagtatccaagaaagatacactcctcggatctgaactccattttgtgatgagaataaggccttaaatgaggaaaacaagagcattcaaaaggcttttgaatgctgtagtcaggtgctgcaagaataggcactcataggggctaatgttgccaatgacaaaggttggcattctgttaatagagtagacagcacattggaatgcatgccaccaataagacatgtcaagaccaaaatgtgccagtaaagttaaaccggtttcagtgacatgtctatgcttcctttccactcgtccattttgctcatgagtgtgtggacaagacaactgaaacttgatgccttgatcactgagaaatctttcaaatgatctgtattctcctccttcattagcttggacagcctttattggtaagttgaattgcttttcaactaaacttttgaatcgaatgaacacttcaaatgcctgagatttgagtgtcaaggaaaaaatccaagagaaacagttgtagtcatcaagaaaaggtatatagtatttatagttatctttggacacaacatgggagggaccccaaagatcagtatggacaagttctaaaggttgagatgctctactggctgacagtgaaaattgaagtcgatggctcttccctaattaacaagatttgcaaaattgcagatttttgagggagtgtggtatgttggatttagttaatattttgctgagaatagcaggggctggatgtcccaacttacaatgccacatgtttatatcattatgaaaattggtgttatagacactaggagaggaacaagaggcatttttattaatagaaaaatcattacaatgggaaactgcagtagcagtggaattacatgagttcattgtactacaattacatgtagataaacttggaacagatgtgacaagattacactcaagagaatggttggacagtttggagtggccatcacctaataggtacaaatcattcttgagaatccctttgagaaggaaagcccttgattgtttgtccttgacaaaacaacaagatttgtgaaattcaagaaaaacatcattatcttttgttaatttggatacactaaccacgtttttggtaatggatgggacatgtaaaacagattggagtttcaaaggagtagaattgaaagaatgaagagtggttttatcaatatgagagatgagcaatttcttaccatctcaaacaacaactgattcttggccaatgtaaggtgtagcagagtccaaagattccacagcaaaggcaacatgattggttgcaccagtatcaacataccattcaatatcatctccaaaattagggagagtttgggtttgatgatcaagaacaggtccctgttctatgagatgaacttggggttgaggtgaaggagtcgtgggtgtaacccagttcttgtcaaatctgtaatgataagttgctgcagtgtgaccatatttgaggcataattgacacaaaggcttgttattggagggagggcggccatagtttctgttaggcacccttgattgttgttgttcactagtaggcattctgccagaggcaaatgggtgtcgataaggtccag

SEQ ID NO: 196719 - DNA, 805 bp, Cannabis indica
aatcggtggtcgatggcaagcacaggtggaggaggtggaggggcggtggaggtgcgtcgccggtggtgttgggttccgtcaccgtgtgtgagagagagggagatagagtgagtgagatcgagagagggagatagagtgagtgagacagagtgggtgagttgtgagggtttcagatggagggaaaatgatgagcaaaatagagggaatgaaaaatgggtttaatatagagggggtttttaatttttttaaccctatacccgacggttttgaaccgtcgggcaaagaatgggccacattttaaaactgtggcaaatactttgctcgacgtttcaaaatcgtcgggtatagtgtaatatttttctaaaaaaaaaaaaattgctcagcatttttaaaccgacgcttaatctatacgagtggttaaaaaccgtcgcctatagtgtattataggcaacggttttaacactcatataatttttctagcgacagttcaaaaaaaaagtaagtttttcaaactgtcgggaaatctgccttttgtagtagtgtcatttttaggttgttaaatcaacatacttgtgagtagatctaagatcctggtaaaattaattccaacagttaggaccctgttggtgagccaggagcattttagtaatttttacccgagaacggtaaaatagtgaaattaatttatttacatgcttatgggactatattattatatagtatgcatgtgttatctttttcaggtgtattctgacaggttagcgcggtatagtcacaaccgggtatttcgggccgaaccgggttc

SEQ ID NO: 196720 - DNA, 883 bp, Cannabis indica
agattagtttgcttgtaactaattctattttccagcttgtgtaaagctttgtataaatcttgctgaacattgtgactgttaattatagaatcattcattcatctttgactctctttgtctttttttctctcaatttttcctctgtctttcttctttgttttcatacttcccaaacacaatgtctaagacatttaatatggtatcaaagcatggttttccactattactagctaatgtagtcacgaattaagaagatgaatttcatccacaagcaagaaacactttgaatcaaacaagtattgttcctactttgtcaaatgtaagaaaccaagaaattggtggatcttcaccaatttacttcaatcccaatcttttaatacttttgaatgatcacaactatcttttgtagaagcaatagttcctggcagctatcggaggaaattgacttcaagcttttattcaagaatcgagttctcatatgaaatacgtgacagatgaagattgagctgctcgcaatgtcaatcctgccttttcatagtgcaaacttcaagataaactccttgtatcttggcttctatcctccatgaccgagagcttgctcaccagaatgttatggtggaactctactagttagatctgggattacactaggaatatacttcaccttatcagtatttgcgaaaattctggtgattcgaactaagcttcaaaacctgaataaggacgctcaccctcaataattatcttgtcaaggtcaaacaaatagttgatctagttgcatttgctggaaaagttcttagtaccaggtttcatgtggcaaccacattaatggatgtctattctagatacacatggctttacctgattaaaactaaagttgaga

SEQ ID NO: 196721 - DNA, 1116 bp, Cannabis indica
aatatataccataccttgcataatgcccagtctgcagaatcaaagaatgcacgttcatgatcctatatatacccacaaaaaaattaattaataatcaaagatggtaaattaatattgtggcataaaaaaacaaaagaaataatatttgaaaattatatatttgtcaacctttgaaatcaaaggcttcttctttggaacaagtcctccatatttcttcccctgaactgatccttcctgtgaattttaatccaaaatcttaataaatacagaagaaaaccataattaattaagcttcatattcatattgctagagctgtatgtctttgtaacacattaaataattcaaaaaaagaaaagaaaagaaattaagaatggtcccttattgatatttgtaacatattataacacagctcataatataataattggatttttatattattataaggtattgtcaatgatcaagacccacacttttgattggaaccaaaagtatgtatagtaattggccaaaatatgtatagtacatcttattgcaattggccaaagttttcaaaaatataaagctttcatattatttggcaatctattaaaaaccaaacttttatttgaaatttaatagagcggctctttttgggtcccaaatagggagatgaacaatgaattaatatccttgtcctcaatctatataatctaatattttattatggctaaaattatttaatgaatttgaaacaaatataaaataataataaaaaaataatagccatattgattcatttggacagctaagtaacattagaaattgtatactatatagttagtttatatatgtactaatttactctgccgacatttttgagtaactataagatttaattttattcataaaaaggtacaatttgtcatcaatcattatatatttagagtaaggatacatctacaaaaatatctatatataaaaaaattctatcaaaaaaacattatgtatattttatttacttatttaaataacgggatcaatttagcaaaatataaattaaaaaatcaataaaggactagagcctagaggtagcctatgcgaaattttaatatttaaatattttttacaattta

SEQ ID NO: 196722 - DNA, 2141 bp, Cannabis indica
agagagagagagagagcatacatactttttttcatatttgaaaaggacacatttatctcattttcattttaatggaaaacgacatcgttttatagtttggttttgtttaacaacgacacaatttgagaatatagttgaaattagttatgttatcggtacggatagtgcgggttataatattttttcaaacaaaattgcataatggttttataatttttctaattgcaaccgcgaaaatacaatatggtacagtacggtttgaacgatttacactgtcatcattatcaaacattataactaaaattttaaaatcaatataataaaattttaacaatataaaaaaaatttctctaaaagaaataatgtaatatacacatatattgtaaatatttatctgaaaaaataaaataaaaattatattgtaaaaattagaataattacgacataactacctaagtttaactctgcattgcaaataaatacctaagtttaattttgggaataataatacctaatttatatttttgtaacttcataggtacctgatttttaaatgtgaagtcattatatacgtgtcgtattcttattgatatatttaaactaatatattttagaaaataaaaatttaatgacctggaccaattgagtattgtcacatggtaatttacttaacgtttaaccaaatatctactgaagttcaagaattataactaagatattattactgtaaaaaattgaaattaaatatttatttgcaattaggaattaaatttaagtatttatatcgtaaattactctaaaaaattagtaaatttttataatatatagtgcaatgcaatttgaaccgcaattattaaattcaaaactgtaacagcatccctaattaaaatcaagggagataatttcaaatgaggtgtctttctaataccaacgacgtcgtttaaaaggatcactgttgaaatcgaatagagttataaagagagaaagagcagacatactctttttatttgaaaaggacacaaaattcattacattttcaaacgacatgtcatttttctgaaaacgacatcgtttataggttgcattagtctcaaaacgacatcgttctaaagaaacactagagaaagaaagaagcagacatactctttgtattagaaaaggacacatttaattttcaaacgacatatcgttttgtttttctgaaaaacgacatcatttacagttgcagtattctaaaacgacatcgtttaaaagaaacactgttgaaatcgaagagagatagagagagaaagaagcagacatactctttttatttgaatgggacatacaaacgacatgtcgtttttctgaaaaacgacatcatttacagttacagtagtctaaaaacgacatcgtttaaaaaaaaaacactgttgaaatcgaagagagagagaaaagcagacatggttgttagtttactttctgggaaaatggctttctctctttctctctctaaaatacaaaccctaactttctctctctaaaaacttcatcacaaaatccaaacccaaacccactcactctctctcttaccccactttctctctctaaaacaggatatctgtcgccttcaattacgactttcccacccacacccacactcacaatcacattctctctctctctttggatttttctcttggtgtgtgtgtgtgtgagtgtatatatacatttcaaggtgtttttttatggtttggggtatgaatcaagtcgcggtggtctctaaggaagctgaggacgagtcagcgactcagtccatcgagctttccaaaagttgttccgataaggctgattccggtggtactggtactggtactggtggtggtggtggtgttgaagaagaagctgttgagaagccggaagatccaatggaggaggattcggttagtcctgctactgtgttttgtattaggcttaaacagcctaggtcgaatttgcttcataagatgagtgttcctgagctatgtcgaaattttaggtaatttttttcttcttgaattttgaattttgagctttaatgttgggattattggttttgatagaatctaattgggaatttgaatgagactatgttgttgcccagattgtgaatttgggcagaa

SEQ ID NO: 196723 - DNA, 1408 bp, Cannabis indica
atcaaatcttgtgttctatgtcagaacattgtagtgcgggcaccaccaaaggaaaaaccacccttttgtctaatgacacgtatctaacaccacaatacataggtgcgacacatgtaggacatttgtcctaaatcgcgtggtccccagctgtacggatacctttgccccacgagccagaatactgtcagcgggcttaagagtcatgtatttcatgtatttagcctaataaaggtccagtttgcacaaaaccctagtgggtcatgtgtattcccgaatccgaatcctagcctataaatatccatttataccttcatgcaagggggacaaataattcacttcacatcttcttaagttttcttgttctctaagccaaaaaaaacctaagtgagaaaatataataagaagttagcgttcttgaacttataagatctcattgtaatacatcaaagccattcagcctaatacattaactcgtggactagggttaattaacacccgaaccacgtaaaaaaaacctcatctccattctatatttacttattaacttcttaagctcttatttaaatttgttttcgaaaatttcagtatacactaatatatactaaaggaagcttctatggtgtacttccaatgcacccttatatattttggcatacaagagaattctttagtttatttttttcatggttttgtatgttttagttatttaagacatcttgtaaattttgagaaatttaaaaaaattgaacgaactggaaataaggtttagacagtctgttgtacttatatctattttattttatacgagtgtgaaacaaacattttgaacaatgctttttatattgtaaattattctgaatttattaaaattttacaagatgtcttaaataattacaacatatatgatcatgacaaaaatgaattaaaaaattatattaaatgccaaattagattggggtgcatcagtgcaccatttctttaatatatattagtatgcaaaatatattaattttgggaagcttctacagaaaagggtgcaccaatatacctatattgttttagtattcaagataaaaattaagtataattttttttatagtgttgtatgttgtagttatttaacacactctacaaaattttgaaaaatttaaaataatttacaatataaaagtaaaagaatagtcaaataatctattttactagcgtataaaataaatgagacatgcttgcaattagggatgcacatttctcatatggggatggggtcccgcggggacccgcccctaatggggcgagaattccctgtctaaatgggaaatagtatgcgaacgaggattactttttgtccccaaatattaaacggggcgggaacggggatcatactattcgtccgacagggacccgttta

SEQ ID NO: 196724 - DNA, 2504 bp, Cannabis indica
tgttctaaagatttcaagatcttagtagatcttgacatattgagggtcgaatacgacatggtggcctgtcatcgtaagttgcaccactaatagtaagtttttcttcatctcaggtacatggtagtcatcgtggaattaaacttcttttgggataaatctcaatgtaattattattttactgatgtgtgcgatcgttaatcttgagttattggttgtcactactacgtgactaccactgtattctatgatgtcttaccgttgttcttcgtctcctatcatatgatttcagcaactagagtcgactatctaatcgttattgtaatcgatcattccaagaacaatagttgctaaagctaattcttcttcctccatagcaaatgatgattatgtgtcccattcttcatcgcttgtcttttctacatttgacgtggctgcatttccttctgcagttttcttcttaaacaaacaactttcagcatgtggccatacttttcaccattgtagtattttccatcgaatttatcgttattctttgactgcccgtctcgtttgtctttcttctgagctccccctatttgggaatttccatgatgattatctttgtcatcatattttctagaatttttactaggatttggtcggcctcgactttcttatcattactaaagagtatttcttcgtcactctttaatgggactccagatgtttgcttagttaacgcttcttggtcagctaacaaattttctaatttaacaagagaaggttggcttggccaacctaatattgtagcaataaaagttttaatttttagccttaatccatgaattatttattcttctaattctagcatctgacatgtcagcatcagagtctaatgcagagatttcgcaaaaaaagagattttaccttggtaaagtattggttgatcgtcatgtcgcactgcctgattgagagaagctcgttctccaaaagctacaatcttgtatcattcttcttggtgaacagtgatgcgaatgtatctcatgcttccttcagtgtctttgctggcctaatgtgctctagcatttcatcttcaactgtggtccgaatcgcaaagctttaatcttccatttctttaacgtggttgcatccttcggttgtgtgactttgttgccaccaacgatctctcacaagtcttggccttggagatatgcatccatgttcatcgaccacgtgttagaactttgattgttaagtctcttaattctgccgaccacttgaaggtcacccatcatgcaagttctgtagtactaaaccacacacgatcactctaaaaaactcaacaaaatactctttcagaatgaacttgatccaactttgataccatttattgaacacgacaactcatgaaaaacgtaattactttattattgaaaagtaattacaccaagacttaaacactttatcttgacaacaacacaccaagcactcacaattttattttctactaaacacctttaaaatacacttatatgacacactttgcaacactttgtttacacactaactcttttggacacactttgaaacacttcttgttggatgcacaacttgaggatccaaggtccctatttatactactcaaaagccaactataatgtcgtagaaacttctacctaattgtgttaataaaataatcttgaagtttctacaagacttaaacattttttattacttttattataatgggctgcctctctagaaaattctagagagttgatgatgatcttcaaggtagtttgttttcggtttcggttacatcttgtagttgacatataagcttgtagtctctaaatttttcaatcaacgaaagcaatcccactttctatctcaaagacttaacctcacatggtatgagagctccaatcgttcttttatggagattcgtacaacagcaactggtggagcatcaagattgaataattctcaaccacagaacaatcaacaagtcctactaccaaaatcgtatccagtctctttcaatcattctttgtcaatcaagcttgatgaacataattttctcccatggcaacatcaagtacttgcctcgatcaaaggcaattatcttcacaagtatcttgattccactcaaataccagcaaagttcttgactcccacaaatgaacaattgggcaatgtcaattcaaagtttgaagattgggaacaacaaaataaccttcttgtttcttgacttctatcttcaatgttcgagaaaaccaccaattgaatgataccacgactcaaatacagatctttctcaatgaatactatacaacctttaatgcaactaacattagactctacaaaaacttaagcttcgaagcaccaagatgacatggtctctgaatgactaccttccaaaaattaaagactcttgttgatcttcttgcaatgattgatcaagctcaaactcctcagatcacatcgaagccatattcaatggattgccacctgagtatgatgtg

SEQ ID NO: 196725 - DNA, 1351 bp, Cannabis indica
tatacaaataaataaataaacaagagaaaaagcacaccttttcccacttacgaacacttttcctctcgtatttaaaaaactcgaaacagagagtgagagaaccacataagaagaagaagaaggtttgagctaaacgaaaccttttttaactcaactgggaactcgtgggaggagtcacgagactcgcgtctaaggactcacaagaaagcaaaagcaaaaagacagagagagattgaataatcagaagaaggaatgatggagagtccaagatcgatgaagaaaagcggagcaggagaggttctagatggttcgaatataatggagttggttgggaacgaagaggtgttcagtcatttcgtggaccataagttccatgagttggacaaagacagagatggtaagctctctgtgaacgagctccaccctgctgttgctgatatcggcgctgctcttggcttgcctgcccagggttcctctcctgattctgatcatatttactctgaggtttctctttctttcttccctttttactttcattttttaacaatttcaattaatgggtacattagatttttcattttctctattgggtttcccagttcctctactttcttatcgttttctcaattgaccttctttccttgtcttctctttctcaaaaacattaaataataaataacacaatttcaagtaatgagcacattacaatagatttctcattttgtttattctctcttgtctcaattttttttaagaattttgatcatcattttttttaccatctgggttgtttgtttgattttcttattatttttttccaacaaaatttcaagtaatgggtacattatctgtactttgtgctattcttcttgtataatgtatatgcaattgtacccaaattatagaatttaagaaagtttgtcttgttttgtgagaagataagatgttacgtattagttggaatttgtagctgtaattacgtttgcttggaatagtgattttgggtcggtccattctcttatttatttatcttattattatacaataaaaagcaactattgtagtcaaattctttacatatttatgctctgatttttttttttttattacttgattaaaagtaggtaaacgtttattttatggtgaattgtctatgtataaatattagaatatttttttttattattattttaaagaaatgaagatggttatgcttactttcatggaatcatgggtccataagagaagtaaaattcaagatttccttatctagcaagctcgagaaacatatccaacctatgattttacttggtcggtcttgtcgtatttgggtcatttgctttatctgctg

SEQ ID NO: 196726 - DNA, 1742 bp, Cannabis indica
actcactccctaatttacccctgatgcaacctacatataaccgaattaactaactgttatgacagatggtgctcgagccacaaaccagtctatataaggctcaatcatttggctaggaatgaactcatcaagggaaaatagattaagtgagagaatttaagaaagttgtttaaggaaagaaagaataagagaagagtgctcttgagtgtttgtaatggtgtgatgcattgtcaatcatcatcaccaagtgagttgttctgttgcagaaaataagcttcttgagtggtgtaactgaatctgttgtaatctattgaacatcagcgaataaaaaactctataaaaggcactgttgtgtggttgttttctggtcggggatgtaggcaaggtgattcaccattactttgttcgaatctagtaaagttcatgtgttttttgtgtgtatgtttgacattgttttactttggtttatgcttgctgtcattctctacactatcctaattagtttccatttatcattcttgtatttgtttacgtgtgttcttgctgaggtattgtttcacaacaatatatatagacactaatagttagttccttatttgcggatatttcctcctttgtaataaagtagtcatataagagattagttcagtcaatattcttactatgaaattccaacaaacaaattttgcatttatctgtatatagtacgtacgcaactaatcaaccaaaacaagaattcttgaagttgccattatcatatatcatgaaatcttaattaacagttaattctttaattagggtttaaaataatgatagggttagctaattgtgtgtcatactctggtctagccttctatatttatgcactttgtattcgattaattggttcgattaattggttccgccacaaaaataaataaataaataaataaaatagtagcaggaagaaaatatacatcaatagatgtgacaattttgttgttgcatgctatcctatattttaagaaatataatataaatatgtatttatataatatttatatatataacaaatatattgcttgtgtggccatgagattttggtgttgaattaaaagtatcaaaacaacgtccagaagtactaaatattacgtactaaatgagttgtgatatgtaatgatgatgattatgatgatcagcttaattaatagggttagtaaagagtactccaagcaatgactaattgactttttaactacatatatattgcaatattattagcgcaatctattatagaagagcaattaattgttgacacttgacatatatattcataattttgtcttttcgctagttgattaaacttgctcccaactactactaataagtttttaaaaaaaagggtcattgtataataaaattaatttaattaattttttgataatatttctgggaaaatattcttttactttgtaaacactctaaaattcaacttgaccaacacctaatgcagaggcagcaataggtgaccattctatctcaatagtaccaaaatatcaccactccactccttaattcccaagttataattaaaatgcataatgcatgtaataatgaaactattaaacccctcttaagaaaaatatttatcacctaatgctccctatatttaaggcattgtgtcttgactacttatcccattacactaaggagagaaagagagaaagagagagagagagatgggtacttcttcttataatgtt

SEQ ID NO: 196727 - DNA, 1117 bp, Cannabis indica
gataagactgctggtgtgaagaataagattactatcaccaatgacaaaggaaggttgagcaaggaagagattgagagattggtacaagaggcagagaagtacaagtttgaagatgagcaagtgaagaagagggttgatgctaagaattcattggagaattatgcatacagcatgaggaatactattaaggatgaaaagattgctgggcaattacaccctgatgacaagcacaagatcgaaaaggcgatgaatcaggccattgaatggcttgatgggaatcaattggctgaagttgatgagcttcaagacaagttgaaggagttggagggtgtctgtaatcctatcattgctaagttgtactaagattgtattgtttatttcttctcttattcttcttttcaagtttgtgatgtccctgttcccacgatactatgaaaattttattgttatttgaatagaaacttcaattatcttatgacactaatgaaatgattacttagcttatcaacaaaaatctctaattacaatcaatgaatgatatttgataacaagagaaacagggcacaaaaaaaaatggtgtaaaatatttgaatattgaaatccatgtgtgaaaaatttctgaattttatctactcaatggtataattctgtcgagaaaaataaaataaagcaatgttataatactattatattacacgttcttatattttattttacattaaagattaattactattattaatcatatcttagaggcaataaccaaatagctttgtctctttccttgaggttggaccaaagtctttttatgtctataattcacactatgataattctccatctgaaccaataacaaaacactttaaagattatgactcaaaactatatgcctttaatacccatatcgtggctaattgattttccttgcatcattcttgtacaactttattcttcttgtttctttcctattactattttgggaacacaactagagaatagtgattgcaagtaggaatttgcctaaatggtttttacagcagagaaagaaataatacaatgggaagaaaataaactgatatttttgataccccagggaaatccagagccctgttctctc

SEQ ID NO: 196728 - DNA, 937 bp, Cannabis indica
cagcacgccgccgttcctgtctatgggtatgtacttttttgccatttcatttgtttgggttatcaacttaacactaattaggatttttaatcccgaactttgactgttaaaaatgtccgtaaattattaagattgttagatttaaatatttttgtccaattttaattaaaacgtctaacatatagatgaaagtgcatgtaaaaattcaagagatatgattgggtaaattttaaagtctaaggtgcataatttagtacataaacaatcactaaattataattgaatgaaattagataaaagtgcttatatctaataatattaataaattttcaacgatcagacaaattttgttagcaaaaatcacaattagactttaattaactatattctgtgtttattccagatatcctccgacctacatagctgctgatatgagttacaatccagtaagtagctgagttaatcaatacgtgtcatttctctattgggatgtaccattaattatggtgcacacgcatgtataaagctttcgctttggtccccacaatacgacaactataaagctttcgctttttattaattttattacttttccaggccagctagtgtttcacatgccaagatttttattttctgataaatatttgtttgttatagttaataattttttaatgaagtggatcgtatgtgatgatggtatacagaagctaagctacaacggtggggcctacatgggaggagggcactactctcaagtataccctggtgtgatgagcgccaacacattgatgccgatgtacccgatgtatcactaccatcaagcacatacaatgggcccttcggcccacatgttcgccacaacgacagggcccattagcgcagtcccggccatcatttctaagcccccatcaattactgcccctaactcaggtagttc

SEQ ID NO: 196729 - DNA, 1274 bp, Cannabis indica
gtgcactattttggacttgttactatcatgtgtgtctctatataaggattatactagaatctaacttttatatattcactacaactcacgatagatgatgttgatgaattataattatttagaactactgttatatatatattattaatttggtttaagattaactaattaattaacaatgttctataattatcatgtgcaccaatagtaatgtatgtgtaccaacgtattaattattatcatggtattggcaagtaatcagacaattacaagtgaataataacaaaaaagcatatatatgtattatgtatatatatttacaatatttgtactgctccgacaattagttaacaaaatacatatatgtaatgtaatgattttactaattaaactatattatatttataaattttcaaaacttataatttattttaatttatatatagaaacacggttttcgatgtaaatatatataaatcaataatattattggttgatctggtagctcagcatatatatattgtactttcatgtatcaggattgtatagtataaaaagcaacaagtacaatgatgtagctgagcatttgtacagtaaataattataagcattatgcttatgagtatttatatgcgtttgtacgtaggtatatagtttcagggagcaaaatataataaatggaaaagaataatagagagatatttgtgttgtagagctcaaggaagatctgaattctagttctaaaattcggtagtacccagctctctttagtgcttccttttatttatatatagcttttacaaagagaaggtttcttgtagtcaaaaaataaataaatgtgatgctactaaataaaaatatatgtcataataaatatcactccttacaaacataaataaagtctattatgcaatcacataacaaaagtgtggagttttcgaaaatgaccaaaataatctaaccgagaaagcctgcatcatcaattaattgcacaccgattagctaggtaccttatttgcttcaaaaatttgtgttcctatttttcgattttatcatttttattctaaatggtattcatccaaaaactagtaagatggaaataattatttttccccttacgtaagtaataatgagaaaaaaatcaaaccgaacagacaaacaaacaacaccgcgaagccaactgaatacatatagtttttttttaaaaaaaaaactaaatattagataaatattctatttagttgatcattcgtgttagctgttctttgatataa

SEQ ID NO: 196730 - DNA, 1845 bp, Cannabis indica
aactcatcaatacatacaacaacactatctgccaaaaccatgtctccttcaaatttgaatctcactaccccatatcgcctttagattagctttttccaacataaatagagttaatcaaaactttagaggtaataaaaataacttagtaaacaattcacttgtgaatggtcaatcatccccagctctagcaaaactttttttttgtatcatgaattataatttataataacaaaagagagaaattaccttctaaatcagcgagtcaaatataattcttttgctaaattttaagatgctaagaaaagtgcctctaattgtcatgcaaagcaaagagagaatgttcaatttaagtaacggcatgagatttatgattcataccctaaacataatagcatcaaaaaccaagttttttcatactgactgctggctggctggtctcaagattctcctgaattcaaaaaattcctttcaatgagtggaaaattcttttgaccttttaaagaaaccttacaaacaataatagttacagagagaataacataaaaactaagggagatatttgtttcatcattctgttcattacaacaaacactttgccccataaacctagtggtactatatatctcctctaatggcacaattaaattattcatttaatgttcaatattggcaaatgctgaattttggagtaatcaggaccttcacttggcttcattcgatccataaaatccattgacatgctccggctaataaattcttttagctttggtagatattgaataccagagggaagcccctccattaatgggcaagaatttatgtacaatgttgtaagaagaggcaatgctcctctatctatcttcatcaacttcaaatttggcaaacatattaagtgcaactcgttgagctttggaaaacatccttcttcaaagtgtagttggtctccttcatatgaattgtcacgcaatcgaagacttattagattgggcaaatctttcaaatatttaagtggatttactgtcaattttgagccatataaaatgaatgcctctaaattagtgagatgtgaaacccaatgaggaaacttgtttaatagaccagacaactgaagcacctccaacaaaggaggaggagatgatgaaattggttccaaatctaggaactcctcagcatcgttagtatccaaattcaaatatttaaggtgactcaacttcttggctacaacaccacaaacagctctagaagattctttagtcacattcgtcacacccaaactcttaaacttgctcaaattctccaattcctttgtgaaaccaaccacgtcttgatgcaattcaacaacttttagctcttctaaattctccaaattaccaaatccttcttgtatcttcaccccaaacaaatcacctgacctcccaggtaagtcctttatacgcgaagcaaaaagacttttaagattgcaaagcttatttatctcctttggtagctcatgtaagagggtattgtggagattcaaagtaagtagattgtgaagcttgcctaaggattttggaagcttatcaacctgggtatccttgagattcaagtgttgtagattatgtagcttaccaatggactcaggaagagctttaatttttgaaaagctcaaatctaacaacctcaggtgtaacaatttacccacttccttgggaacataatcaagagtttcatcgtttatggccaacactttcaaaagctttaaacttttaaacaaagcaaccaaaaaatctttaccactccattggtcatcgtcattaaagttctgaagaaagattgagcgaatggttgtgcattgttgaattgttt

SEQ ID NO: 196731 - DNA, 1427 bp, Cannabis indica
tttttttttatatagaaataattggtccaatgacatgcccttaaatttgttttagatgaattatgaacacgtatctgcagtggattaaaatatcccgagttaatttcatctggtttgtgaaagaaaagggaaccttttggagattttttaagaattaacattccaattcagatgtccatatatatgttgtcaaggatacttaactaggatcagcagactaaaattcattcaatttcaaatgtttcagggtttcacaggtgacaagagaagggaaatatatgcaatccaatgttccgcggcagctagtttatggtactatggtatttgtgcggaaagctattgtacttgatgcttcatgtgctctgtcacgggcagtttgtatagctacaagatacagtgctgttcgtagacaatttggctcacaaaaggatggtgttgagacccaggtatgtttttaaatgttttattttgtttgagactgttatgccatttctactctaataaagagagagagagacgtcacataaactgttgtatgttgagttattattttgggtaaaaagttgtcagtagatgttcggggagattgattattattttaatattataattgctcaattttagtctagtcagctcaaactcaccaaagagaagcaaattttgccaaattttaggattgccttgaagagttttcaagtagatatgattttgtagaatttgaaacataggtcataaaaatgtatgaatggtttgagtggatcgtataaaatgtttgtaggatagtgcataaataattccactcaaattattaaggctccaattgtaaagacttttctcttcctcttggcaattctaagcatactttccttgtaattgctatcctttgaagattgatattactcctaggataatcttgctcaaggtgcgatgacatatttgtatcaactaggactgtaacatcaaatcagattattttggatcagatatagaaactgacataggacttctgtaatggagatgttacatatggtgtaatcattccaaaaataggactgtagcttttgtatattgtatgtatgtggttcattgtgtggccatataggtcagatagcttgagcgcgagcaagaagagagataaggaagtggtatatttctctgtaaactttgtctggggagctatatgggtttcccagcaaacaaggattgagagagcaagagttggcttgggtttttggggaagtgaaaactattacaaaaaaaatgttagtgaaagctttcttgtgctctaccattggcataatattggttttgcacaatgttaaattattgtattctttatgttcttctaaagtcttgttcttgtgtgttttcaacaatatgtttaaggacgttattaactaccaatcttttggttctctctctctctc

SEQ ID NO: 196732 - DNA, 1724 bp, Cannabis indica
cttcagcagttgaaacatctccaaatatctgtgtggctagtgggtcaaatgtagttaaatgtttgtttaaccagccttcattctccattccgacgaatacttctgttcccaagacgcctccacgagcaaattcctctcaaagtgagaaatcaacatctccgcttgatgtttctaaatgtagcaatgctagcacccctgcagatttgaccccaacaagatgcactgtaatatcatcatccaaaagagtaacactgagtccatgtaaacaaatggctttctacatggaagaaaaaccagtgcatttctacttcctcgcccgccaagacaaactcaaagaggcaaaccacaagcaataatccaagaagactcgattttagtgattctgatccattggtgaattcgggatcagatgaaccaattgttgagcaggcttccacatctgagtctaaaaaaggaaattgacctttttgacattgatctgcctaattttgatgtcatgggagatgatttctcatttactgaaatgttgggtgcttttgattttgattgtggagaaatggattactcttgccaaccaccgataggagcttctatggataccatttcagggtattgccctgcttcaatttgctactttatcataataatcttttatctttccattttatctataagttttaattctaatcatgcctgatttcttctttccatccatatcattgcacagctcatcacctgaatcaatgtgtggctatatggggtccaaccaagttatatcggaattctcttctgtgacagaagtattatcacaacaagatatgagtatgcaaggtgaacaaactggccttcttaaagttgtatagttttcatttcatttcattcattcattcatcagaaactaagtcaacaagtttcaatgttgcagggccggattctacgacagctctaaaatctgtgacaagatgcatcaaaattataagtcctggtatataatcattcaaactgtcttaatacatgcttcaatttgctattgttagatctaagctgatttattgaaataattattgaatttgcagtaaaatctcgtgggagttctatggatcagaattgtacgtcaacaaactgaatgggagattaggcatcactttttatgataatgatataaccccacttaacatagttgtataaaactaagctgttagtctgttaacatattcttaggatgcaaggacataacctatgataatgatttgtaacccttctattgacttaatataatgaaaaatacaaaaaaaaaaaagcagaggttttctataatctatatcatcagagttgccagaccttgatacgtatgcagaaaggtaacacaaaggagatacagacttactattctcttccgctacttctctgcctagtataattttaaattagcaattaactttaaattttgtatgattcatgtttgaaattccttattgtctatatagaatggaaagtatatgatgaattaataagttagttacctaattagatttttaacatggtaagaagaaatgtatattctatggtgctcagactgtctatttattcaaaatcaacatatggtgctgctggtgaatgacgaaggcttgtaattttgatgcatcaccagcaaattccatagccatcaatgatttgggagcataaatttgaaacactgataaattattcatttaacaatgaac

SEQ ID NO: 196733 - DNA, 586 bp, Cannabis indica
tttgaaaaaaaatataaaaaatgggctttatcaattctaaaattaccaaactatagaacctataccattaattatataatcattttacatgaaaatataaaagaacaaaaatgcatattccaaaatttattgtccacttaaaagttacatccaaaaacctattagagatacctaaataaacatcaatatatggtccataaaccattaattgatccatacatggcattacacatagaatatgcacaaacacaagttttagtcatttcacaagaaaataaagaacaagcaaaatataaattccaaattttacaagtttcatcaaccacttcaacaaatcaataggtaggaattgtttaatcagctttgagagcatatgcatgaattcctgctgacacattgaataatctcctaaaaccctgagtattgagcaatagattagaggacaaaatcttcaattaagtctaattaaatataagtttagtttaggatcccaattaagaaatttaggcttgtaaataacaactgaactattaagatagcactcaaaatttataaggattctactacctgtgtctgcagccacttg

SEQ ID NO: 196734 - DNA, 1463 bp, Cannabis indica
aaaaaaaagaaaacagtaccgaactgaatcaattatcaagtaacagtttccagagattagaacccctttttagtatgcatagcagaccaaagctgaggggaccaaagagcagcccttgataggttatttccaaatattttccaaggcaaataattataaaatatgcatatcatgggatcaaatgaatacatcaaagaaatacaaaatgttgaatgaagcgaagagcatattaatacattaaaaatagttcggaagttgtagcactagggacaatgaatatattaaaaagacaaataaatagttcagaagtcattaatacctgatccatgggtacaggttcatctttatcatgctccttcacatctcttgatttaacatcagcatcattttcactattcgggactgtactttcatttgtttcttgaatgctgttggatggagtgttgccaaccaaagtgttgaaatccgcgggaagctgaccagacttcaaggcctactcaagtatattattcaagatcacagtagcaatgcaaagtggacatacaaaaaaaaaggaaaaatttatgagaaaacagcttccaactaaaacgaaaaaatgggaaaaagataagcaccttctcaagtcttgcaacttcttcaagtgtctgggaattcacaattgcagcctgcgaaagaataaaagtgacaattatggtaagatcattttaatttcgtacaagcatatatatacatataatacacgcacacatgtacatatgttcattcctcaagaacagaagtaagcggaaagatagaacatcaacagttagaacctgaaaccacaaaaaactatgtatttgactatttgagctcccgaggatcattcgtttctacttgtgagtggagcagggctttaacctaaagatcaaaacttattttaagaggacccagataatcacagagactaactcaaaagaaaaattaatgctgaaattggatttacagtattgatagtcaaggaaatacaccaaatacagataataggcttataagactcttcactagcgtttaaaattttatgtcattgacagtggacacattacatctcccactggagatggtctaaagagtgctccctcctcttcactagcatttaaaaatgtgaaactgaggcaggctggaatgacctcaaagtatagccacctaagaggtaaggcactggttctaatggcacctcacaatcatataattgaaaaaggtgtccctcaattcattaacgtttggtttaaattctgagcttgaattttgggcgactctttcggagatggctttttttttaggctacttaagtaattagaaaacctcagcccagatttcattaacttgaccactactctctttagtctttacgctgctgcctgctgcaaacatcaaagagagctaccacaattcccacatgatgcctcataggaacttagatctaa

SEQ ID NO: 196735 - DNA, 2199 bp, Cannabis indica
ttatacatatgatcatcattttctccttggaatctggtctttattttctccacaaaagtttttattttgttccactttgtatatacatactgtttttttagagatacagtcttttttctgcttagaataatatatatagtttataaaacataacttgacattgtgggaatgaatgaggggacatatgcttggaatttctctttttgctgttgttgttttatattacttttatcccactatctgtccctatagctgtatttttctctcatttttactcctctacctcttaactaatatttattttgttcataataataaatccatggcgaatgtttagtatatgtaattgtaattgtaatgtatcaataaaacatctgagattaatttgtttatggattttttttctttgtgataattcagaatataatttttatttatttattttctgtttctagttactttatccttagaaagcatgccttctccccatgtttaaatggtctaaaaattatatttttttggaaaagtttaattaggctcattattggctactagctcatgttataaggtctatatatgttgtcattcacaatattgaccaattaattgtatggctgaaaggttcatgcctcaaagttcttgcttggctgcctatcattctttttgtaatgtgttccattcagtaacacaatcttatatattcttacaaaaaaaaatagtggggtccattgctgactaaattagttgcaaaatgattttctggatgaaatttttaagagttactaatttgttacttatttgtgatcttttttctttgattcataattaaacaggtgatactctaaagtatttgacacttgcaatacatcatggtggaatgttcttcacaccttttggtaacagaaagtatgagggtgggaaggttagtttctttgactgggttgataagagtgagatgagcagaatattgatagaaggatttgcaattggtttgggatacaagcttccttttggcatgttatataagccaaaagataaagctttgaagcatggaaggatgattcgaaatgacaaagaagttaatgaaattttggaacaaatggagatgaggaagtggacagtgatgtctgtgtatcttgtgatgccagaaatgacacatgagctagaatggaaagttgatccaactgctgttcctcatgtaccaaccgccccaaagctcaagcactgtgtgattgaggaactcccaccaaattgtgatgttgtgcctgatgtggtagggatcccagtagacatgaacaagggaaaacatgttaataaaacatgtaaggaacctgaggttgttattctcagtgatgatgattcatctgagaatgattttgaagatgatgaggatgattttgaagatcatcagggtggttctatagaggagggcgaagggtatgaagatgaagatgggtattgcactgatgactatattactttttgggagaatgaagggtgggatgatccagaggttcaagatgcaggggatgatgcacccccaattgaaatacaaagtcaaccatatcacccaaatgaaatacaaagtcaaacacatgtcacaaaacctatagaccagcccactacagaccagcccactacagaccaacccactacaaaccagcccactacagaccaatccactacaaacctgcccactgtagaccaatccactactgaccagcccactacaaatgaaggggaatttgaatttaatgaggaagagtatgaacaagatttggaaactgagagaaatgttgccaaacctagtgacccaagtagatggtgggctagtgtgaccaatttttgcagccaaggtggtgagacaaatgaacgtgatgatggttgtattgagtcagaggatgatttggcgagtttagcaagtgatgatgaagaagggggtgttaagaaaaattcaaccaaagagtataatccattgtgtgataaggagacttttaactttgacaagggcatgttatttgctaatgtggttgtttttagaaaagcccttaaggattactttcttgcacaaaacaaggatttcaaatacatcagcaatgaccaaaggaggatgagagctatttgtaaaggaacatcatgtaagtggttaatatatgcatctagggttagtacagatgggacaacatttagggtcaacaa

SEQ ID NO: 196736 - DNA, 800 bp, Cannabis indica
acaaaaagttccaatggtcaaggaatcatttggatgacttaggatcgtatggctgcaccaaaagactctgggggtatgggttttcgccatctccatgatttcaacattgctatgttggccaagcaaggttggaggctgttatgttcaccatcttctcttgttagtcaagtctataaagcaaaatactacgctcgcactgatttccttaatgttgaattgggtaataatcctagtttcgtctggcgtagtatttggagtgcacaacatttggttcgtcttggggctagaataactatcggcactgggctttcaacacgcatactcaaacaaccttggcttcctgattctatcaacccctatgtatctactacaggaccgggtcttgatgagtacatggttagttctctccttgatgtatctactcgaagctgggatgtctctcttgtcaaggacatgtttaacactcgggatgcggatttaatacttagaatccctcttagttctgttgatgtcgaagattgttggtcgtggactggtgatagaacaggctactacgcagttaaatctgcctattccatgctgcaacttcaaaaaaattctcggcctggtgtgaacaattcaggattctggcacaaactttggcatctaaagataccacctaaagtgaagaacttcatgtggagggcagtgtctgatgctcttccaacttgtctccaactggttactaagtgtgtaagtatttcaccaacctgtcctgtttgccttcaacatgttgagacaacttctcatattcttcttag

SEQ ID NO: 196737 - DNA, 1175 bp, Cannabis indica
aaaaatccattttaattaaggaaatgtacaatagaatttttcaaaaatattcacatagttttaaactatagttatgtgagactctcacatataatattgttactttagtattagtactctcatcacatctcaagtacaaaccttcgacaactcaaagtcaaagatagagtctttttcaaaataaataggatggtactctcaacaagttatgggcattgatatattattagaaactgtcatgtcatgatgaagctagctagatgacatccttatcaaattctttccaagagacatggagcttagatattggtctacctttctattgtgtagacaagagcatagcataacattttaagacatttagatatataaaaaaacacattttaagacattatttatgtgtgtttgaaagtaattatgtaattagtagtgtgggattaaaacaactaatagaacttgtttttgccttaatccaaggtcagtaggtttgcataggatcaccctctggaggatacgtcatatccatggccctcatgcacactttgaaatcgtgtccacggtatccacaattataatagattttaggtaatttgtagaaacagaattgaatccattcacgtctacccctggtgatgttcaagaaaaactagatggaattttatgatatgtatccaactcgacctgaaacttcaagaagcctgtcctggagatgttctctgatcaaccatgtcgaagcttttataaaccccggctttggctgcgatcataggggtgttgactatcttcaaaaatggtgttggcaaaccataacctgaaaccaaaaaactgcttttctcatgttcactatatttcaagccccatcctcaggccattcgtgaatgattaacattttgccattgattatccacggacagttctctacaatctccacacaatccttttccttgtcaaagaaaatgccccagaggccagggctcatcgtctttaatcgccatcctcctctcaacttccatatcttccccagaatgtctttgagttgatttcgagatacccctttaccataaaaaatggctaaaactgctatttttataatctctgcatttatttcgaaatcaggttccaaatcaatggtcatatagactccaaaaaattttggcgcaggttctccaaatccc

SEQ ID NO: 196738 - DNA, 1354 bp, Cannabis indica
atgttttttgaaatattctccatcagggtcttcgacccaacaagctagcatcattaatggctaccataaaataatattttattaatgagttatgctgttatataatttttattttgtctattattagaagtatataatttatacaatttaattaccttctcaacacatccaattgtaatatatcgactattttcatcctcgtaatgaatgtgctccatcgctctctgaactgctttttctcttattttgttgaatggccatgtattaataataggctcggcaagatagtacacacaatcccataagagacgttgtactttgccgtgaggatagtagttgtcctcctgtattcaaccataaatgaaaattaaattgatgtttattttattcctaaactggaaaaattttgattggttatttgtagaaagataacaatataattagaacaccaataattaatgatatatatataaatatatataaaaataatcaaagtgcactaataaaaaaaaatattcttaccttagcacatacgtgacgcattttgctccatttgatatctttgtatggaatgatgtgaatttcttcccttagttgcttaatgagaggtgtaatttcactgacaaactttcttccatagaagtacgacataggcatgaaggttaaccgacaataacaaaacattttcgctgttcatgcaaaagtgtagtgttaagaactatgagagaaacagagcaaaaatatattgaaggaactgtgtctcgatttcttattcaattgattgagctgattgtgccaaattagcctttctagtgttgtttaggtagtcagccccctgttatggctgctatgtttcttttgctttgtatccttgttgttctttgttttgttcaatgaaagttcttccaaatcaaaaaaaaaaaaagattgagctgattgtgcaagggccttatatataggatgtgaaacaaagttggtataggaagagacaactaaccaacttaactaacacacttaactgaaacagtgaagcctaacaactaattaactgatcactgagtataactaatctaactaaatctaatagccccctcaagatggagtataaatattgatgacacccatcttagatacaatgtggtgaaatgagtagggagaagagccttggagaaaatgtcaactagatttatgtgaggaacatgcatcagttggagagagtctgttggaccttttctcgtatgaagtgacaatcgatttccacatgtttggtgcgtttataataaacgggattttcacttatgtgaaatagcggcagtgtgtcacagtactcttcgcaggtgtgtgggggatggag

SEQ ID NO: 196739 - DNA, 888 bp, Cannabis indica
ctagcctagcctacctttataagactttacttcatataaataaaaataaaaaataaaatgtccacaaaagtctactcttcactattgtttgccctttgatagtttaatttgttctaattctcatttatatatatataatatttatatacttattagccaacatctcaaatcttcagtacaagcaaaatcgatagctttgctttgatttttgtttccttaaaacgacccaaaaaagataccaaaacgccagtaatcacgcatcaaataactctcaagaaaccatatatacataattaattgattattcacaattgaagattattcccaattattgttattaattttgacatattatttttaattattattaacattattaccatcaacactatctattgtctttattttttgtggctgcaaaaacctttatttccttgaggtgagccgccttatatatctatctatatatatatccaaaacattataaattataataacatggatgaaacttgaaaggcttggttattgttgcgttgaatttttaatatgtgttacttaagggtatattgataggtatattcttaacaaaaaaagcagagatatacattacttataatcttatataataatatgaaagtaattatgatgacgttttatgacacatctatattagtgccacttgtttaaattcaagtttttcgcaatattatctcttgttaattcataagtgttagtttgagtgtgctataataatttgattatatgctaaaccgtttcaaagaaaatttagtgtatgggaatataataatactatgtagtatttctctatattatatatatatgaagacccctccattcctatccttttttgactaaagtagcaaattt

SEQ ID NO: 196740 - DNA, 580 bp, Cannabis indica
acacacttttcatatcaataacacagattctatccttttatctccaagaagtgttgtgcttgagttgaaagagaaattaaataatcgattgagagactttaatttgcataacatattttattattttgttttattattttaaggtattatttatttttttttttttctattctttctaacgaaactctatctaagtgaactaggaagggcaaccacggaaaaaaattacaactcccaacaacaacaaattgcaatggcctgtctaatttaatttacttaaaaattaatgatgaacctatatataaatatatttatatatatatataaattcttaccgacaaaaaaatgttaggtgaatataattaatgttttgtggaaatattggaaaaatgtgtgtgagatgattctgatgaagtctctataaatagcatgcgaatgtaagcgaacaacacacacccaaaaaaaagaaagaagaagaagaagaagcataactatatatcatttcattacaagcttttgcaggtgagtctaatatatataaaattaattgttttgtttaattatggctgagattaatata

SEQ ID NO: 196741 - DNA, 530 bp, Cannabis indica
atatatatatatataaccttaaatagaactaagtatacatctagtgtatatattctgatggcatcattgtcttaatactatacatacgtccaaattttgatgaagcaatacttgttatttttttttctgaatagacaataattttattttaattataaggctgtggtaaaatgtgatttttgtaatattaaaaaaaatagcatagaattgccatgcatgcaatgtgtacgtacgtaaatttgagctgtactttaattaattgagcacaatatcaattctttagaaattgcattaattccaaaaaaaatcacaaagttattcatattagactaacaaaactgcattaacaattcttgatagagacttgaaagtgtactataagagtcttgattttcattttcatattacaaatattaattaactaaataatgtgtaggtagtagaataagatcagtacatagatatatatagatgaaattataaatttcaaaagaaaataaagaaatgtcactacaacaaaacatagtatt

SEQ ID NO: 196742 - DNA, 982 bp, Cannabis indica
tccattccattcgccgaccaaagtctctcactttctcacttttctccacttcccacaccactggaactcctcctcctcctccctcttctcactctccattgctcaaatcttcaaaaaccccatgatgggtagcaccaccacaaccacaaccagagacagttccgacccttcttcagctctcacctacacaaaccctcaatcccaatcactctcatcatcatcatccccaatcacagtctcctcagacagcttcctaaacgacccaacaacctcttcttcccatataggaagcgcttccggaagtttccagaacgatgggttgttaaccgctgatactagcggaagtaatagtgatgctgagtttggattctctagacctgattttcgatcgacccaactcgttggaactgttgatttgtatcaaagacatgtttttttatgttataagaatcctcaggtttggcctcctagaattgaggctgctgagtttgatcggttgcctaggttgctttctgctgctgttttggctaggaaatctgatatgaagaaagaggtttgttgattttggtttttgggtttttgaaatttgtggatttgattgattttacaagttcttgtgattgatttgggaatttgaatgattgttaaagatttgaactttccttaaatggagttatttttggtgttctatggttttggtaaattttgggaacttaaaagttaggatctttgagctctctttctttggttgtaaagttaggattttttgtagagaagtttagggatggaataaacccttgatttggttttcattgtgatttgggaatttgaatgattattaaaagatttgaactttcctcaaatggagctatttttggtgtcctatggttttggtaaattttgggaacttaggtttgcttgaaaccaaaaagttaggatctttgagctctctctctatctctttggttgtaaagttaggatt

SEQ ID NO: 196743 - DNA, 855 bp, Cannabis indica
cgcctaagaccttgtacaagtttgagatggccttgttgggcaccaatcgtgcccagcaccttttataggtagtgttctaagattggttatcgatatttcttaaaaagtattttcttatgttatatgagacacaatacttaattacataaatatcaatatgacactaagaatgttactaagcatatctctatgtctctctctctatctactactgttgagtgtttaaaagcttcatgctcatatctcacaaaagcttacacacactctcattatataatattattatagtagttttgtatctcataaatattatattctctctttatttcttcactctagtctttatttatatgaaaaattttatagtgtgaaatttttgtctaaaaatacgagtacaatctcgtaaaaagttgacgcgttccgaatggaaaagaatgatgtgtcaataatatggatcttgtaaaagctgacctcacatgatttaaacttgcaaaaagatgcgattgggacatggtctagtcggatattatttcaagcaatattagcgatgaaaaattaatagtggtcatgcatatatcgattatatatgatgagcaagtatgtcatctctcctgcgatgagcaaagccacttctttacataggtttggtctaaatgactaagtacatgttgagactcacatgttctaagttatcaacccagagaatgtccaaatatgcaaatttggaatgatcacaaatatttattaaatctaaggcccaaaggcccgttatgcagtataacaaccacaaagcctgtgagctcacgtgttaggaatagtgtaataggtgatctacaaatcaataagtcgcagacg

SEQ ID NO: 196744 - DNA, 1165 bp, Cannabis indica
taagccttgctaagagcaggacgctcataaggtgcaacctgaaaaggtgaaaaggagttaaatttcacaatgataaaagaataaggaaaaggaaaactcttagtttcttaaaatcaacaaaataaatgtcttttaacaaaaagaaaggacagaataatttcactagttaaacatgtaagaacatatcacttaaactaaacatcaacatcatgtttagatatttatgttggaagaaccagttcctaaagtgcctctttgtccgcctactgcactcgaatctcattcggagtgatattggagagcatgtagatttccttatttttaacttgagtcccttcactagcgctacaacatttaaggaatataaaacaagagcttcgcatagttcaaattgcccaaagtgatgccacatgattcgacgttattaatacatatacttaagaagattttacagaatgcgtcctgatttgatgtttgccaggatattatcagactttaagtagttgttcatagattccaataattccaaatcaaatttctgagcacctacttaaaagtcgtatgaaaggccatctttttaaccaccaaatccactagtgttccaatgatacagacgggtccaccattttcgaatttgttctaccatgtaccaacaatttactctcaatgggtaaattttaaaaaaaaaaaaagggaaagggattgatgctcatataaggaaatgcctaaatttatagatgacacagaaaacaaaaacataccgcttctttggagataatagctagctcgcctggcttaaccccttgtttggcgaactctctagctgcatatccctatacaaacaagtaaaataaataaacagaataattgtaattatgttgaattcataaaactattttagtaattgtataaactaatttagatatggttaataatttcctgttgttcctggtttatatacttgcgaataaattcaaacgctataccaatttaataaattttgtaagataattcacttcaattaacctattaaaaataatccattaccgtttgttttcgaatctacaatacacaaaaattgtataaactaactcacatatggttaataatttcctgttttcctggtttatatattcgcgaataatttcaaacgctacaccgattt

SEQ ID NO: 196745 - DNA, 633 bp, Cannabis indica
ttaataaataatttagaaaactgttaatcaattattaagtaccacatatgtatgctattgtgcactttaagaaaaaagttcaaaattctaattgaagttaataaaaatatgaacatattaataactaaaatgttaagggtcacattaaagtaacaaacactacaaaaaaaaagtagcatactgttatgctcccataaatttaatttaataaataattaaaaaattagtattgatattcaacaccttaaaatatcatataataataatacaaaaaaattatttattaaaaaatacaaatatcattttttttaaaaaaataaataaagacaaaaacaagtcctttttatttgttttgtagtgaacattaatttttcttcatatctctcaagtaattttttctctatgcttagttgagtcaaaatgtcttaacacaaaatatttgaattactatctgcgtaagaaagagaaggtgaaagatgatatttcactaagaatatttggttctcattgatggaagaatattaatatggttgataaggaaattgcctaaactgagttggctaggcttttataactatatgggttgttaatatatgttaaacataaaattttatttataatatgggtattttt

SEQ ID NO: 196746 - DNA, 1239 bp, Cannabis indica
agaataacttatgttgttgaagtaattctgctaaaccacttcattttgagcatgcataattgcccaaagaaccatggccaaatcttctcaccctgatgtcgattgctattgcagaattcgtccaaattagtcctagaaattggcaccagcaacaccaccaaagctcagcagcgatcgctgctagcaagacttggcaaagggacaaagaacaagaagatgaaaaatagtctctgcatcttgattgcacaaagggcaacgatgttcaagtggaacatgtttagttgctagttacactttagtagccaaacaaccactaagagcacgccaaataagttgatgcagtttgtaagggatatttaacttccaagctatttcccatattttcatgttgattttatttttaaccaatgacaatgagtcaattaaagcgatttgaaataattaaataacaataatgataataatgatcaaaataaagcaaagagaacaccgagatttttatagaagtttgatcccgtgatgatatgataatagcctactctttttttttttttcttgtattgacttgtgagaagagatgcaagaagttattgatctctcttggaagctcttataatgatttttgaatatttctctcttgaatttatgattattgtatctctctctaatttcgtgtccctaaatactgaaataatttcactatttatagaaaaaaattacatcaaattagtttcctaaaactaataagaattaatataagaaaacttgtttattttcctttaacaagtaaaattaaatagattaattaaagtgaggaaaattattttgatattaattaattttgataatggtaataataatagattaattaattaaactaaaactatatatattatattaattaattaaatcaaaattgtgcatattatattatataaaaataattttaaaattatgtcatatataaatagatttttagagatagtaatagtcgatatgtataatctattaatgatcaattaagaacaatgcaatagctgaatattcgacactattctatgtaatattttgccatctttcattcaaaaacacaactcaaacattgttgattgtgtaatgcgaaaacgttttttttattattattatatattactatttgtaatctttaaacaaatatataaattatatacaaaattatattgtgtatttataaagttcaaaaaagtataaaaagaaatg

SEQ ID NO: 196747 - DNA, 1211 bp, Cannabis indica
ctacttacaattgttaattagttaattatactctactactactctcactaattatgtaactacttgtaacaaactctcagttaataaaaattcataattctcctatttatattttaaaatatggtattagagtaatcgttttctctaatttttcattgatcgattcttgaatttttttcgaccgatcatgtcatcttcgtctattgctttgacttaggcaacaactatcgcttcagcttcgatcacgtttcttattcttaaatgctcaataattattccaaacagattaatgtgacacatactactctagccaattatttatttcatattacaccaaacttaacatagcagcaagtatgagaaatgctaaagggtattagtggtgcctaacaccctcttatgtgtcaatatcgctattggttcaactaagtatcgagtcccatataatttaatataatagcttttaaagagtatcgctagccaatcgctacgtgacatgtcgaaaaagtactaagcaccactggtgctaatagcaatgctccagcaagtatgtataggtctcatttcaatttaattttggaatgaaatatcaattcccttttccctagtcttataataaatgaacaattaattagtaataaatcggaaaaaatataaaatgagtaacaagtttattgttgggaacttaggagggtgaaatggactaaaaaaagaaataaaaaagactttccaaaataaaaaataaaaaaaatattaggaaattggggagtaaaagtgggccaataaaattgaaaaggtcagggaagtcttgcctgaatctatcaaccaagtagttctgtccagctccgggattgaagtgtccgaccaaacgcgtttacttcgccaagtttccaagcactaaaactttttcccattaatttaatagagagatagaaccaaaggaaatatacacacacccccacagtacagacaaacctctccaaactccaaaccccactatatctttttctttctctttcttttactattcttcaaaaaaaaccaaaactgctcaagacccattttttctctctctctctctctctctatttctccattaccatataccctttttctgttttcgttttttcttttcttttatccatatggggtggctttgcttctctttgatttgatcaagcttggtgagcttttacttgatttgtttattt

SEQ ID NO: 196748 - DNA, 1674 bp, Cannabis indica
aagcaaacctaagcacctgcattgaaaaacaactgaaaaatgatagtagatgagatcatggcaagaaaaaataagaatttctgccacacatctttcagtacccgaacataatattttcccagcaagttccaacagactattttattaggaatcacaattcatgaaggtttcagtttcagatactacaagaatgcacacatgattcatttttaagctatatagttctgtgtgggaatcaacaaaccttacgaaaatcactatcatgcaaactttctacaaattttggtccagatgaaagaaaaccacgaccaagagggctgtatgcaacaattccaatgcccagttccctgatacatacaaaaaagaggatattagattgtgttgaattactgaccataaaagacatactgattatttccaataagctttacctgcatgtaggaattatatcttcctcaacatctctagaccacaaggaccattcaagctgcacagctgttattggatgaacagcatgtgctcttctgattgttgaagctgaggcctctgatagaccaatgtacttttttgccctcctcaacaagtttcttcagctcccctatcttttagcaacaagagataaaatcagaaatttaaaacagaaagcatgcacaaaagaactaaatgaaataagctgacacaacaagtatagagttatgcaattttttttttaatatttgcacagctgttattggtcaagtacgtttggaacagttcgagcattgatttcctatataactgttgtaaaaacattataacaaaaatggacaaccattatattccattatagtagtttgtaatccaaaccaatctgcgaatgctaattcccaagaattaaattatttaacaaacagagatagagagagctgctggccaattaaggagaataattcccaagtcagccatgtgttcgattgtctactaactatttgaaaaaagatacaagtttccgtactgtactttagtcaaagaaaccaaatatttacgtatacagccttggaactggatactaccagtttatgaaaatcaatcatatgactaattaattaaattggactaagactgacttctgtcatttatactagtgcctagtttctactctaaacttaatggttagatattaacagagaaaagctcataaattttttggtaaacaacgaagaaaataaataactaaataaatataagaaagaaaggtgaagcagaccgtgacttcaatgggcaaacgagtgtcgatccgatgctggtaatagagatccacacaatcaacttggagccgatttaggctggcctcgcaggcggctctaacatacgccgggtcacctcgaatctccctcttgtcgttggcaaagcttattccaaacttggttgctagctcaactttctccctcaccccttgaagcgcctaatcccccaattttaatttcatttgaaaattcaaaagtcgatcagtcctaaagtcccagacaaaaacagaggaaagaataaaatataatatgatagaagtgagtaaaagaagagaagcaacctttccgagaaggatttcgttagtgaatgggccatagatgtcggatgtgtcgaggaaagtgacgccagaacgaatggcgtggttgatgagagcgatcatgtccgtat

SEQ ID NO: 196749 - DNA, 986 bp, Cannabis indica
accaccgataacacctctggacaccaataatcaaaataaaaccatcacttatcgattccgatagtaaatgttgcagctattatcggtgccaagagagctcaaagattcagtttcttcagataaaacatgtgttttgagttgtaaaggaataaaatttggcctccataatccattatcatatatatatatatatatttctataagctttaaaatctaaacatgcatagtacaacctgcaatgactccgtgctctctggagaaacaaactacaaaagccctatgcataagattaaaaggtgaaaattaggttataccaactataatcagggccagcaccctgaaatatagcgagtcataaaaaaaatatttttaaaccttcatttaaaaaaaaaatagtgatatatttcaaattcagtaaaaaaaaaaataataagggaagttttattttgggatccttaattatagatttaggtttatctgagaagaaatgacgttaagaaaacatggtatcattcacgacggtgatattctgatgactggttaatgcgatgcaacagcaacataagctaattggtgtagatgagatatgaaatctgacgtaacagttttttttttttaaattatcataaattttctacagttattagtagtgatccaataactttcattttcttatatagtatatttaattttatatatattttataattacacattacagataaatttaattcttatggaattaaggaatttttgacactaattaacatgagttatgataaactactaaactttcatgagttacttacaaatcataagatcatttgtatttttgaagtgataaataatactaattaatctaactaaaaccaaaagtagtatactaaaactaattaagtagtatttcccatattatatatgcaggcaatatattatgtatatatattggcattatatgtgtgtgatgtccagcattgcaattatta

SEQ ID NO: 196750 - DNA, 790 bp, Cannabis indica
aaccacagtgattgagagaaacatgtcttgcacacaaactggagaagacaacactttttcatgaataccaatcccaaaagcctaaaaatctcaactttgagagagagagattaaatgcagtagatgaaaacccaaaccttttcctacacatcactcccatctcagtaaaatcaaagtttcttctcctgctaacacaaattacaaaaaatcaacatttggttgatatttcaaagcaagatcaccacttaaaatagcttccaagtaaaaaaacgcagctttattcccaagctacagaagaacttgaaaaatactctattcctaaaataaaattgaaagtcaatatcaagaagaacataaaacccctcatcttaagttaaaacccaactttttcaaacccatgactgcaatcttaggttatccatagtaataaatgaaaatttctacagtttgaactaaaagtctaattcatcaacttggaattttgatacccagaaaagcaaaaactggtgtgataatagaaatgtataatcaacaatacataaccaaaaaaaaaaaatgggaagaggagaaagagaaatgtaaacatacctgatttgtgttcatttccatggcggtttaagaggaatggccttcttcttcttcttctgtttctacggttttaacttagcttcaaatttctctaaacgacaagtcgttgtaataaactttcaagaaggagaaaactacatgtcgttttatgtaactgaaagacctcgttttaattttgggatattggcagttaaactacttg

SEQ ID NO: 196751 - DNA, 920 bp, Cannabis indica
tgtaaaaatattatttttttgttgcactaaggtttatatctaaggtttatttattgaaaaaataataatcctacaagtaagaaattcaatcaataaatttggtagaaaatacatgatatttatatatatatataaatatataaattaagaatactcttgtaatgccataataaacttttttttctaaaaagttttaattttcagtacaaacaaattactaacttaaaaatttattataataccatttcatacaatctctctatctaggagtataggagacttttacatttgaaaaaaataataataatttaccttagattacattagataaagcataaagatatgattatgtaggactctattaattaaattcaacatttgtttttttgacgacaaagtaacttcaaaaacaagaagaagctacaaaattggaatcgatccattccagcttaattccttgtctagccgcagagccttacgagccaagttgtgagcattgcagttatgtttcctgttaacatatcaaaagctagcatcagggaaagaagaaaaagaacttctaatatcatccacaacgtcaaagagggctgagagatcacgcttgtgaccacaaactttatctactaaaaatcttgaatcagtctcgatgacagcaagtgggattctgatatggtagcaccagttcatgcctgctcttaatgctaaagcttcagccagcaaaggctgaatgttacctgctgcaggaatagatagaccagccacaacacttccattccagtctttaataacaaccccaaaaccaggcttgccttgatctgaacttaatgatgcatcagtattaagttgataaaaacctggcgagacctgctttggcttgctaggagagtgcggagccttagacatattatactgttgggttt

SEQ ID NO: 196752 - DNA, 791 bp, Cannabis indica
aaattgtttatatgtccaacaagaatttctacatccaccagtttgcatttgagatggacatcggcaagctggagtttctgccttgttgttaagttccctcttctagtacttttattattttccttcatcattatcctttgcctcttcactatttgtcagtttatctttagcttcatatctcttttcttttaagtcaacacaatctcaccttgattttacactcttaacaggattctccacgctcctggatggagatcaggtttctggcacaaagactcgggaattggccgcgtttttctggagtgtagagttcggggggctatggtgaaattaggtgtcaaggcagtcggagtctacgcagaaggtgatacggagaagttgaactcaggtctgggaaaatatatggaggtgatggcttggggaagaaggcaaagggggcgagagacgagaaaaacaagggtctgaatattgagttcttttttttatttatttttattttttgttgaaatgctaataataaatttaaacaaaaacttcaaatgtggtatttgaaattttttttaacaaaaataaaaaataataaaggttactcatggtatttacaatttagtatctatcaatacactaatacatatataggagaagtatgagcccttaacataacgttctaaaatcatttcaaaattatttttcttttctctccttaattctttaaattttaatattttattaaaacataaatctacaaattgatattttacttttatgttaataatttttctataaaaaaa

SEQ ID NO: 196753 - DNA, 696 bp, Cannabis indica
tacttttatctattttctccttagtttactcattttttaatttttttatttgatttataaatattgattaattattaattcaaataaatctatatatacatttgaaaaaaaatatattacaaattatagataaaagtaataataataaaaagcattaaacaaaaaaatcaacttgataaagatctttactactaataataataataataataataataatattaattatggttacaaattttgttattcgagaagatgtgttactccggaaagaagttacagaaaatgtggtagtcatctagaagctttgttagtaaagttgtgatcaatccggatgggtcttcggtgaagcttgtcttttgtaatcgtaatgtcttctgaatagcttgttatcaactcggagacatagtctcggatagtctattgttagtcacggatgtttatccagaatgagcgtctatacgtatccaggtagcttgtctgtattaaagctttcagattgtctctactaaaagcacattatcaaatctgatatagattattattgttggtgatgtgctagaacatttaaggtggtgtaaatgtgtcttgctagtttcagagctaatttaggcaataatgttaatctataatagctatccatctttgtaatctataagcgaatcagatcatgattgcttgagtgaaaatcgtgat

SEQ ID NO: 196754 - DNA, 589 bp, Cannabis indica
tcttcttcttctttttcttatcattccattgttttgtcctcctcttcataatctcattctccattgaactgaatcttcctcactcttcatgtccttacaaaacaaaacaacaaaaaaaatataatatataatttcacttaaatcctcaccatttccaacatataaacaaaacaatctctctctcactctctcactatatattttggtgtgtgagattctagcttgtttgttttttgttctgacaggtagaaatttcagggcagaagcatatttaaattggaccttgataggtggggtatgtttaatgtactcaagtttttactcatatggaattgtggtcaaaacacttttttcttttttctttttcttttttttcaagtttaaattataaaaataattaaaagaaaatctagagagagagagaaagtgaaagactaggcctatttcaggtttaagatatcagtacagagacctaacaatggccaacggtactgattcttttcattctttctctctttttcaagtaggaattttactacaactttctatattcttgtaggttttgtctattttcctctatttttttttt

SEQ ID NO: 196755 - DNA, 1260 bp, Cannabis indica
tgtttcctccagctctgctccagagttagttggtttgctgtcagagctgaacgatgcaactgatcagcttgaaaacaaagttgatccacttttaaataaggtattgttcgctcttttgattgtttcatgtttgatttcagccctttaaatggctgctacccacttatgatgactatatttctgtcaaaactatgtcaggactcaaattaatttcctcaattgaatcaaaccacgttttcaattgtatggatgtgtaggttttgaatgaaattcacaaaaaagtcataaaattatgaaatataagaaagcgcccaaagtttacaaaaattcatcccatttatcttcttcgtttccaattctgccattttcttctttcctgcatcaagaaatacaaaaaatacactttcaagacaaaacctaaactagtaattcattacaagtttcataatgagtaatatacctcgatagttggccaaccttagtagttatttgacgttggtattgccttattggcatgttatatgtgactttggtaaaggttggacattcaaacatttttcatgaaaatgaccattttgatttctattttatatacatgtagtatttagtgctatattaattgtttcgttggtgggttttaatattacaaagatgtactactcatattaagggttaaaaacggggaaatcatgttggaaggaggggttcgttatttagaattgaagaagcttcttctgttgtcatattgccaagcaatcactttctatcttattctcaaatctgaagggcagcctgtccgtgatcatcctgtactagctcgccttgtagaaatcagaagcttattagataaggtattcaattcttctatgaagcagctatcttttaatttttattgttttttctttctataatcatgttcgtttcttctatttcttcttctctctacagacaaaacaactcgatgaaaatcttcctgcagagctggaggagattcttaacaaaagtaaaatggtgaaatcagtggtgaagcttggtaaagagaatggcatcgcatcggattctgttgcaaaagaccatgtgagctctcttgccactacagatattcaagaagcagcggaggtagttactgttttcttatctttacaaagttattttagattcttcaatttgttggaccttagagaaaaaaagtatggatgtctcttttgtgaagtttagaatagttaaccttcaattcgacagtgaagtgtacagtgccaa

SEQ ID NO: 196756 - DNA, 629 bp, Cannabis indica
gggttaatccttaaaaacattacattccattttctctataaagaaaactcttaacaaatatcacttaaaaatggggaaaagaaaaaaggggttagatagttaattggttcatacctttgtgcaaccagtacaaggtgcatcacattggacccaagtgaggtcactaccagaatcaatatcaaaatcaaacactttgggtggattccctatctttagtgaaacagaatagtacctgtcaaaaccccaatattcatatattcaaataaaggtcacttttttaatcatttcattacaataaagttcaaaccaaaaagaacaatacccatgttagaaaaacatgaaaagtttaaaactttactcataaaaaaacattacaaaaaggaaaatagcagaaattgaaacaaaagaacacatacccaagtggataaacattgccctgaacaggtaggataacagaagttcttgatgaaactgagtttttctttgtgggtggttgatgtttggcagctgagaaagagagtagaaaaaaatcagcagagagagacagaaaaaagaggacaatgaatctgattctattcattttttgagtaatctttggtttttcaataatggtcaaagttgaaaaactc

SEQ ID NO: 196757 - DNA, 877 bp, Cannabis indica
tgcacattcttagcatcatcctctatgaaggtgattagtaagttcatcatttggggatgttgtgcaggtgattttaccaatatgcatacttcaccttcatctacttcccttaagtatctcttttatgagttgcgaaagcttgcggcgagatgagatcctcctaaaattattgcaacatgtccatccacaagtggtggaatgagccgaagaggatatggggttcctggtccagggcaagcgatgcaaccacaccaagagctggcagtgcaggaagggtaggtaatgatgttcctagatcttgagagcgtcctacaccctcaagaggatttatggtgccccgctatcccagaccatcatgtttccttgaaccaccccctgttcaggatcaatgatcgagattcagacccattgtccaaagtgtcccactcagaccaacatttcaatctcatcctttaagtactcgaactcattagtagtgtggcccttctctccatggtactcgtattgtttgttctggtcacggctattcctcctgccatgagacatgcgcagaggctttcggtaatgaaccatgttgcatgtggctttgtaaacattttcctgtgtatctatcaaacttttgtattcagtgtactttgggtcgtattcctttctcggcttctttacgaagtcattgcagctatgatttccccccctgctccgcctatcgattccccccccccctcttgctccgtgaatgcccagcactagaatgtgagacgatagttttagctcacctaggagccacgttacataatgtctgtgccgccccatacctggagaagtgggtatagtgtaggggtgaggctagatgctatagattcatagacagtcgggg

SEQ ID NO: 196758 - DNA, 876 bp, Cannabis indica
tgattcaattactagaattccggaggaatcgaaaatcaaagaggttgtctttaagctgcacccgctaaagtcccctggtcccgacggttattctgctattttcttttagaagtattggcagatagtgggggtagacgtatgcaacatgatccaggatttctttgcatccgggactcttgacaggtacctaaaccatacattcatttgtttgatacccaagtctccaaatgctaattgttttggccagttccgtcccataagtttatgtaattttgtatacaaaatcatatctcgtttgttaaccgataggctcaaagggattttagacagattgatttcccctaatcaatctgcctttatcccgggccgatggattgcggagtgctctattttggctcatgagattatgcactctctcaaactgaagaaaggtaaaggcgaaattatggcggtgaaaacggatatgaacaaggcttacaacaggttggaatggaattttttacttcgggtgttgcgagcaaatggatttaattctagagtttgcgggcttattatgaagtgtgtttcgacagttagctattccatcctgcttaatggtgcaccgttggctcccttcaatcctaaacgtggtctccggcaaggggatcccttatctccgttcctatttattctctgcagcaaggttctttctaagctaatttccaaggcggagggtaatgggaatctggtgggggttaaagttgctcgaaggagtacatcggtttctcacatcttttatgctgacgactccatgttcttctgccaagctaatgaacgtaatgcgaggactctcctgaactgcctccaaaagtatgagaagtggtctggccaaagtgt

SEQ ID NO: 196759 - DNA, 1079 bp, Cannabis indica
aacttgtcaaccctattttggttgagtttgattgatatcattactaatattaggcttgtcatgaaaaataaagtaattggctatacttcggtgtgcaagtacaagaaattcattatatatatttttttttttaacctttattttaatgtaacaatagcagaagtaattgtaggttaaggttgtatcatgaaccttgagataccaaacttccatgtttgaatcaatgactacatgtttatgcaagatttaatgaaaatattgggtacattgtaaaccaacttttctttctttctttgtcgaaaagggaaccaacttcttaaaaagccctaaaagattagatactcttggtaacggtctcaattatcagtaaatacaggtaaaagtaaattaaatcgtactgtaaacaagtttacactcaacaataatctatgagctacaaaattggaacaagccctatataccttcaccacattgatcgtccacaaagtttgtttggtaacgagtcacctatacaaatgtcttaaagactaataaaggccagtgtgcatgatgatgaatatttagaggcttgacaaataaaaaaggacatactagtatatccaggatccatctcaatgggaaggcgagtgatgcccttaagggcacaacatgctcgaatacgtatctacaaagcagagaagctcgactaacaaaatctgccaaaaaacccatcttgccgatcagaaagaatcgtcctatctttgttccagtgaacattctcttgcataatgtgggaatgtgacttcatttcttgttttttttctttctttgtttttcttctcttgtctctgttcttgcttccagacgttttgaatgctgagaacggatttcctgtaatttagattttgcatctttgaagagtgcatctgatcttgaagacatcatttgctgaaacattcaatggaaaattgttacaaattaataaaaaggaagaataatgtttaccaggaaaaaaccaggaggttcacttatgtaccttgagatgatccattgctgcaaggttgaaaccgagggtgtctttgcattcctgacacagaccc

SEQ ID NO: 196760 - DNA, 964 bp, Cannabis indica
taaactgttttgaacattatttttaaattgtaaattattcattgtagaatcacccaaaactattatttccatgcacatcatttctcgattaagcttcagaaaagtattatcatgtttactctttaatgtgatattttaaaatgtaaaaatcatatactttttattttactatttttaaattcaaataaatcattgagttgctcttgatactaattatatttgtcaccttagtttcaataacaaaattaaaattatcaaaaatatatcttaaataatatttttaaaatattaaagatactataatataattttaaaataacttattgataacttaaatgtcaacaaatttaactagaatattatgtgagttctgttttattataattcataagtgattacatgtgtattgtatagttttatttgaatattattgtaaagtatatactaaacaaaactattttataaatatgtggtattttatatgacaactaattagtttttacaataaatttaagataactaaaaatataattttaaaataagtaattagcaatttttttttttttttgataaaactaattagcaatttagatgtgtacaaattttacatgtgaattttttaacttctttttttttaatataacttattagtttattaacctattcgatagtataggctatgtacaaaaagctatcatgtaaatcaagaataaaattttgttttaatatgctaaaataaactatttgcatgtataggtatagacatagtatagctatatataccaaataaacttataagcaaggcattttatatgagcaagacatctcatcatacaaatctttaacaagtgcatatattgttatctaactttaatatgtaacttataagacatcttacagtcatgtactttgtataaaactaaatttgatgtctcggcctaaaaaaaaataaattgttgttcca

SEQ ID NO: 196761 - DNA, 1383 bp, Cannabis indica
atctagagtaatcatcaataaaacttttagaatagaagtataaccccccaaaatttgatttatctagtattgcactattacataagacaatattgtccaacaaataactactatcattggatatcttccctgttaagactcagcacccattagatgaaactaaatagtgagttttagtgtaatttgcatcacaaagttgattaatgcttataagatttgccttgagccttttcacatacaatactccccaaaaaggtacaactccattcatcaccaagtctcctttcccaataatctaacccttatttccatcaccaaaagtgaccaaccccatctaaccttctttataattcaccaacaattctttctttcccatcgtgtgatgagagcaacaactgtcaaaataccagtgtgagcaaccaatcccacagtgtcactagtttttgctcttccactcaacttgtgaatgcttcccattaatctaggacgaatatgccctcttttattgcaaaagtgacaaactggtacaaacctctccctttgtagttgaccttcaagtgctgtctttctccccttacaaagcaattttgtaggaccaagtggaactacaatcttcctagtgacatctatgtctgtagcagaagaaccactgagtaaaggattctcaagtgattgttcaacactaatttttgaggaagagaattcatctatgctaagatttcctcctttcttatacaacattttatacccaattgaagttcactatccattaaggttttcggagtttcaatgtctggttgattgatgttatccctagtggattaaactcaagagctcgtttggctctgaccaagtcaacattcaatttgtaaatcttactttcctttttttatccaactacttggtgaacattttaacagtatcttttagaccagatcttttagattcaacctgctggtttgcctcagttaatccccttgatcttttttttttccatgtattatcattgagcatacatttcttcataagcattctatgtacccacactatcatcatttgaactaacaaaatctccatcttcctctaagcaaacagaccgattgctttttgccataaaagtaaccatttgtttttcttcatttgaattcttacatgaactgttgtctttttcttcttcactgtaacctcaactcaccaccaaagctttctccttcttgagtgtatttgcacatgtccgaaactatcacactcacgacattgtatgcccttcttctttttatctttaggctttagctgtttgttatttccactagagtttcttctaaattgattctctttcccaccaatagagtttttcttatagttatttttcaaaaatcttgc

SEQ ID NO: 196762 - DNA, 989 bp, Cannabis indica
aaatttgatcatattatctcattgaatcaaagtgtttttattacagacagacttatttcagataatgtgatgataacttttgaagtcatgcactatttaaaacaaaagacaaaaaaagagttcatggctcttaaacttgatatgagcaaagcatataatcgtgttgagtgagattatctccattttgttatgacagatatggggtttcattcgaagtggattgatcttgttatggcttgtattacttctgtccgctacaatgtaatccatggtggtcatgttgttggccctatcatacagtctcgcggtattcggcaaggtgatccactttcaacatatctttttattatctgtgctaaagggcttacagcgcttatcaacaagtttgaggcaaatcagactattcaaggttgtaaggttgctcgtggagctccctctataattcacatgttttttgcagatgacagttatctcttttgtcaggccacaaaagaagttgttgaaagcgccaatactctcctccataccttccaactggcatctgggcagcaagtaaatttttccaagtcatctgttttctttagtcctaacactattgctcaaactcgatcagatatctgttctgtccttgaaatgcttgaagcgtctgatggaaacctctatttaggtttgcctaacatcataggtcagaacaagacttctatcctcggctttctaaagaattgggtcatggcttgcatcaacagttgggacagcaaatttttatcatgtgttggtaaaaaaaattctccttaaaacttgtgattcaatccttgccaacctatgctatgagtgtcttcttaattcccttaggcatctgtgaggatattgagaaactttatggtcaagcttttggtagaaaataggaatgtcaatggggcgggtcggagtctgattcgactatgatccgactgatccagatcatgtacgaatctgccgcgccccgcccg

SEQ ID NO: 196763 - DNA, 2912 bp, Cannabis indica
ctcgcagccttggcagcctcctttcgggtttggtcccagaactcgcaaagctccttgagtttaacagatattggacgttgtctccaagttagcctgttgtagctcctctaaagatttaagcttcacaacgagttcctagttctcctctctagaattctggaggtccttcctacctgaaatgatgatatcgtcctttggtttcaatatcgcctgatgattcctcttcatgagggccttctcctctcgggcttcatcacgaagagcctctatctagtccactgactccctgagcttcctcaagaccctgtccatgctgctaaactctgacacggtgaacccttaatcaatcaaagtcttggaaagtcaaccgaccttcgtagaattctaaacaatcataaaggataagattagaactttaaaaataaaagcataaaagaggcgtggaaaattgacacttactgcagtcaaggcaacgctcatgtcctggatctggtaaacggggttggaagaagcacatgtcgcatacctcttggtgagaagttgggttaaattagcagcaaaatgactcaccatctctgaggaaaacggagccaggttaggccccacaaagcatttaaaccaacctatcaagggatccaaatttaaatcccagacatcccctgtatttttacctcgaaagggcccatcttgggcctccctcagccacttctttagggccttcgcttcagcatctcccctggataattccctcacaatgtattatgcttggcaatgcggagctggaccctttcttcgtcaggatgtgcaggagtcaaaataatgcttggaggcgcaagatactcgtcgacctcaaaagaaatccccaagtcaacactagggctaggggtgttaaccttcttcagcttcttcaaaggctctggctcagtaatgacgcctttatgcttccggtcaagaagaggaaccacctcttcttcctcttcatcaattaagaccacctcctagttcctgagggcttcgacaacaagtccccctggagtcacacttaccctaagttgctcagacatgtctgactcaaggttgtaagtttgggcaagggcatctaaaaggtcctccatgagttatgctgttcaaaataaccaagaaatcagaatgacaaaaaattacaagtgcaagtatatgcaacaagactagtcctaccctagtgatctaatgctgcccttgtaaaatcataaattaaaaagttggtgtcgtcatcccctaaaaagctatttcagggaaggaaccaactcgaggttatgtaggaggaatgatccaaaagaattggtacagaaggaccaaagcccatccaggaccgacccaaataagacttaaattggagaaataaaaactttcagcattatcgccccaccaggaatggggcatccgaaaactaaataatcttttaacaaattccactagccttaagtaagcataatcttggacagaaggaacgaagtgaatattcaaaggagacttacaggctccgaaggtgcttgcaccgggggctccagagttagggactgggaacaaacatttggaccggattggagttttatccttcccagcttcctctcaggagactctcccagaggcagcttgcagccgagtgtacgtgggctctcgttccctcttgtatctatacttgttgtatttctcctctgcggacaaaatgatgtctaccctgagcgccttctcactcccaggattccagacattagggcagaggactttgaacaagttgaagtcatcaatagattgactctctaggatcaacttgggcctcttacagttgaccatcgtaactaggtcaccaatgttcaaattttctttcctgtatccagcgaacacttgcgcatggtttaggaagagttgggtgggagcggtacggtgcatgggggaatcctgacctagtcagtcaatagatctgggcgctcaaaaaccctgaactcggatgagaagaaaaaactgtggcgatactcctttacattcttttggaagttaaaggctattggggtctcattggccgaatggggctgaaatttataaaaactgtctttaaatttgtccccatgcttggggagtgaaagaagttcataaaaatacaaaatatttgcaggactaggcggagcccagtttctggctacataaaaaatgaataagcctgacaataggcaataggcttgcagaatcaattagtaggctaaaagcccaaaaaaatgaggaagttaatgaaataatcctagaggggaagcatagcttcggacttcagatgagtttgactccatgcccccgaagccattatagttgtggtttggtgtctcctcatccttgggaaagcgatggtacactccagaaccagaggatttgatccccgcaacagtgacaatcttctccaattgatgtgcacaggtcagtgttgaatgcagttcaccggcctcccaaccgttggaacgacatgcaaacttcttatagataacagggcccttcatgacctcctccaaggtggccagcttctttggcccctttcttgaggattttgctccggggtcgcaggggtagatatggagttaacctaatgaagattgagggtttcttggtcaaagccaaagaaacagtttgtgtgaagatcacaaaggacttcactcatctgaaacaacaaaaatccaacagttagcccccacatcaaaccctaaaatcaaaaaggggaatgagggtcccctaaccactggaaagaggtcccctccggatgtctgccaaaagaaatccaacaattcacaaaggcagacatcgagtgcaaaacatccaagcaacaaaggaaaggaaatatgagagtacgaaaaccgcttcgagccatcaaaaaagggcgtatgaaa

SEQ ID NO: 196764 - DNA, 1329 bp, Cannabis indica
cttgtttagcttacacacatgggtaggaaaattaggatccacaaatccgggtggctgggtcataaacacagcttccttaagtgttccattaagaaaagcatttgagatgtctaactgtctaatcggccaatcatttgatacagctagagttaataataccctcacagtagctggcttaaccacagggctgaaggtgtctgtgaaatcgatcccaggggtttgagaatatcccttggctaccaatcttgattttagcttgtcaatagaaccatcagccttcaattttatgcgatgaacccacttgttacccacaatatgcatgtcaggagtgtagggaactaaggtccatgtattatttttcgttaaagcataattctcttgttgcatagacttgaaccatcgaggatcagataaagcttgctttaatgtagtgggttctttgggtaatatagattcaggaagaggatgtaatgtagaggcataggctttaggtttatggataccagatttagatctagtttgcatggagtgatgattgctggtggtggaaagggttactgtattttgtggatcaacaggagctactggtgggactatttgtggagaaggattggtggatatttctgggttaatgatgactggtacgggtatagggatggcaatttctggggtaatattggtgggctgtgggacactgcctgaatttgttgaagggagagaagcagcagcaacagtagctactgcagtaggagacacaaatggtgttgttgatggtattggtgcaacagccgctcgtgaatcatgaggagaaatggagatattattgtttccagcagcaggtacataaaaagatgagggaaaattagtgaaagatggagttgtaaatgaagcagtaggaaccaaaaaatgagaggaagattgtacttgattagtggtgatcttgttaagagctggaaattcctcctcatgaaatacaacattcctagcaatatacactttcccatcttgattttcacacaaataacctttgtgattcattgagtaacccaccataatgcatttttcagatctgagagcaagtttgtgagagttgtagggccttatgtgtgggaagcatgcacacccgaaaggctttagcaatgtgtaatcagggctgctatgaaaaaggcattcatatggagaaatgtctcctataactttggtaggcattctgttgatcaagtaaacagcgttttgaaaagcaagccaccaatatggcataggtaaaccagcttgtgctagcaaagtaaggccagtttcagtgatatggcgatgctttctttcagcacg

SEQ ID NO: 196765 - DNA, 1310 bp, Cannabis indica
agtactctctcaaggggaggactactccagccttgatgtcctcgaggctccaagcgcttatcccagacgagccactagtactagtaccatcgcactcctcgtggatgactctttttgggggaaacagctgaatttccttggagcaacagatttaatacaacatcctcgcatttgatttatgccacagaactttaaaacaccaccaacatactctccaatggttctgaccttggattcgataagttcaacttcaaaggtgacatcagagtcctgtggggtcttggacttacgaggtttagtagacacaattttaaaatcaaggccacttgatgaaaaagtaacagtgactttgggtaaaaatattggtctcgctaatggaatagaagataaagattgaggttcaggccaggctgcatctcgcaagtaacgatgtttaccctcaattatctcttgtagaaaatgcctatagcgactagcaacttcatcctgattggtttttgttaaatgtccctaattttttcatcatttatctcaagtttggattgagtttatggattttgtgtttgaatggaagggctaattccttaggacattctatttctaagaattctagagtataaacttcaaaaccagattgggacatttttataaaaagaacaatcccaactcctggaagaaatttatttaaaccagaaacttattaatacgatagttctaagtttttctctgattaaaaccctagaaattacccaaaaaattaaattgaaattactaaaatcaaatgaagtgaacaatgatgcgattaattacaaaaataccaattcacgaaaaagaaataccaaaaagaaaggaaatgaactacttactgttcagagatgagttttcgcacaaaggagaactctgtaactaaagttgagacgaatggctaagtgtactctgggaactcctgaggttaaagattagatccgaagaaagtcataggaaatatgtcaaggatgaagagggcatacaagggttcgaatgatcgaaaatgatttttgcagaaaaagcttgaaagttccaaaagatagaaatggcgaaatagtgattttatctcaggtttaatactctaaagttgatcactgttagattaaaagagtaaagatctaacggttaagaacaagaaagaattggaaatgatgggcaattgatgttaatgatgtgcctcgaaatcatgaactgccaaaatttaaagcatgcaatttttcaaattaagttaagacaaaaatacccttgcatcatttaaatagctctttttattagttttttta

SEQ ID NO: 196766 - DNA, 3759 bp, Cannabis indica
tgttctgtagcattcccgcttccaccacaaaatctcaaccacaatccctcaaatgtatcagaaaagaaatgaaaaaaaaacaactaaatggatgtaaaagtaattatattccagaagtgcatgatttctggcacaagcatctcatttgatgattacaaaactaagcattacttgaataattggtcccaaattaaaattaaacggctgaagaaaaacaggcaaacatacatataaaaatagagttgaaaaaatcacttaccatgcttctcaagctcttcttgtggaagcgggaatgctacagaacataccgtaccaaactttctagctttgctgtggacattcgctgcaatcttggcattaggaagaccacctaatataacagtcctagcaacccttcacattgacaaaaatacagtaagtcagaaatccttgtcatgttcaactaaactcaacaaataagagcatgcaaacaagaaggcaagaataaagaggcaaagacaatagcttagtgaaataagacacataataaccaaattgggagtcagaatgaagtgcgagaatctcatactgcagggacagatgaaaggaaactaagcatcaaattaaagtctgtactcaaacacctaaagcatgctgcccgccagaaaacaattcaaacttcaaagcagtagaattttgatcaggatccaagcatcatgcatgcctcttaatctagataatattttaacataataactgatgaactatgataagctacaataaaaaaaatatatacaaatatcttatacatatagcctaattatgatcaaattcatacatgtcacataatctacttggcgtagaatctgtctagattattgcgttatacttcagttttccaatcccataccaattttctttctatgggtacttcaagaaaggaaaacaagtttgtgtaattgagaaaacacaatagcacaaataatcgaaaataaaataataatatgaggccctaaatgctaagactttttgtatccacagctttcctctgccataagtgaggttttcaatacatatacgggggagggccaagctaagacaaatggctctttctcttttcaaaaaaataaaaaaataaaacccttttacactttatataaaaagtgagccacctgtaaactccatgcagaggcaaacattatttactacctttgcttctctgaacagccagttttatcctccagatctttatgaagtgttgtagactttccaaccaccaattttttcactggaactttttcaatagcaacaactggaaataacaaaagaaaatgagatcgcaaaaatataacagaatattacaggtgtaaagcatacataaagtctaacaacctttctcctccaagtttgaagtagctgcttcagactttccaaccaccaattttttctctggaactgttttatcagcaacaactggtaatagcaaaataaaatgagatcgcaaagatataacaaaacattacaagtgcaaggcatatataaggtctaacaacctttctcctccaattttgaagtatcttcttcagatttggaagcagtaacatctttgacatttacttcttctttatcatccgattttggagctatagaagagggaagaaacagaatgtgaaaaaactaagaatgaaataagccaacagcaacaaacaaagcgtatacatgacctttacgcaaagtagaagaaagaatagtatctcaaagttcaaactcaaaagaggcatttcaaccttgacttgtctttgatcgacgctgctcaagggaaggtcggtgcatagcatgtttaacggcaattttccgacctccaacagaagagccattcttcacctcaatagcacggttagcatcttcagtaacagcactgcaaacagaggcaaagtgcccagaaagttaatactataactatgacatgaaatgtaactctttatataatcattatacacatggtatatgactaatgtcatgttcgtaatgactatagtattggattagataattttatcgtgggttttgttcataaaattaaagaacatattgaaattaaaacttaatacaaccacctaatcgatagctcttaaaaatttgtaactttcaatccatcttcaataatgagttttctcttactttattgtttagtaactctccttttatgttcttttcctaacattttttgatcttgtccaatgctctatcacatcctacccaccaaacatggttgaccagaataataatgtaaaggtctcctcacaactgaacccaatccacacaacaagattaaactagaaaactcctctatcaaaccctagaatttctgtccagcattgaacctgtagtgtttgcaatgaaagtgatttaaataattgatacttataacaactcgaaagcttgaacacacaactaactctaatggttttaaaaatatttaaaaatcggtcatcaatataaacaattatggttggtagtgtggaaaatgcagttttttttttttgacactggggagaaaggattcgaacttaggacctactctttgtgaggagaagtgtaaaactactaggctatgtcaatgaccgtggaaagtgcagtttaattactacgtaactaatactatgtatgcatacttcaagttcaatgttgactgagcagacaaaacttgaagccagacattcaagcatgtctaatcactgtcttttcttgaaataaataatattggtcatgtatgaaatgttcaataaataatatttgacatacgaacaaaattatttcaagaaaagacagtaacgcatacacaacagaaaaaaaaaaatctcatctccacacagctattataacaagataaagagcttcaagaatctagaaaaaatagagtcattacaacatgagtggaaatctagttataccaaataccaatttctagaaaaacatttactctactcattttagttaagttaacaacactattagtagtgatctaacattctactcccatggaatcccattaccttgcaaacttcaatccgagaaaagaaatctaaataaactttaacttgatagaggaaaactaatcacaatgagtaaacttacaaatgaacaaaaccaaagccccggtgctcagttgatcctattaaaaagaaaaaacagagagagaaggattaacaacattgctcatgattgagcacaagtattacaaactcttctatacataaaccaatagaggaaacacaacaaagatataggacattggttaacaccacatttgttaagaatttgaataaaaatatacaatgaagattcattccataaacaccaccattaattttcaattcaattcaactcagagcagagttaagcttacccttttgtgtaaccatgaaacaccgccgaaccggaccaacatcgctgaaagtttcctccaactgattaaccaagtcaaaaaataatccaaattagccaaaatctagctccattaagcattcaatactgattaaagccatagaatacagctgtgaatccctaatttcgtatatacataaccattagttcaagttttacgatgctttctcggaaaacaaacggaaaaaggaaaatagtacctgagagttagtgaaggaataaggtaagttggaaacgaagacggtagatggactgtggtcggtcttggctctgtcatcgccaccatctctgctcttcttcttccccatggcgcttagagagagagagagagag

SEQ ID NO: 196767 - DNA, 1129 bp, Cannabis indica
taaaaaaagtacaactctaattattaataagtatataaaaaataaaaaaattaataattgtaaattctagctattcaagagccttattttgttgaacagcacgccatcatttggttttttttttttttttgttagaaaagctaatatcactttcttatttattattataataataaaaccatactttttattactaaaaaaaaccctacagatcaatccattgctctctttcttttctcaccctgcctccctctctctttttctttattctctgcattgatagctactgcccagatcaagcatgaagctctggctatcgattgtgaaaataaaccacgaaatcgagttccccgcccccgaaaacccacatattcgcctctctctctctctctcctttttcacatgaaccgtctcagccctatttctctctctcagaaggaagacgccggcgctagtatagccgcactccggagatgggttttcaccatggattcaagatatacgcccctggaagcctcattctccttctctctcgaaaaaagaacacatcggcagatggtggcactggtgaagatggtcgttggtggagataactctgggatggtggcgatggtggagatggttgtcgccgacatctccctctctcttacaggttctattttcccccaatttttataaagatttttgtttttgtatttgttatattgaatcattttgatttcacagatctccgaaatcaaataagggtaattttttgttcaatgtttaatgttctttcaggtatttcatattatgattttcttttctattgcttatgggtaattttattttattttcaaattctatcaatggaaaaaaaaaatgagttgtttatcttactaaagattcaagttcaaagcttcaagttcaagtttagaaattgactgaagtctgattgtattgtttgttttgttacaatctctaatttcttttgttgtaatttttagaatcatatactagcatacagattattcaaccatttctgggttttgggtttgtatatattgatttgtatatgattttttagtttttttttttgtttagattagtaatttttttttgaaaccactcatttgtattactgttatta

SEQ ID NO: 196768 - DNA, 1423 bp, Cannabis indica
tttgcaccagaaaattaagaaacaatataacaaataatattaatttgatgtaagattttatttgtgtccaataaaaatataagggatcgatacattttttatgtttaccaataagtggctttttgacatgcacaaaacaagattacatgtcattttttggacacaaaacctaatgaagaagggaaaaaaaatagaagaataatgaactcaaatcatgtcattctacttattcttcttcttcttcaagtattgcgatcgaaaccctagtcttctcatcattccgcacttgccaccactggccataggtagccattcaaagatcgccttcaatctctaactcacagattgaaataaaaacaagttattgaacatgttaaactcaaatcttggtggaaaataaagccatgcacaacaacaacaaaaaaattacttttatagtaacaattttttagttataatataaaatttttgtgactaaatgtgacttttagtcacaattaataaaaatttacttgtgattaaaacatagtatttagatataagttattactaatttagttttagtcgtaacaagtattgtgactaaaaacatacatttagtcacaaattataatttttgtaactaatacttttagccacggatattttagttataacagaaaaataaagatatataattaattatagtttttttttttttaatcacaaattttgttgtgattaaaagtaaaaaaacatgtactactagatttgtaagggaaatgagagattaggtttggaatttgagcacttttgataaatatttgttacaaatataatgatttgttttccataacctatactatctctaaaaaccctagttttaaatgtaaaactaaaaaagaaaaacactagtttcaaaaatatgtataactagcttcacgaatgagctattttaatatcacaaaaatatagttttagttacgaaactaattctttttgtaaatattatttctaaattaaaatataataggagatttttttatgctagacaatttacttataattaaaaggtttccatatttttttttagttaattaatgacttacatgattgaacaatattgaacatgtttcaaatactacaacaatctactaaaaataacaattgataaattatttttaaaacataggttgagcatatatagattacggggtaagggtacgataaagctagtaaaattaagtggagggtttaacagtttgaagagtattatcatatgaatatacttttttttgttaattattttgctcattaattacaaatagtgctcgtggcctaacaacatgattaaatatttttttaacctttaaaacttatttcataaattatgttttcaattagtgatttttatttgtgcaaaaaaaaaaaaaaagtactttcc

SEQ ID NO: 196769 - DNA, 1203 bp, Cannabis indica
tgttattttgttcctgggttctcatttgaggtaccaataataaaaaaaaaataggcacatgtacaatcaactatttgaattatattttcgacattttaaattacttagaattttttgagaacgaacatgatacctactataaatataatgtacagcttcatttaaaaaaatagtttacgatttctctatttacaaaataaaagaaatacctttattatagggacaaaagctgctctcacctaaaacttttccaacatgtttaagtatattaatgcaaatctttatataatttcaaacaataagttttatttttgttttcactttaattcacacataatatattttatataaactcatacaataaaattatcaaatttcattcacaaaaaatattatacaaaatgaacaagggataatgtttggaaagtagtatggatttcgtggttggattacttagaactacaagtatgtttgattccatatgagtagttatggatcgatttaccaagtgagcacactttctaccggtgaaaataacatacacagtggatcagtatgcaaaattatatgtgaaggaaacttgtaaggttgcatggggctttgaagtctattatttcagataggtatccaaagtttacttcaaagttttgggcaagtctcgagcgagccatgggtacgaagctgaagtttagtatagcttttcatcctaaacagatggttagctcgagagaataatccaatattgaaagatatgttatgagcctgtgtaatggattttgaaggctcttggagtagatatttaccactaatagaattttcatatagaaataactatcagagtactataaggatgactccttatgagatgttgtatggcagaaagtgtaaatctccaattcactgggatgaaacgggagaaaagaaatacttgggtccagaatcattataatggaccaacgaggcaatagagaagatcaatgccagaatgcttgtctctcaaagtaggcaaaagagctatgtagatctaaaatacagatatgtaaagtttcaggtaggagatcatgtattcttacaagtatctctgatgaagggtattaaaaattttaggaaaaagggcaaattatgccctacatttacagggcctattgagattctcgagaaggttggattagtacatattgtctagcctcttcgacccatggc

SEQ ID NO: 196770 - DNA, 1050 bp, Cannabis indica
aatacttatatttctacccaaaaacaaaactattgcacttacatgaaaatattaaaaaaatatatttctaaattttcaatttttgttttcttttgttttgtctttcatccataacttataaattcaggtttaatttggtaataaaataatgagagccccaatttcttccgttcaagctttgtttggggcaaaaactcgtgttcctcaaattattaataaaaatcccaataattataataattataataattataataattcttttattcattttccataaataaaaagcaataaatcataatttcattttgggtaatgggttctcggaaaatcccatcggaccaccggccgacgcctgaccgatgatattatcgttcggttctcctctcgcccttacaatctcaggcaatctatgtatgtgatttctctttctctttgaattcgtacaattaattaaaagtttcacctttgggcaacctaatttttatgaatccattctcgaagttggttcattggtttaggttttttcatatataggctcaaaactgtgtaaatatttgatctttacgatagaaagatgagtttggtattgttttccaatcaatttttgataacagtggaaaatgttcatgattaggtatgcccctaattgatcgtcaatactcagatgcttagtgttcttgaggtgaataattcagaatgaattacaagctgtaaatagtgggtaattgattatatagatgattttgtatgtttctctgtgttttaaattattatagtttctgatgttaaacttaatgttgttgaatcttctaattttatattgtataattattttaattttaccaattaatgtatgtaaagaggaattaaaataaaaaataaaagatcccagatgagtcttttgtttttatcatcacttgcttatgctagagttgctttcagatgattccttatgagaaaaaaaacagtgacctttatctatgcctttgaagaaaaccttagaattatttattactgaaaagtaggtgtttgtaccatttgtttttg

SEQ ID NO: 196771 - DNA, 942 bp, Cannabis indica
tcatttgatttcaaatacagacgacaaaataaattacagacggtgtaaagcatctattcttgttcagcaaaaataattattcaagacaaaagtatgtgaacttcataaatttcatttttcacttgagtttttcatcctcatacaaagcacatataataatatacttggagtcttttggactatgtttctaggataattaactaaacacaaatattcaggcaatagaagattgaacaatcaatcaagtactcccatgaatgaaacttattttaaacaaccggaaacccaacttctaccaaacacatctcatcaaatttacaaatgttaacaatcaatttctaggctaccaaaaagtacaatatttgaatgagaccaataccaatcaataacaaaggttatatataaattcacaacctcgttaaccactgaatataacaactctcaaataagtctcaactaaagggagaagaccatacctgcttggccttgtaacccaatcgacgagccttatcagggcgagtggggcgtgttacacgcacaatcgaagggtgttgacggtattcccagcacctgatcctctgtacgaacctcatcagatccgactgcttcttcctccatatctccgacacgtacttgtaggcacctaatagcagaccccaaaatacaccaagttcagtactataaacgcaataaaacagcaatctcaaacagttgaaatgtacaatcctcaaaccaatgcagatacaatggagaatgggagcgtgagaaaaaattaccaaagtaaaagtgtagctaaaaagaaaatggagcatttgagtgtagcagtgccgaagagaaaaacaatacgtaaaagcataaataagatatagagaatccatagataggtattataaatcagaaaaagagtgaggaagaagaaggaaggtacccattgtgtatggc

SEQ ID NO: 196772 - DNA, 1210 bp, Cannabis indica
actgacaattgggaaacatcgggccaaaccctatttgggttttctaatcgggcaaaattggggccaaaccatcgggcccatcaggtcccatcgggccccatcgaccttccttttggtctgacatgaccatcaggccaccaatcggtcacatcgggccaaccccattcgggttcacccatcaagcctacaatcgggccccattaggcctaaccctattcaggttcacccattgggcccacaatcgggcctaaccgggccatcttccccaaccttaaaaaccaaagaagcatcaggcttgtatcgggcccctatcgggccccatcatgctcgacgaaaaaaatgcagaaaaacccagaacaaaccagacaacaaccattttaccacaaaacaacagaaaaacaacaacaatccacaaatcaatcatgaaaaaaatattctaaactaaatataagaataaaaaataaaataaatcacttacccatggatttttgcctatggacgcttggtgcctcaaaaatggagtctcacactagatcctctaacttctaccactttgtagtagtttggagagtttaatttacaactaaaaaaattttttagtttgagttgttagagaataggagagaaaatggatgaggttttgagaaagagagtgaagagagaagagggatagatgtgtataaggggcattttgagttttaaaatactagtatacccattttttcaataattataagttttagtttagggaacaaatttaggtgtaaaaggtgcatagaaaatcaaatttccctttcgaaacttgtaacaatcatagcaaacccaaatagtggattttcagaacttgtaataatcatagaaaactcaagtagtggattttcaaaacttgtgctgttacttattagggattgttaatattatacactttgcttttctcaaatttgattgaaacttttactgacctattataaaaatttctctcttttgttttaaggtgtaaaattcacaaaataaaaattcgtcaatccaaataagcctccaatgtatataaaatcctaaataaaaaatatctacaagaatattgattaaaagcgtaaatggtttctaaagaagaaatcaatacaagctgaacatatagtaaaatgccatgataacataagcattaatttatcaagttaaacgaatacgatgaacatatatatatatatat

SEQ ID NO: 196773 - DNA, 2184 bp, Cannabis indica
tttaaaatggcgtacaaccgtaattttgtaattttttttatttgtttttgtgtttttttgtaaatatccctttaatattttgattaaaatagttaatttattcgaatattttttttttaaaaaaaaatttaatagtaatatacaatagttacagtattatatatatttgtaaatttttgaaaaattcagaataagtttacagtatggaaaattagagtttcttatatttcagtttactactcgtgtttaaaaaactttaaatgtattttcggcactgtaaactattcaaaaaattttaaaaatttacaagggtaatatgttataagcataatacatgaataccactatgaaaaaaataaaaaattgaaaaaaaaaaaaactaatccatcatatatatataacaataataaactaaaagttttatgtattatatattgacaataataactaaaaaaaatattttagtcacaagtgactttttattgtgaataatagtcatatttagttataaaaatttgtaattaaaaatttgtcactaaaattaatttttttagtgacatatatgagacgttatttgtattatccctttaaacaattattctagatttttatttttatttatttctacttttttaatattttttttataagttagtctctgagattattttatatatttatgttgatgacttgcatcaaaacataattgcaagtaggattgataatctacatgttcaaacaaaaagtttgtactattttttgtcctttctatttttgtgctaacattcaatttcaatccaaatagtttagagtttgtaaatgtttgaaattgaatgttattatagtttagagtataatatgatttctatataatatttctacatgtttttactcttaagagtgtttttgtagttcaataaagaataaatattattttttacttcaaactataataatattatataatttttcctttaattttttttttaaaacaaaaaaaaaatcactaatttatatagaaatcatatatcttgatcgtatttttaataatttgcttacgcggtcatagaccacagatatagtaaaatgtgggtctattaactaatttaagatagtaaaaatttaatttattaacactaaatatacaaatttgtaataattataagaatgcaaataaatatttccataaattatcaattttaaattgttatttatgcatgtattttttgtctaaactcttgaactacacgacattagtgtcacattaataatacattaacaatatatataaagttgagagatccaaaataatgtaaaccctaacaacagagagtgatgatatcaattgcgaaacaaactctgaaagaaagcattactgaagcttattgtaacaacaaagcgttcccagagtgtttaagaatagcggacttgggttgctcctcaggccccaacacactgattgtggtgtccggtattcttgacatcgtcgaatccatatgcacccaatccttgaaaaagaaaaacctacctcgagccttccaagttttcctcaacgatcttcctgggaacgatttcaacaccatcttccaatctctttcgagcttctatgaaaggctaaagaaagaaaaaggcgacaagtttgagcattgcttcatcgcagcttcaccggggagtttctatgggaggcttttccctaataattcaatgcatattgttcattcttctagtagtttgcattggttgtcacaagtaagcataacaaataatttttcttttatcattctctaattagaagacaatttccaattttaggtttattattattggtaagactaattaattacttgtggttaatcttataattactacttaaggttccaaaggagttagtaaataaagaagcatataacaaaggaaatatttgtgtttcgaacacaagtcctcctatggttttcaaaatatatttggagcaatttcaaaaggatttcacaaatttcttaagatgtcgttctgaagaaattgtcaatggtggtgttatggtatttacaattattggcagtactaaaagtgattctcctcagagtattttggaaatattgggaagagcattgaatgacatggccatgcaggtatggattatacatactaggtaaaagttttaagggttaataatattgacttgtt

SEQ ID NO: 196774 - DNA, 1559 bp, Cannabis indica
taaaataaaataaattcaatacagcattcatagctaatcatatctagatttgaatcaagtggttattaagactgttctgagtttttattttattttttattttaaacaataaacagttggagactataattatagtaagaaataaatacataataataatgataataatataagtattcttcttattattaattctacaacttaaatattattattgctgttaatttttgttttggttaatatgattatgtatttttgtaaaatgataaattaaatgatgtacttcttaaagtaatttaaaataatatttcgaggttaatttttaataatatatatttttttttagtataaccaagttaaatgtaatttttaatattttgaaaatataatcaatcttgtcataacatttttagtttaggttattataaaattttgttttgaccaaaatcaactcagtgtagggttatttattagaacacatctaatatttttaggtctgatctaattatatattggatgtagattctaccattcgatctaatctaattaatttcattatttcgatcaatccaacttccattaaatgttagattggattaattttatgtattgaatgtattttatgtatacacaatgcattgtttcgaatatatccaaaaatttagacctattattttttagatcgtatcagatccatctattattttagattcagtaaccatcaaatccaaaaaaaaaaaagtaaaatcttaattttttttatatttacatatatatatatattttaagtataataacatgaaatctaaacgctcgtctaaactaaatgaaaataataattaattcgattagatattagatgtattttattttttgacaccttcaaaatctgatttgatataatctaattggatattaaaaaaatattcaatttgatccaatcacaattgtaaatttaatatttaactgtcaattataattgaattgattgattgcaattaaattagatcgatttatgtacactcgtctttgtatactattttgtataaatttaaaaaataaaaaatctaatttatcaattatcatttaacaatataaaaagttaaatcaataatttttataaagtatatagtctaaatagtattttccaaatgaaatattcgacaaaatactataaattcataaataaataaataaataaaaatagattactcttgtttccaatttgtttgaccatttaaagtttgttagtcttagaatctaatttatacataaaaaaaatagatggataaaattgagaatgaaataattttcttcatttttcttagtttaataaataaataaattaaagaaatagaaaaagaatgacataataataataataataaatgataatgaactgtaagtaacgaactggacgtataagagtgagagactctgtgtgagtgtgtgaaaatctctgaaacaaagctaaagtttcttcttttttatcatttttccaattccatatccaaatatagtaaacccaaaatctcagatctcatcttctttcattctct

SEQ ID NO: 196775 - DNA, 3152 bp, Cannabis indica
cttgaaggggatttatctcagaattatgcatctcaagcacaaactaaaaagtttcaacagaaatgtgattggaaacattggagaggcctatgagaaagccaaagagacttacattgaggcacaattccaaagctaagctaatcctaataacaactattttcttgatttggaacatgaggcggcaaatcagtctctcactcagaaaaaaatgtatcagagtttccttcatcagagaagcaaagtcaactggattcaaaaaggggatagtaacactgcttactttcatgcgttattgaagaagaggaaggaagaaaacagaattgtatcatttgtgactgaccaaggggaattaaatgatcacttccctgatgttgttcaacatttccttagtcactttcaaggcataatggggaaagccaaaccaacttgtagattcaacctgattacatagctttgggacccaagctcaatcttgatcaacaggttcatcttctaaaacccttttctctcaaagaagttagagctatgatgtttagtatccctattactaaatctcctggccctgatggatttggattagggttctttcggtctgtgtggcctgaggtggggaaagatattcatgctgcaatagctcattttttcgacaccaaccagttcccgacagagttacataacacagctctctctcttatccctaagactaagagcccttccaaagctattgactaccggccaattgcttgctgcacaacattgtacaaatgtgtttctaagttgatttgttcaaggcttgctaatgttttgcctatcttagtgaaccagaaccagggagcgtttgttaaaggtcgctccattgcgtataatattcttattcttcaggatctcttgaagaactataaaagaaagaattgctccccaaggtgcacaatcaaaattgacataagaaaagcttatgatacagtcaattgggattttcttgagaagcttctagtagcctattgctttcctgataaatttgtaaagtggatcatgaactgtgtaagaaatacgtcgtactcgttactaatgaatggaagagttcatggaacttttaaaggcgaacaagggcttagacaaggggaccctctctctcctctcctctttgtccttattatggattacctgactagtagcatccaaaaagcggccagagataagaatttctggtaccatcccttatgcaaaaaaatgaaactcaccaatctttgttttgtggatgatttagtaatctcttataaagggaatgagggttctattagtgccattaaaaatcttcttgatgagtttagcaaaacctcggggctttccattaattttgctaaatctcaggtttactttggaggtgttgctcaaccgactccccttgctcagaaaataaatcttttgataggagattttcctctcaagtaacttgggatccctcttagaccaactaaatggagacttgaggactgtgggcagattttgaagaaaatgaaactcaagcttcactcttgggctaataaacatctatcctatgttggtcgggttcaattaatccactctacattgataggattaaggaactattggatgggagtcttcctcttgcctcaaagtgtgataaaggagatcgagaaattttgtcggggcttcctttggggtcataaggataatcgagctagagttcacttgattagttaggaaaaggtgtgtcttcctaaatcttttggtggtcttagatttaaggatggaactaaatggaataaaacttctttagctaggtttatttgggatttgatgaacaaaaaagaccttctttgggttaagtggattaattctatttatctcaaaggaagtgatttctgatcttatagaatgagcatggatactagttggtattggaagaaactttgtagattgcgaacaacatttagcaaggaaatttgatggcagagggtggagaaaatttcaaaaccagcaaggtttataacagtttgctgaagtcgagcgagttcccagcagcaggggaaatttggaatggcctaaatatgccgaagcatgtgtttcaactatggcaagcagctcaaaaccagctgctaactagggaccaactaagcaggttgaacatccctatttttaatctgaactatgtggtctgcgaccttgattttgagagccacagccacttatttttcaaatgtaatctgtcaatacaggtgctgcaccagatttttagatggatgggcacgattgggtggtctatggactacgaaaggtggactgtttggctgagtagctcaagaccgaaagtggtggacaggataagagttttaatccttgcggctgtgatctatcacttgtggagcaatcgtaataattgcttgttttctttattctctaatactgcgaattgtattgtaaataaaattaaaagtgaagtgaagtataggctcttattgattaaagataggaattgctctagggaggagaaaactttgattcacaaattgatttgtaactagttggttttgttggatgcttctttttaagaagtgatcttgtttgtatttggttagtagattaatgaagttttcttcttcttgataaaaaaaaatacttttttacatatgtggattgagtaaaacataatagaaagatattttttagatatgtaaatggatttaaatttcactacaagaaaaagaaaaattaggggaaattttattactggcagaacttttctacccctaataatgggagtattactagtggagtatgcttcccactgataatagtcaaagaaaataataaaaaaaaaattagcattatcgatgtacttttgggtattaccggcggagtggcccaccactaataagaaaattggaataagtgagaaatttattgctttttagtttgtaaatcttattaccagcagactattagcggcaggtgttcgctggtaattgattattttatttactattatatttattactagtagttcctattaatgccagtggatttttgccggtagaaaaactctatatgtataaccctcaaaaaccttaatgcttcttctcactacaagaaaatgtaagtttttgtctagtgcatttttgctaaacgat

SEQ ID NO: 196776 - DNA, 2031 bp, Cannabis indica
tatatatttgaataatcatcttattgatatatctatattttatactttatatatatggtagttgatatataatataataagtatagtaaataatgctacatattttttttttctttggggtcccctaacctatttattgcttttccaaagaaaaaaaaagtttagtttttatcaaattaataataattaataactaataaatatattataaaaacacacaaattccacatcaatatgtactgagttaatgtaatgatgtaagatgtaataagtgtaacattatataactgtacaaatatagattaataaatgtattgagtctaatataggtaggtgagtctactttggtaggtttttttttttttttttgagagagagatacaatgaaggttttaatgaagttaatatttttttttaaaaaaaaatagaattattttttacaatatataaataaataaagaaaatgttgaattaatatttaaaagtgtgtaagtgtggaagctcgtgaaaagtagtaaaacatcactttcttaatttaatggggtaactgcagttacagtgacaatttggtgggaaaaaatgtgacaaattaacattttatatttatgtatatatttatattaattttgaaaaacatctttatctctatctaaaattcccactataaacttttctaactaaatatataaaaaagatatttgtggtgaaatttttttaacattgtacgtataattttatttgaaaaaaataacagtaaaagtatattatgttacgattttgttacaattgtacttttgttaagtgttaattaaaaacatgtgacagcacattattagatcacgtattaaataatttaaaaaagtatatcgtcgcgtagtgtttctaaactgacatttaatgagtttaattgacacttaaaaaccaaaaaacagtaagattgcactaaaattgtaagatataatatttttgctactatttttttattaaagctatatgtatgataattataaatgttaaagaagtttcgctgtaaatatctttatataaaaataatattattttatatttttgtaatatatatctatgtagttttattattaattatttattattttatcttattaaaaatattattataagctatgtatatacatgagaaagagaagtagtcaatcaatttctcacctttagtttttgaatctagctttaggtgacaataacagattaattaccatggtttctttgtttacaatgactattaatctaattaattaattaataaagttttttttatatatttattaaatcatatcaataattgtcatatacgtacattgaaacaatagcatcagtccaaatgattaatgtagatgatgatgatcctacaaaaaaataattaaataaaatgatcataataacctctcatttctgtaaattaaagttcaatttatatatatagcagagaaaaaaaatgaagttttcataaaaataatacgaaaacaataagaaaactatatcaaaataatatctaaataatatcaaaataataataaaaaataacatacagataacacaaaaaattaacaacaaattaacaagaatacaacataaaaagactgtattttctgtaaataaaataaaaaaatcttaaaaaatatttaaaaatttcgtgaaattatatttttgtaattttttttttattatttttgtgtatttgtgaaataattcctatatattaatgcatgtattttctttctttcctttttgttaaaaaaatatttatataatgcctgtattggaaatttgaattacatataaatgaatcacgtggatatataaccagctcataataatatgtattataaatatataaattatggtggcatatgatatctaataataattatatataatgtaaaaaatactagtactatatatatatatagtgtcattaattaatatagctaaatttatatttgtgggagggataatagtgtgtatattttcgtactacatgagtgtagatggagc

SEQ ID NO: 196777 - DNA, 2448 bp, Cannabis indica
gaatgtcatgattagaaatcgcctacaatactttagatataatttcgttttgtggagttatgtttttgctttgtacatcagataaccgatgccttgtttcatacattttccccatgtatgtatgtataacatattatgttatatacacttagataattatccgaattcgttatgacacttattttagggatttgttctattatatatatttaaagtatatagtattttttatttatacggtagattggtgttgatcttaaatttgatcaaccaacaacggaatcatatatatgactaaaatttctacgtttacacaaatagaataagcaaccaaaaaagacactaatttttatagaggtttaaccccttagttagcgggtaatgatctattttccttttggttgtatttattagagataataccactctgatcacaaatattgaggattctagagtgactctcttaagattacaatagtgtgaatgagaggccaatctcaagtaaatgacatgagggagacttagtctcttctacactgataatggcgtgtagaagagaaggtgagctagggttttgagtgtttgaactctatgacttatgagggtaatagcagtataatgaattcttttgagatgttgctaggaacatagtgaaccaaaggaaaatgaactttcagatgcacaaggggcaattcgagttaagacaagaggagggggagtgcctcccattcaaaatggataaaatactagcttggaatgtccaaatagccaacaaccatcataagcaaagtttgatcaagtaattgattcactctcaaaatgtggggcttgttggtctccttgagacaagagtcaaggctccaaaacttggaaccttgtactttaatatttttaatggatggtgttttactagtaacattgcatggcatagagggggaagaaaggtagttgcttggaaccctaataccttttgcatcaacataatcaagtgtacaagtcaatcaatacattcaagtaaccactttggatggcatgaattttcttgttacatttgtttatgcctttaatgatgaggagggtagaaaggatttatggcatgatttgatgactatttctactcaagattcctgggtagtattgggagacttcaatgatgttttggagcaagaagaaagaattggaaatagagtaaaaagcctcaactctcatgcatttaaggactgcatttcatgctgccagttggaagacatcaagtgcagtgacaaattttttacttggtgaaacaatcaacaagggggagatcaaatttattccaaattggacagggtaatggctaatgcaaaatggatggaaacatggccaggtgctgaagctatattctgaaatgaaggagctttttatcattctccaacactagtgatctttcacaagctagctcgcaatgggaaaaaagccttttcgttactttaagatgtggatttcacacccagaatacacaacctgactacaacaaacatggcatcaacagttttttggtacaaaaatgtaccaaattgttgccaaacttaaagccttgaaaccggtttttaagaagattaatcaagagggcttcactgacttacaatcaacagccattcaagcagcaaagaccctggatatttgccaagacaagctactcctggatccctcacaccagatattgcaacaggaagaactgggagccaggaaaaactttacacaggcacataagaactaccaactatttcttcaccaaaaggcgaaaactagttggatacaagatggggattataacactgcaatatttcatgcaagcctcaatgctagaatcaattaaagaatactatctattctggatgcacatggaaccagagtagatgacccgaacaagatcactgaagtatttcttgcttactataaacagttgcttggtacaaggatgacaaatagaagaaaggtaatagctcaagttcttaataatgggcccacgacttcactgcaacaaagtttaacccttctggctcctattacagatgaagagatcaagaatgccatgtttgctattcctggaactaaagcacctggcccagatggctactccaattttttctttcaagacaactgggaattgcttggaagagatatttgtgaagcagtgagatcttttctttattctggcaagattctcaaggagatcaactccacgaccctcactatcatccctaaagtgaagtgtcccaatacaccaagtgactatagacctattacttgttgcaatgtgatctataaagtagccactaagattctttgctccaagctcaaagatatcctaccagatattgtggctcaaaatcaaggtggatttgtcaaaggaaggttaattactcacaacatcctgatatgccaagacttggagaggcattatgggag

SEQ ID NO: 196778 - DNA, 1453 bp, Cannabis indica
tttgatacatattaaagtttagaagagtaaaaattttaaataatttttattttatatttttaatatagttttactattttgcccctattgacaatactacatataataaagttgttataattaccaatagtaccaccattctatttttcttttttcacttattacctttctgtttttctttcccaaatcccaactttgtcagttttagtttttttttacttcttttggccattgggtaacggctgagaaaataaacaataaagaaaatgagaaacgccataatgtaatgattagtcaaataaaaaacaaaaacttaatttggaaatagtgatagtggaaactggaattttgaaacaaattattttatttattttattttttttgttttgtgtgttagatttgttaaatgttaatataggctttgtgtgtgtaagaattccgaggttaaaaaagtaactctgattacatattttatttatttatttatatttatttatttttgaaaaaacactctcattctatgttttcattaagaagaaaacttgtgtgtgagtcaatgcttgaccattgaccataaccaccaaatagatttgttaaaaattcattgaagggtttgattaaacgtattcaaattggttattatatccttggtctacacaaagattacctataatttaatgtagcattttgcctagtttttaagataattttttaaatttataaccaattttcatgtatagtattgtgtgagttagctatttggtttaaaaaaaactaattattgattaattaattcttagtttgtataaatatttaatcaaaatcaaataaaagtataatttactagtattagttgtattgtcttctgcattattactaagactctcatattttttttccaaaaaaaaatcaattttaaatttaatactttgtataaaaaaatgaacatgaaatagttaaaataaatattattattagagtagaaccaataaaaatttaattttttttttattattaaattagatattattcttgaatagagtatttttaaataaaagttctacaattctactatatttctagctatgtacatctagataattttatagtacacatttagaataattcattattctcttatatgtgtgataattaattattttaattttatttttatcactataaattatttattattttctaaaaatttaaaagttaatctcaaataattatagtatacataattataaaaaataattacattaaatattctcctaattaataccaaaataaataaaggtatatcataacaaccctattaagggtttactaaaaaaatttccatatacattattacacacaccaaaaatagagtaaaatttaaagttaagtagtagataccgaccaataaaacttatacataaaaaatatatatatacataacatatagcta

SEQ ID NO: 196779 - DNA, 823 bp, Cannabis indica
gcttttgttgtttgaaaaatttatttgatagagggttgtctcatctttaatagtaaaatgtgcattggaatgttatcttttgctacttttaataagatttgccacttttaataagatttgcattgttcatttttaaatagtttctaacgacaaagaataattgttgtttggaaatttgttgctgattgctttttcaaaagttaaaattaacttttgttgtctcggaagtttattggatagacaatgtttccttagatgtttcaaatgttcaaagatttttgaatgttgccttttgccattgcgtgaggttttgtattgcttgtccttaaacaaatggttttggatccaccgatggttgctttctgaagtattaaaattaacttttcatgacttaaaaatttacttgatagatagttgtctcctctataaagaaaccttaattactctttcacaatttgttactagatcctatttaaaacaattaagttggtttttgttaccttaaaaatttactagatagacagttgcctcctctttgaagaaaacatactcttttggaatttgctgttggttcctatttgaaacaattaagttggttattgttgccttaaatatttatttgattgacaattgtttcaaatcataaagtaccttctaatgaatcctgttactagtgttttagggattcatataattcgtccttaaacagtttcaaaaaacatagcttaactgttggtttggaatatatagatagttgctttttcaaacattgtgattttgtttcattgggttaatgtttactggatagacaattatgtttttt

SEQ ID NO: 196780 - DNA, 1267 bp, Cannabis indica
aaaaaaaaaaaaagaatatatatgtattataatatttttagctcatatattaaattattaaaataaggaaaaagaaatgaagaagaaatagtgttggcaacaatagcaatctttagaaaacaaatataaagaagagcaacaaatgttgtgatcttgtacgttgtaccaatatttagctattatacacaagctgagagggagtgttcttagcagttctcttgctataagataccctagaatgctcaacactctaagacatgacaaatgagtattggtgaaacacatagccatgtagaatgttgggtgtaactctctagaatttctctgtgtaaaagaagttaattttaatggctttttgaggaagagattcttagaaaactgaaaattgaagtggaagtacaactatagaagaccggaatacatgagagatgcatcttttacctaccaaattatagagaaatgctaaaagacactatcggtatctagcacccttctacgtgtcaatatcgctattaatacaattaaatatcgagtctcgtatggtttaatatagtacattttaaagaatatcgctaactaattgcaagacgacaaatctacaaggtgctaggcaccactgatacctaataacaatactcaaaattatatgtgcagacaatacacacttattattatcttatttatacaagcacaatctaacccttgatatcttgatacctcgtcagttgctgtattaggttctagtgatttcagcaaaaacttactgtaattagttgcaagtccatttgattatatgtaatgattgattttcttgttacaaatattactaggaatttgtagggggtaaaaggattaaattgcaccattcttagtttcttacattataaaagtaaagcaaaagtgattaagaaatccgatctaccataaaagaattacaaatgcacaagactttcctcgaatactaaaactcataagcttttaataaggtaaggcgagaaagcatactcgattactcttaaagacaaaagatgatgcccctgatgaagtttcacttaaaacaacttgaacggtcgatcctctataagagctcttttccaacactccaggagaagcttgcaaaatatgaatcttgaaaccaaagtcagaaaaatcaataaaggctgtacccaaagaactggctgatgatgatggcaagtccaagagcaatggctacaatggaagacgcccatgtaagtttctcggtgattctgggaatcctatcctttaa

SEQ ID NO: 196781 - DNA, 873 bp, Cannabis indica
tcttgagcaacaactgagtttaatcagaccattcacaaagaaggaaattaggaaagctttctttagcatttcggatgtcaaatcgctagggtcggatggttatggagctggttttttttaagaaaatgtggccggatctgggagcagactttactcaagctgtggagagtttctttaaaacaggatctatgccccataaatttcatgctacaatgctcaccttaatccctaagactgaaaatcctactaaggtagtggattacaggcctatagcttgttgtactaccgtttataaatgtgtttcaaagctgatttgtatgagaatttctaagctgcttcctctgattatcaaccagaactaaggtgcatttgtgcaagggagttcaatagcgcataatataatgattcttcaagacattttgaagaactacaaaaggaagaacatatctccaaggtgtactcttaaggtggatataagtaaagcttatgatacggtgagctgggagttcttagaagctctcttgaatgcgtacaaaatgccatccagggtttataaagtggataatgtcttgtttgagagctaccacttactcaatcatgatgaatggaagagttcaacggagtttcgaaggcaagaagggtttaagacaaggtgacccactttctcctcttctgtttgtattgattatggaatatttgactagatgtttgattatggctgctgatcaatcgaagtttaagtaccaccctatgtgtaagggtctcaagataattagtctctgttttgcgaacgatctaatgctatttagtaaggggaccttaagccccatgcaggcggtgaaaagtgttctgaatgagtttgaggccgcttcg

SEQ ID NO: 196782 - DNA, 1224 bp, Cannabis indica
atacttaaataaatcacccatgttgcattttgactttatttaacaaatcttatattcaaatttgggactatgttcacattcatcttcatctaccgcaaatattattatataaatcaaccttgttaatgctgttaacaaactagagtactgcacttgatgtagatcgagggacactatttagattcataaagaaacctaatgcattatactatgtattgttgatatataaattattatgtaatatataagagctatatgggtgccataatgtgcaaaataatctaaccaatatttcatatataagtacgtacatgagtataggattaggattagttgatttgatagaagttaagcaagtacaccatgactattgtttacaatctaatccaagtaagttgagtagtacaataattataagaacttacttgtttggtaacaacgttgctattactaatgcttttttgaatatttgacattttgaggatgaaatgatcatgatgtatgtactagtagtagttgtgttattgtatttaatgaaaaagataaagctttttagcggttggcacaagccactttttattattccttgctcactcactcactctttcacagttccactgtgactcacatcacagcaaagcaaagcaaatcttgttacacactccaaaccaaaacacatgcatatagatatatatgcacacatacatatgtacacattcgagtaggaggagtacgtaggacccctcctcatttccttattattatgtaaaagaaaatattgttagattagaaatcaaatctaatatttgcacaatttatagtattacattacattattatatatattgagagtcacatttaagttggaatagaatgaaagctttagaaaaaagtaaaaaaataaaataaaatgaaatggacttctcaactgcacccatattgttcaatctccaccacaaaactcatcatcatcttctcctctccctatctaaatccaatccgtcaaaaaaagcaatacagtgaaaaacaccgtagattcaattcaatccaatcttttggatagaataataaaaataaaaataataattacaatgacaattagaaaatcttataaaagaaaaaagaaaagaaaaggagcgtgtgggtgttatcctcaaagaccatttagtgtgtgttttttttaatttgtcggcattttatctttttgagaaaattaaaaattaa

SEQ ID NO: 196783 - DNA, 2233 bp, Cannabis indica
tataatccttaattatgatctcttcaacatatttaccagattcaaacactctctaactcaactatctctccatcaggttttcactctctttatgccatttctattaagttcatttcttaaactttgtttaatctttttcctttgctgttgcccgaccagtttttagttttatttttttttttttttattgaaatgataactatttcatgttcaaatgcttataaatttgatttacccaaaaaaaaaaaaagcttataaattatcatttgccacaatagaaagcttaaaattttatgaggaagcaaaattaggcactgggttaccaagtttttaattagacttattttattttttttcaaatagcgggcaggatgggaaaattggagatgaagttctttgcaatcttcttatttactattgtgacccttgaaatggtgagttcgcatggagaccagcctctttcgaaagttgctattcatcagaccgtatttgcccttagtgacaaggcttatattaaagcctctaaaagtgttcttggactcaaggtagaatgtgattccattaaaccttttctttatttatttgaaagtagaaacttgtttcttcataagttgatggtatgtcagtaagttaagaaaatattttctttcaggaagaaaatatggaatgggttgttgtcaaattcagttctcctaacccatcaaacgatgactggataggagtattctctcctgctattttcaagtaaagaaatgtgcttcctttattgtactttatttgactttatcattctttcagaatttgtaggcacaatttactttttatgctatgctatccaataatgtttcttgattttttactaaacaaaaacacataattgaacttgaagaactcagttttttttcccctgatttccatttccagtgcctcaaattgccctgcagaaaatccagcaacacatacaccaacactatgtacagcacctattaaggtttgaacaagcgtttccatgccatgaattgtgtctcttaacacttcttatcatactttgttataatgcattcagatttcagagttacagaattgcatattaaatccttgttactttcatttttttttgttgttgcagtatcagtttgcaaattacactaatcctaggtacacaattacaggaaaaggagaagtaaagtttcagataatcaaacagagatctgatttctcttttgcacttttctccggcggcttatcaaatgtatgtcacttctaatgtgatttcttcttctgttgacttcatataaaatggtacatttattgtaattctagatctttgggctaaggctaatcttttactgcaaataaaaagttttgatttattttcagttaccatagctattatatagtttttttattgacaaattattttagagtatctgaatatcattaaaaaaaattgtaaataaattaaaaggtaggtattttattctcaaatattcttttgggagaagctacaaatctcctaatgaattttttaatcctacaagttaaaatgagcttaaataagctaagccaaacagagcagtattgtactatttgtaagcaaaatcaagtggggtctagcctttggtttccttccaatgtggactaaattttttttctttccatttctattggtattaaaaaaaaatgttcggaggattaatatttcattcacctgagcatcattatgagtatttaggtatgagaaatgttaaaaaacaccagtggtggttagcattctcattggtgtcatattgctagctatcggtacaattatgtatcagatcttatataacttaaataataacttttaccctactagtaaagggaaaacggaagtgttattatttaccaatcgtaaagcgacacctctaaataatgttaggtattattggtgtccaataagaatgctctttagatatatgattttgatgtacttaccacctaggagaacacaaatataacaagcatagttattcgttactaaaacgaaataagtctcactcaaatttaagctccaaaatggcttatcatgatttcacaagatgattttcatcattgcccacattgttatttcctttatggtttattttacatgatgtagttatctacttactcgtattttatttgtgatagtttcactttttgtacatcatttaagcaactttgttttgctctgcaataatgtttttttttt

SEQ ID NO: 196784 - DNA, 969 bp, Cannabis indica
aaataaataaataaacaaaccctcgaagcccgtgtaaccttcggaactattctcttctctctctcttcttcttcttcttctctatatatcttagggttcaaacttcaacaaaaaaaaactacttcacagttcacaacaacacacctgagactgagattactatatctaaaatccatggtttgatcatatatatttccaaaaacacaacaaaaaacgacaatggatcattcttcttcttcttcatcaactcctcatcatgacgatcaccatcatcaaaactggctagctttctctctctccaaccataaccctctctctctcttccaaacctccttcactaatcccaataaccgttagtatttcctaactactttctctcatttttctcattttatttacttatttatttatttatatttatatttttgtaacagtagaagatcatcatcatcatcaagatgcttcatcaacagatctcgccatgttcaccggtgcagcaccgaagctggagaactttctcggcggaggacccaccaccgcctcctctccaaatagtaataataataataatcagtttaacggcgttgatcaaacggcggtaacggaagctgatgagctgtatgagtcggagcttaagactattgccgctagctttctccatggtttcaactctcatataaataataataataataatattatgagtattattactaatgatagtaatctcagttgccagctggaagcgccgccgtctgcggtggcgccggtgtcgtctaagaagaccgttgacacttttggtcaacgtacctctatataccgtggtgttactcggtaaatatatatattttttaaaatgagaaaaattcatttaatttattttttttaaaaaaaaaaatgtatatattttttttaataaaattactattatagacatagatggactggtagatatgaaagctcatttgt

SEQ ID NO: 196785 - DNA, 1215 bp, Cannabis indica
ttaaattaaattatatgagacatgatacttaattatactaatagtgtattacacgtgagaattactaggcaccacatgtgtcttttaacatttcttaaaattcaaaagtgctggtcttttattattctatacatattacttaaataccaacctaggtagtgaaggcaatatcagttcagagccattggggactagaagatgatcacatgccaaaggtatacaaattgtatatttgagtttatagttatttatgatatgatttatgatatctgagtcaatttcaaatgttatttgacaatttcattcatattggtgtttggaaaatattcatgacattgtttcacatttgccttccaaatatatggtcatagtgaacattactcaccggaaaaaatggtggagattatcaataaaagagtaattaatcaaaaaaaaaaattgtaaggctaacattaaataagaatattcttttaaggacattatattaacattccaaaatttatcaaacatgcaattttttatacataaaatatattttaatttatacacacttttccttttttttcttccttctcacattataaaaaaaaagtatacataaatgaataaataaaatgtaaatatatttatttatattttagatattaagataaaaaaaaaagactataaacttaataaaaataaatatacactacttaaaaaatatgcaaataatgtaaagagaaatattaaaattattacatacaatgtaaaagaaaaatagtaaaaaaaaataaaaaaaaataaaagtagattgcttttattcagcgtttggaatgactaaatatattcttaagctctttaatttaaatgtttttaaaaaaaaaaaaatttttattttaggtaattgcaagctaaaaaaaaattaaagtgaattgcttttattcagcgttttggatgactaaatatattcttaagctcttaatttaatgttttaaaaaaaaaatttttatttggaattgcagctaaaaaaaattaagtgattgcttttattcagcgtttggatgactaaatatattcttaagctcttaatttaatgttttaaaaaaaaaaatttttatttggaattgcagctaaaaaaaaacttttatatagagagattgcctcttgtctgtctgatccccatcgattttagtttgataattatagaacgtttatttcaccaaaaaaaaaaaa

SEQ ID NO: 196786 - DNA, 701 bp, Cannabis indica
tttttttttcttctcactactctctctcatcgctttttctctcctcactcattgtctttcatattatttttttaagtttaaagttggggtctagtcgaggttggagtagcggtcgagattggggccgaggttgggtctaccaagtcaaggttaggattcgggtctaggatcggagttcgaggtctggttcgagttcaggttgggtgtccgacttcgaggctgggtttgggtccaagttcaagtctagggttgggctctggctttgggtttggggtcagggtctggctttgaggtcgagtttgggtccttgcttcagggataaggttgggtttggggtccgagatcggcgttaagtccagagccaggactagggtcgagggctggctccaggtcggggtcgagtatgggtcagggccgggtctgggaccaggtttgagtatggggtcggattaacttcttattgatgaaaagattactacaattcaaaagaaaacagagaaaaacaaaatacaacaagtatattttacacaaactcaactatatatgaacagttaaaaaaataaagttattatactcaaaaataaatatatatttaaagcttaaaatccattattataaattcacaatgaaacaaacattaattaaatcaaaatagtattaaacaaacattcattcagccttaagataataataataataat

SEQ ID NO: 196787 - DNA, 849 bp, Cannabis indica
ttttatttttattttttattatgtgatttatgttattgtgttaccaagtctcactcacttagtgtcactcttggattaatttagattcaaggatcaaagaaattttgacccccttttaattacttgttgaacaaaatttattttatttccaagaattacatatttatgttgaccaaaaaaaatatactatatatattatataaatatatatatttgcatttattaccaaaatatcatgaccattaatattaataatatcaatttgaatcggccgtttcatttttataccatgatatacatttactgttattctatttttaaggatctattcaaattaattcgagcattattctactattttctttttaatttttatttatataatatcattctaattctaatacgtactctccacctcttattatagaaaaaaaaaatgtaaaagaactgtcacttggtcaatatatatttatgttttattctttttatatatatatataatatccatatattacactctccacctcttactattaaaaaataaaaagaattgtcactcggtcattaatttgcattttttatttctttttaagctcttgtatcataattattctcttctattaaatattgaacaaatttcaggctgtcgaagaaaaaaaattgttaaatttcacctaataataaaaactagttttaatacgggaaaaaaaaatatataaactattattattgacaaatttttacggttaattttttatatatatatatatatatatatttttacggcgtttataaaataacactaaaatgataaaaaaaatacatctaaacaatataaaaaaaaataat

SEQ ID NO: 196788 - DNA, 961 bp, Cannabis indica
ataaccccaagtccattcaatctgttccaatagactcaatggctgttcatttttagagtcaaataaacattattggttatagaattgatttagcttcaacgacctctagagtagaggcgctttaaaaacatcttcacaatagagtaatggagtcaccccactttcttcctcttgatattgatgatatcccttcaattcaatttttttttacacatttcttaataatccccacttctcaaatttctctattttttggtcattctgaaactatatctgtctcattcgatgttaatagttggcaacccttcattacctcttctagatctatcacctctttttccatatccttacctcccatgcctccaaaatttagaccttcaccctcaatgcccataaacaataccattgcccctagctcttttcttccccttaaaatttccatgaccaatgtcgaattaatggtgaccactacctcaattttgtccctttcaagctcttctcatgctctgagttcatcaagtttgagtcagagaaaatgcagagaacaaagagaataaaagaaatgaacaaaggaaatgagaaatcagctcaatggaaatcattggctggtgattgtatttatagacatatttgtaccgtacaaagaatgacctaataacctttacaaaatcataaagtaattattacaaagggaatattctatttcagcagccacttgagcaagcgctctgtattcggattctgtacttgatcgagatacaacggcctgtttcttagatgaccaggatacaagtgtgtctccgagataaacacagtagccagcaacacttctcctgtcatctggacaacacgcccaatcggcatccgagtaccctgttattgctaatctatctgaaggttttatgtgaagtccatgataggctgttcctttcaaatatcgaagcactctctttgctgcact

SEQ ID NO: 196789 - DNA, 740 bp, Cannabis indica
gaaggtttcttctgatcagttggtaggtcttcgattatctcttagcaatctagtgtcccaggtcattcaccacttgattttagctcaagtggttgggtgggtgtgttgaagtaagagtgtgggcatcaaaccccaacctgagctaatttgagtaatgttgttaacaactgtttcttataataaaagtgtcacaggtcatactaacttaaaaaataaaaaagaaaaattgtttaggtgcttccctgtgtgtacgtttgtttgtaatattgattacaaataaagtttgactgaaagcaaggtaaagaaataaccctaaaatacttatgttaaaaacttaaacaagttttttaattgatcaggctctttccaagtttcatcgaagttcattgggattgactctttgtgagtttcagaatgtttgttgcttgataatgatacctgtgcaaagtattgaagccaggcctaatttttttatttattttttgttacttcaggttgactatgcatgcactcctgaggaagtccagcagcattttcaatcttgtggaactgtcaacagagttacaattttgacagataagtttggccagccaaaaggatttgcttatgttgagtttgttgaggttgaagctgttcagaatgctcttctgttaaatgaatcagaattgcatggtcgtcagttaaaggtttttcttttttgaactgtcattgaagtgcttggatttgtttttttttttttt

SEQ ID NO: 196790 - DNA, 1353 bp, Cannabis indica
aaaaaaaatcaaattataatgctcattatttatcaatgaagtaacacaaaatcaacaaagtcataataaaatatgaactaataattgtccaattttgaagaggaatgttaagaaactcctaacagtcaataaacttgactcattatcttcatcgtcgatatgctttttatatatgatgagtaatttcaatacgaatattagccatttcacgaattcgatctcttaaaatactaatctcagtactatcattcaaatttctgtgagtgctttgtatagtagtatcttgtactttaagaatctcttcatctccattaaaaatatcttttcctgcattcgtccttataaattgtgaatctcacagaaggcaatcacaatgtacttctgtattttcagattatacgaaggataattgaataactccttttttcttgtagaatattgattcaaatgatatctttccctttgatatgggaaaaggaaataaggcatgtttgtgtatccaaaatcaactaaataatattttcctaaataatgttaatttatattagtttttccataaagatattaatacaaaatatcaataaacataataagtttaataacacttaccatgggtggagctagaaattcataatttagatttgtggcacatttggaaagaatccgtgcatcattagctgatccttcccatccagtaacagcttaaacttcatatcaaatgaacatatacacatgacgttttgagtcatatccaccttctgacctcgataaggtatttgttcataaatgggaacaataatagagatataggtcaaatcagaagtggttgtgtgggagacagttaaattttggacagctacttgggtctttagaaccaaacattttgaggatctgtcctttctagacttatgtagagaatggaaaacatttttataagcttcctagatgctatctgtaactaaggttttcctccgccataagtgaggtttattaataaataatgggaaggaccctagataaatgagtcttttctcttttaaaaaaaaaaataatagagatataggtcccatctatagttcttacatttattcatctttgtaaagccaaataaaaacttcgctattattgataatagcacttcgctattgtcacctgtaattaaatgacaatcttaaaatttctaaaaatagataacaattaaacatagaaaaaatgcataatatttgtgtaaaccaatcaaatacatcaacgtgactgaaatatttttcaacttgatacaagttggctcactctctcatgctattccgaaattcccagtcaatttgacttaaacggaatggctaatcttacttt

SEQ ID NO: 196791 - DNA, 583 bp, Cannabis indica
ccagtggggtgcaagcatctataacctttttgagatatactatagcctatgaagacacacttagctaatctaaatgagaccttatgagtgttgtaaggcctaagtaaaggaaaacatgagtagccaaatgttttcatcatattgtaatctggtttgaggtgaaataatttctcaaaaggagacagaaaatttagagtaggagtagggagcctattaatgaggtagacatttgaggcaaaagcttcccaccaaaaatcttaaaggcatattggcccaagcaagtaaagtaagaccaatgtttcctttccactctctcctcttgttgatgagtgtgaggacaagaatttcgtttataaatgcctaaccgtgtaaacagattataaagaggaagatattttttccaaggtctagttgaacactttttattttaaccttaaacattcgttcaacataggcattaaaatgtttaaaaattgtggttgcctcagttttggttttcatagaataatccacacaaatttagtgaaatcatcaacaaagctaatgtaatatttgaagtcataacattagtcatgttcattgt

SEQ ID NO: 196792 - DNA, 4001 bp, Cannabis indica
atccaagaaagagtaccatccaaagtacaccaagtaatctagtcttgtggatactcgtgaaaacatatacaaggcaacatgtaacattgttcattacaggaagccccctagaatgccttaaggggggaaaattcagagagacccaaagaagtattgtgaataccatggagatgtgggacatacaacgaacgaatgtgacttcctaaaggatgaaattgaaacattgataagagcagaacatttgggacaatgggtctagattcccatcatatatcccagacagggggtcattcacggacacgtgattatttttggatagtatggtactataaatcctctggatggagtgagtcaccctcaagttcctaaaacatatcttttggcgctccccactccactagctccgactgtggtggctttgatggctttgagacctgcatatccccaaggataaaaccaccactggttgacagagatgtagtgatgatctcgggtgtaccgcgcctttcaagaagttctagaaatttttagaggcctctgagagaattagatagagaaaggagattgtgtgtgttggcacaaacacccacccaacattctcgaacaatgaacccaccaatcactttcacagaggaggatgccaaacatatgcttttttcctcatcatgaccccttggtcattaaaacttggatagagaataagagggtgcctaaagtccttgtgaataacgaaagcaccgcgaacatcctgtccaaacatgcttttttagcgattaaactcactgatgagtacttgtcaccttatcttatccaactatatggctttaatgggaatgccctaatgccaatggggaggattcaactacctatcacccttagaggagaaaataatggcagtgcttacaagtatagtacatttatggtagtggcttatccccacggtgtataatgcattactaggacgccttgtcttagtggattttggagtggtaactttaataacccatttatgtatgaagttcccttgtgacaatggacacattgggacaattagaggtgaccaaaggagtgcaagggattattacaacatctcttaatggaaaatttccatggtccgggaggaggcaccaattgcccctagaatgggaactcatgcgggggttgaacctacctaggagaacttcttaggatgagttagatccccatgtagggacagaaagagtcatagagccggtggaggatgtggaagaagttaacatctgcgataaagaccccaccaaaaccattaaggtgggaagaaacctggctccagcaatgaaagcaagcatcgtagatacagtcaagagaaatcaggatgtgttggtgtggagccattctaacatgacagggattgatcgcaacataatttgccacgccttgaccatcaacgaggatgcaataccagttcaccaaaagtaaagatcgttggacccaatgagagcagaggctgtaaaagtggaagtggacaagttgaccatcaataactttctccaggaagctctatatctagggctgaacatcgggcgggtttaccggattttggattcgcgggtttcgagttcacgggttttgggttcaaaaaataaaaccgaacccggacccgaataggacacaggtcggcgagttacggttggccgggttggcgggttgacttgtaataaaataaaaaaaaatatctatatttcttttaatattttctcagttaatattttgacaagattcttggttcctacagtgctagagatgagaaagaagttgcccaatgcattaatgagttaaactccccaagcttccacgccacaatggtatctttatgggtcatagactctttcgaggagaaggacttgcaaagagatcttttggcaaaacttcttgttaatcttagaaagtctcacggtgatactttaagtcagtcacaactatttaaagggtatgtgctagttttcttgtatatatatatatatatatatatttggaatgtattaatagaaatttgaaccccttttgtcactaacgtttcttctaggtagatttgaaccccttttgtcatcatggagaatgtggcttcttcaggcgatgttcttggaaacacgttggagattattagatctaagaaaggagacaactgtgtcataaaaagagaagaagaagagtaaataattcatacgtgactcaagttaatatatatataaactataataaaaaaaataaaaatatatataatatatttaaattgtgggttggcgggcgggttggcgggttcaacccgaaactcggtactcctaaaaactcaacccgagaacccgcctgaagggtaccgagttgaacccgacccacccaaatattttttaaaaaaaaaacaaattgcgggttcaccggttcgggttcgggcgggttgctcaggttcgggtcaaacccgctcgaaatgttcagtcctatttgttgcccatctagttggcaaacccagttatggtccctaaacccaatggcacatggaagatgtgcattgaattcacagacctcgacaaggcatgtcccaaagactatttccctcttctgtggatcgaccaaatggtcgataccacgtcaaggtaccagttgcttagcttcatggatgcctattctggatacaattagattaagatgcacgttaccaatgaagagcaaactaacttccagatagataaaggtgtgtattgctacaaggtgatatcaatcggtctaaaaaatgcctaagtgacttaccaaagaatagtcaataaaatgttcaagaatcagttggagaggaacatggaagtgtacgtcgatgacatgctagtgaaatcaaagactaccggagaacactgtacggaccttaaagaagccagttcttcaaaggtatgaaatgaactcaatcccaagaaatgtatatctattgtcttctctaggaagtttctaggtttcattgttagttcccaatggatcaaagagaacccagagaaaatccaagctttcatcgacatgccttctccccaaaagcacaaggaggtgcagagtgtcactaaaaggacagctgccctcagcaggtgcatccccttttttaacgtgctgtgaggaaataagaaattcgaataaactaaagaatgtgagaaggccttctagaagctaaaggagcatttgactaagacccctattttgtcaaagccggtggaagggaaagatttgttttgtacttggtagtgtttgaacatgctataagtgttgtcctactgcgagaagaagtaaaagtccagctaccggtgtactacgtcagtaaaagattacttcactacgtcttaaaatttgacctatcaagtaaaaagcaaacattaaacctagaactaaagtgaatataaatgtcaaacaaacatctctgaggctattacaaatggccccgcagttagggcattactaaatttgtttccgcaaaatccaagttataaaaagagaaaaaaaggaagagaagaagggtcaaaagtaattcattgcctcaagataacgctcaatccttgagccttcaggtgctgctagatggctgatgggaggtccccccgtgcaatctctctattgtctcccaatgatgctcactaattacatgaatgccttgtaggagaagagcctgctcgccatagttgaccttcagtagctctttctccttcttcaagtctttgagatctctccttagagctatttcacctagcaggcccttgttggcaacatgcagttgttgtcagattttacatgctcaagttctgtgacaagggcacctacttccttaacagccctctccatcatcaaggctgcctagtgcatgaacaaaatgtgagagaaaaaatagtacatagcagtaagaataagaatataaaggtcaaagctcacccccactgcttattgtttggcggcgtgggaaagggcgaatgcgtcagggctacagtaggttgccc

SEQ ID NO: 196793 - DNA, 533 bp, Cannabis indica
cagcttcttctctcccagttgcaagttccaaaatgttgaaggactagcaggcttcagtctattaaaagcattagaacagtcatatcattgaatattgtcccaattgaaaaaaaaaatgctctttatctatgtataaaagtattttcatcgtttcatataactacaacaaatatttgaataatattaaagttgtaatttttttttttgtaatatttgtaatttaattaatctgatttttttttttctgaagcattaataattgtgatttaattacacataattatgtaaaatacaaaaataattgtataatatttttaatactatatttttatatctatattaacagtgacatttttttaaaatgtcactagttcttttttaaaataaatagcattactattttaataatttaaaatagttttattgacacttgaaagtgtcaccaatgcaaaatatatatatagtgacatttgtactttactcacaatggtaacatttatagatgttacctatttaatattttggtgtagtgt

SEQ ID NO: 196794 - DNA, 746 bp, Cannabis indica
aaattaaaatatcatatgaaacaataaaaagaaccataagaaaccttatcaagtaattctattgatgacatgaccaaataaagactactatgataaagttgttcattgaaagaaacagccaaaaaaaaaaagaagttatttttgtacataacaacttggttattcttccataataatataagaccatttttttgagagagagagttatatgggaataattttgggagcttgcatattaaagatcgaaactgaatgatgcaacatgttgcatgggacaactatatatatacttcacatccatttttctttctttctttttctctttaagaaaaaaagaacttaggcaataattaatgttttgatgatacatagattttgtgagaaaataatatttttattccttaacctactatattttaaagttttactttttttttgagaagttcacaaagaaataaattacggtaaaatttttaaaatttttatctcgctagcaattaattttaaaaacttaaattttagcagttaaactccccaaaactcatgttttatttgtatttagtcatttccattaatattttagcagttagattgactgtccatgtgtatatagagtattgtcgacatagacacagtgtacacgtgatacaatttaatttacctatgtaaataaatatttcaaaaaaaataaaatttaaataaaaaacgtataaaaatttgttcaaaattaaaaatttaattaataa

SEQ ID NO: 196795 - DNA, 1856 bp, Cannabis indica
aagttcttttctggttcaaatgtgtcaaaaaaccaacattgtcatatatgtcatattgcaaaacaaaacagattgccattcatatcaaaccataattttgttgatgatatatttgaccttattcatatggatatttggggacctttcaatgtcataagcattgaaggatataagtattttcttaccattgtcgatgacaaatctcgttttacatggacttttatgcttaaaaacaaatccgatgtgcaatctatcattcccatgttctataacatggtttgcacacaatattaatccataaaagctattagatccaacaatgctaaagaactcaatatgcattccttctatgctaccaaaggcattgttcattatcattcatgcgttgaacgaccacaacaaaaactctgttgtggaaagaaaacatcaacacattttgaatattgctagagccctttgctttcaatccaacttacctcttccttattggtcatatctcattcataccgcaacatacttaatgaatagaactccttccattctattccaaggttgctcctcatatgagaaactacataacaaacctcctcaatatgaccacttgaggtgcttcggatgctgagcttatgcctctactctcccatcttctaggcacaaattttccccaagaagccgtgcttcaatcttcattggctacccccaagggatgaaagcatatacccttcttgatattgagacaaaacaaatatatcactctcgagatgttttcttttatgaaacaattctcattctcacatccacagttttttccaagaaccgtgtctcccaatgtctcaacatctctctcgggtaaacacaaaaaacataccagattccactggtatatttccccaaacatcaatcaatacacacattaaatccacaccccattgggtccctggcattatttctaaaccagcaacaattcagctagctaacgaagcacctagtatcatctcagctgctccaaaaatcacaccagaccttgttgttgttgatacactttcgaccaacccttccaacatgacaacagctcatacggttgacaataactccaaacaatgcaactctgatattcaaactgatatcacagtccaactcattgattctcaaccttcaattgctgaacttgctggtatatcccaaccagcagcaacaaacaatatttctcccacaactgatgtcaataatttgactccaacaacacttcctgacccacaaaaacaatccaaaagtggctgatccatccacaaactctcacacttaaaggactacgtttgtcacaccacttctacaacttttcctatcgaaaagttcatctcatacactaaactaagtccacaattcagggtcactgtcctcgcagcctattcacatattgaacctcgttcatattccgaggcctcacaattcacacattggctaaaggccatggacgatgaaaccgaggccttagaaaaaaatcatacttggattgttaccaaattacctcctggccaccaagccattggatgtaaatgggtttataaagtcaaatataaccaacaaggggaagccgttcgctttaaagctcgccttgtcgccaaagggttcaatcaaaaacaaggaatagattatgatcaaacttatgctcccgtagctaagtttaatacacttaaaatattccttgcccttgctgccatgtacaattgggatatccatcaagttgacatcaacaacgcatttatccattgtgacctccatgaagaggtctacatgaaaattccacctggctataaagcccctcccaacaacttttgtaaactcaacaagagtat

SEQ ID NO: 196796 - DNA, 1164 bp, Cannabis indica
taagaacagcccttccgaatttgtcaaaatagttagctctatagatttttccggtttcagcttcacgagcaatatcttcctgaaaaagagggaagaaactagtttgaataagcagattatgagtctcgataggcttattattagcctacctatataattatttctaacttaaattgctgttatgccttaatattagtctaactagtaaaattgattaggattatagaagctgagttgtctaattcttaacggctgagatggaatgttttaagttagctgtgttaatagtcctaaggtgttagttaaagaaacagtcagaggtgagatagtagttttagagtaaaatattgctcttagggagataccaaacagtctcgaaaagtttggaaatttgtaattcttactttgatatcaataaaatgcctgttctctaattgtttcaagaacttaattggatcaatggtgtatcaattgcattagccttgagtttctataaagaagaccaatgatatttcatgaggagatatttagcaataaaaataaagaatatagtatcatacccatcgaatgttttcgggtttgtagtctagcctccatttgatggtttgtttcaacatcttgcctgcctttgctgtattccagctccgtgctctgagatacctcaatatggatgcctctgaacagatatctggaagcttatcagcaatagaacctatcatctttctgacttcattgatctgcagaaactcaagatctaatttttagaaataaaagatgacagtaaataatggggcgattaaaattcgtattattagtttctttcagtttcatagttgcaaagaacagtaagaagctaaacaaaacagggaataactactcctagtggataaaactaaaatgcatgagtttaacaaaactaggaatgaatataaatagacaaataaaactgagaggcgggcggtgtaaacctgttttatttacacagagtgagtttgtgacaaaatttgggtagcattttcacttatttacagtgaagagctcaataatgatctgttaaattatttacattaaacaaacggaatacaaaaggatcaaaatcataagatgtgggactcaaatgtacctttgtctgctgctcttcaggggacaagcatttctccattg

SEQ ID NO: 196797 - DNA, 1645 bp, Cannabis indica
ataataataataataaggagaaacaatatgatgaacaattgcgagtattcaacctaaaacagcgagtactcgaactgggaacgtaaatacttagtaaaaactggaaaaatcaagaagacaaaggaatatagtggttcagtcagatcacggtctgcttagtctactgttgcaagagtttcgtaggtgtcatttcatggtggatcactcctttatatacaaagcaagtgtccagttagttacacaaggattgcattcattgtcaatccatttatacattgatttacagtaattaaactaaaaacgtaaacatcaataaatgaataacagtttctattcactaaatacagcaacgtatgcgacttctaatgttcgagttggctgttcatattctggtgtaagctcgcggcttaggatatacctaacatttagttaagtctaggatgtctgcgttcttgtatagtcgcactcacggacatcgtataacatcgagctgatagaacctagacacgcgagtctatactagtttatcgaggctgttgggtcattgagactagctcgcatcatagagagtcgatctctatgttttcgtaggaggatcgagaggatactcgcacatatcctggtacatgcgagttaaattcgttccttggtcctacataatgcgagtcacacgaatgcgactagacttttgtcatattcgcatcatctcgctgaatttagctcaggcgaggtttaaactcgaggagtctctcatggacatttcagcttttcttgggaaaattgagtacatgtgtcctccaaacaggagtctggtctcgagtttctaggtgagagaattctcactataacactcctcaatacctttttaagcctttacactaatattttttgatgtgtaagaaataattacgaaagaaatcctaatttaagaatgaatctcataatagcagagatgacactaaccacaatttaccaaaactaattatcaaataataagtaaatgaagtgttgaggtaagaactcttcgacgatattattgactggaaactctatatgttatattgatagaagataagaagaaaataaactttttaaagcttaagagaaatttttagagcaacaatggtgaaaacatgactattctattgataactcgtatgctagggtttaaatttttccgttttataaattttgaattttaataactgttataataatcatttttatatagacacactaatcaaatttttaaaaatctatcctaaatttaatagtattattaatattagatgtacacaatttaaaaatatgtgatatattgtttaacgtttagtaatatattaaattttgaaagatctacaactaatttaaattcaaatcttaactttttatattattattatattgtattttttatttaaataaataagctgaaaaaaaaactttaaactactacaacattattttaatcatgaaaattaacataaagtattattaacgtaaatttttattaactaattaataagtacttttttcgttaataaatttgacacggaaattataagaatttagagaagaccaatagaaacaaaagatgacactaggtttttacgtggtttttgcagttaagtctgcatagtccacg

SEQ ID NO: 196798 - DNA, 627 bp, Cannabis indica
gcctgtaatgagttttcaagatcgaatgaagcttgtaaatttgtgtgtttttttattagtttcttgcgatctgagataagaataagtgtttaaaatcaattaagaagaaattgacacagttaggttttacaagttcaaagatgcaagattggatttaggaagttttgggtctttggtggtgaggttttggagattaattttattagtttttgtgttatatattttgttattattctgcgagtaattttatttgttcttttgttttatttatgattttaataaaagtgttgttaggccactttgttagtttaacaagtattctaagaattttggggtgccaaatttgggagattctcaaatttgagagcttcataattggtagcttattagacttttagttgaaattgctgttaaaattgtcttttttgttattataaatagtttagtttatatttgatgattttgctctatgagagttgtcttgtaataaattttatggggttccatctcaaaaccaattctctactatttattctatgtggaataatgtccacaataataaatggagaaatatagaagatgcatacaactacataaattcttaagttatacgcaaattttttattt

SEQ ID NO: 196799 - DNA, 1023 bp, Cannabis indica
agaaaaaaattaggcggggcggagcggatctgatccaagatccaataagtatctgaagtgtttcggatcggaactccaactcgactccaactaaatgtaatctttttgacatgcctatttaaattgaggactgttattagatagtagaaatagtgttgtcaagaactattacgaggtgaacctttacaaatgactagtaatttttcataataattattaaattatatagaacctaatatgtaagttcactacataataatatgacattttaaatagtactaaacattattgatatctaatagtagagttaattcactacttttatagtctaaaatatatatatatatatatcatattttagactatattttagtataataatttaatgtttttttagtaaaaaaaaaattaaaattaatgaacttaaattgattttagtagtgaaaatatttttaaatataatcaaactacctttgaatttataataaaatgaatgaattaaaaagataataatataataatataatatatacttatttttttaattatttattatttatgttttgaaaataaattttattataaatatttttttttttaaaaaaatattagttatattaaaatagtatataatcattatttgaatcaatatttttcaaaataaattatctataaaataatgagaacattaataactccttaattagtactaatattctctgccaacattattgttttcaccaaaataattaatatatactcagaataatatagaattaacaaataccaacaaaactgtaatattacctgtcctttcaacacaacacgtacctctaaattgcatgcatgcatgcagagaattaaagccacaaagtcatttacgtggaattgattttttcttagggtttaacacgtatagattacatgtgtcaaccctataaatccatgcagaaaaaaacattttacatgcaaaccctataaataccaatccttattactccccaaaaacacatccaccaaaaa

SEQ ID NO: 196800 - DNA, 974 bp, Cannabis indica
ctagattttactatccgatctaattcaattcatccaatttgaattgaatcggttctattcattggatgtatttcatgtactaattcaaatttatccaataatttagacttatagttttttttttaattgaattggatatccatctaatatttaaatttactatttaaaacacaaggaatatattaattaactcattattattaataagtatagtaatattctctgccaattattgttttcaccaatataattaatatatatactcagaataatgtagaattaacaaacaacactgtaatatttgtcttttttgtaaggaatattacgtacacctgtcttttgaacacgtacctctaaattgcatgcatgcatgcatgcagagaattaaagccacaaagtcatatacgtggaattaaatttttcctagggttaacacgtatagattaaatgtgtcaaatccatgcagaaaaaaacactttacatgcaaaccctataaataccaatcctttacttcacaaaaacacatccaccacacaaccaaaccctaaaacattttcaacaatggcaaaaatctcatcatccactctagctttgttcgcagctttaatgttggtggctcatgcagttgctttccgaaccacgatcaccactgtagaaactgacgatgttgaaaactacagccgatcaggttccgaacaggaatgcaggcgacagagacaggacctgaaccactgcagaatgtacatgagggagaagatgcacggacggtttgaggaagaagatgagatcgagaactacagccaacatctggatcagtgctgtagccagttgaggaatgtcaacgagaggtgtcgttgccccgcgttggagatggagattcagaaggagcagggtcaggataagcagaggatgatggagagtgctaggaatattccatctatgtgtggcatgcagcctagaacttgccaattcca

SEQ ID NO: 196801 - DNA, 1468 bp, Cannabis indica
ggtagtggtggaggcagtggtgaaagaacaacttccaatacagaagcatggggtaagccaccgtcatcaaagtcttggggtagtggcggaggcagtggtgatggaactacatccaatacagaagcgtggggtaagccaccaccgtcaaagtcttggggtagtggtggaggcagtggtaacggaagtagttccaaaacagaatcatggggcaagccaccaccatcaaagtcttggggtagtagtggaggcagtggtgatggaactacctccaacgccgaagcgtggggtaagccaacaccaccatcaaaatcttggaatagtcaaccaattgctgcagatgcaaaagacacatctgatgcatggggtaagccaccaccgccaaaatcttggggtagtggtggtggcttcaaagaacctagttcaactgcacaagctaagatttggaacagtacagaatcaaactcaagtactgccagtggaggttggggtagtggttccggctttaaagaacccagttcaacggcacaagctggcagttggaacaatcaggggtcagaatcaaatgctgcaaaagatacaagtgatgctagtggatcaactgattcatggggtaagccaccatcaaaatcttggggcagcgatggtgggaaaggaggatggtaatccacttgttagtagagaatgctttcttttctttttctattttaagaaggaacatgatcttcattcttgatctgggatctatataactcctgacacagaatgttcgtatggcttttgaggttaatcactttttattttgagcatatcagactgactagaggaaaacctttgggttatgtttagaatttagatttgctatgcaatctgttgtttatgtacagttttggaatctcaattagcaatgcgtagtattctatttagctagttgtttgtggctgtgcatatgttatttcatttattcagaaaggagaaaaaaagaagcagctctttgtttgatcttcatcaggatcgcattgaatttaaaccaattctcaagttcgatcacaggacagacttctcaccattggattgggatatgtattgaatagaatattacactaatgactcgtatgattgtaaatgtgtagaagttgacattgtggaaaagattttactgggtagtaggtatccatttaaaatgatcatcaagagtacaggatgtatatagatataatctaagtctaaatctaaatgataattagcatttccaatccatatggcttcctgatctaggcctttagctaagcaatgaatagcagatacaaatccctataggtggaggtttaggttatgctcagagctattacaaacgtaatcaacaagtgttgtacaatcagattcgatgaaggtacttatgggagaatgattttgacaccattgaagcgagtggtggagtgaatgagcttccataatgagaggcgggtgg

SEQ ID NO: 196802 - DNA, 1840 bp, Cannabis indica
atgcaatcactaactgttgctcactagtgtgtgtgcaaaagggtattaagatacataaagggaacacccaatagaggccttatgtttaaactagcatctcgttttattcttgagggcttttcaaatgctgactgggcgtgtgatattcaagatagaaagtcggtgactggtttctgtgttcagcttggtggcaatctcatctcttggggttctagaaaataaagagttgtgtcctgttccagcactgaaagcgagtatagagctctttctaccacagctacagaagtcgtttagatcacttctgtactgcaagagcttggaattaagttgctcagcaaacctgttatctggtgtgataattagggtgctcaaatgttggcctctaatcctatttttcattccagaaccaaagacatcgaagttgatgttcattttgttcgagagttagttctacagaacaagattgatgtctcttatatcccaaccgaagaacaaccagctgacatgttcaccaaagccttaacctttcctaagttcaattttttatgcagcaagctttcactggaattcttcccgtgtagcttgaggaggcatattgaggaagtaaatggttgtggtgactagaccgctaattagttaaggttgttacatgttagttagagtctttgtcttgtccactactagtgttaccttttctattctgtatctatgtctatatatttgcctctcactcttgtattcattatagatgtaggttacaagtcccgtaaaatagcgtaataactgaaattttatagaccttttaaattgtaattattattgtctattttggttcaaattattgcaatttaatgtttctgggtagtatatattattattattattttttctccactattttcaatatttaattaggccccacaaacggtagaaatgccattggcacttagaaaaagccatgcatagcctttggcaaagagaagcctagctagtgatagaggtatggtaaccttttaaagtcttcccaccactgactgaactggcaaacctaaagaaaaaataaaagtatataattatatatgtagtgacaaaggaaatagaataactccaatatattttttcttattctttagttttctctcccttataaaagccaatttataagctgaaaaaactacatatttagtgaggatgcgttttcctctatatgctctatcattaagtacctaaattaaacctaaacatgatttagagtcaatttttattatttagataaatatatgtggtttgaatccactagtgtttttcatgcctataagaagttagaaaaatgtagggaaaaaatgtaaaaataataattaaaaaatttcatgtttggtatagaaataattatgtggaaaagtagttgattcaacaaaaatattaatttaatttaatattttacttttgtattttctacattttttttttcttttcctgcagttttatttctctaccaaattcaaactccaaacgaaaaaaaaattaaaaaaagaaatagaatctttgagtgtaatatatccaaacaagaaagtatatattaggggagctatatctaattatgttaaggaagatctattagtaattgttttctagcatcaaataatgaactgtatcaaaatcaaacaaaatatatatgaatatggcatggagtgaaaaggcaattcactatgataaagtttggggatgcatatggcataatccacctagaaaacaagtatatgcatatttattggtattgttttccccccattaatgatggaatatgtgcttgaatcaatagaagcccttttattattat

SEQ ID NO: 196803 - DNA, 1105 bp, Cannabis indica
aataataataataataatccaaaaactttggcttatttttcaaactacaaaattatgagtattaagaacttaaaaatggaataaatattctcgagctacaaaaataattattaaatcgttatagcatctataaaaatatttattttagagtaattattaatacgaataacagaaattctgttgtagctatatttttcatacatataaattttattgtactctactaataaaaaaaaatacataaaattgaactagtaaaatgaaaaattgaaaattttcgttaaaattgttctatcaaaattgatttttgtgttatgtttatggtaatgcaataaattcagataattcaactttttaccacaaaaaaaaggtcatcacacttcaatctaattactataaacaatttctaagattatctaaaatacagaaagaaagaaaaaacaaacaataattccaaatataaatttcataattttgtaatgaaacaaatatggagaaaactgaaattaatattctatgatttgttttttatatttaattcaagaatatgcattaaatattcaaatcttttgaggaatgaaaaatattccatcagcattaaaaatttcatcttctaaaaaggaatattaaaaaagaaaagagatggaaatgaatttacctgtgaattaattgaagaagaattttccccatttttttttttattattgagaagaaaattacagcattttctttttttctctttttaataatttattttggtgagattggtttttgtctttcccaggtgaatctaaatcttggagcttatttagataaaaatgtccttggattttaatcaaattacaaaaatatcaatttctcgtgatgttaaattcaggccccaattttttagaaaaaaaaattaaaaataaaaataaaaaataaaataatagttataaattccacttggcagagaggacaattattggagtctctcatctctgacgccacgtgggatattcccgcctttttttcttttcttgttcttatatgcaactccttataataatattataaggataaatactattttgaaccctgtgttttgcagaaattattaattgga

SEQ ID NO: 196804 - DNA, 2568 bp, Cannabis indica
ataccaccattgctcttgtgtttggtgagcttgtcctctaaactatttagttgttaacaaatttaagatgtcatctattttttacagttaactgtcaatatggactgcttatgtgtacacttttgtacatgttacacgtttatattaattggtacacctaatattttattttaaaataaattttgaaataataatattaggtatactattataaacgtgccacgtgtatacataattagtctatagtggcccttaaccaaatgatttcttaaatttgctaacaattcataaatttagagattaaatgtatgaaaagattcttcgaaaagtttagccgtaaaaagattaacaaattttagaaattttattgcaaaaaaaaataaattttaatgattaattgctaaacatgttacaattgcattttgcaattcaactaaacatgttacatttgcattttggtgaaatcgaacggccgatatataatctaaagccggccccaaatcttttgggtttctatgggaccctcgtagagtagaacgttgggggaggaaggaaaaggaataataaattaaacaaacaaagcaaaagggctttttctttcccttctctcacttctctctctctctctctcttctctatttttttagaccgttacaatccgaaatcatttaatattttcaaagtagagaaaagctgaaccagataaactagagaaacaattaataatctcaacaaaaactctgcaatcaatactgaaaacggagcccgacctcgaattcctcagcaatggcagacaccaacggctctttactactacaaacccaccatcatcatgcagaccctgcacctcttcattctcttctccattctctcgaccccatctctctcatactctctcagaattctcactcagaacagcccgtttcactgaaactcacaacagagagctacatcatggagagaggaccacgatacacggcctacgcggagctcagagaatcgaggctcagaatgaagaacgcgaggccaccccagcaagaactcgatgagccagaattcaaactcaccccacaaaagaaacaagtcaggtttcagactagttccactaccactactacaggtagccgaaaagggtcctcttttgtggctcaatcggtgccggatttctctgccgtcttgaggaaagagaaccggaagccatcaaatcttccgccgacgatggaaatgactcctccagggaagacttggtctaaggttgggagtaaggttctgacgaattcgagagggagcaagtcagcgaatggtggggataagaagagtttaatgacgagaaagagctatgcgagtcttgaggagttgaaagggctttcttcggcggcgtctaatgccatcaatggcgagaacagagctattcacagaggtggcagacaaactgttttggcgtacagagcgttttaataaaattcgtcaatttgtcatttgggttgtgattttgattgatgattgattctacttcattcaattttttttcttcttttgtttcctttggagggggttatttcatattttgattgtttgttttttttttatagtttgattaccactattgtgatctgtaaaaagagctttgggagatctcagttttcggatattataatatagtaagggaaaaaagtgatgattggttttattaattatgttgcaacttgaattagtttctctgtttccattataataaacgctagactgcatttaatacgatcgcatacagcattgaaacaaagaatttgtaatctggcttggaataactgcaacacatatacaacaaagtcatatttagatacggctacatctgaacaatttcactaatttgtacaaaaaatccaatcaacaaagcttttgtgcacattctaataatttaaacaaaaaacaaaacgagataatcagaattaacaaccaagtctggtgagctcattcaaggtttcatcaactagatcttgaaaaatgttgctgcaaacttcatcaccaccctcaaatgcttcaatatcaaaatctatccatttcccaagaccatgactcatttcccattctacaatatcctcaggaagcatcccagccaaagatgtccatttgttcatctccttttcaaggtctccaattatcatctcccggttcatgcaagaagcgaatcttgtccatgctttgagttttgagttggtgtattctccatacttggattctaaacattctatcagacagtcaaaaagcaatactctatattggttttccgttttgttggcatccgtaccagtaaaaatgttgatatttgtccacgcagcattggcaaccttttccagatcaagaagtacaggaccaatgaacaaaccttctgttccctctaggcaatacaatgtcacatttccaaacaataatccagcattcacaataacatccttcgcatgagccagattgctttctgtcaatcttcccccgtcaaagttgatgctatctaatattcgagaaacattgttgacaagggttgtcatcctctcgcaacaagttctctct

SEQ ID NO: 196805 - DNA, 1160 bp, Cannabis indica
agcaaacgttcgtaacaccaaacaaatccaaatcagcaagatctctctaaccaaaaggctataaaaacttcactatgttgcacatacggacctcatccctatagcaaccataaattcaacagtagataaataacataccatatcttcctcactaataaggtgaaaaacaagcatgaagtttgcaaacctgacgattactgaaactattaattgatctatggtagatacaaagattccaaaattaccttagaatgtttcaaaaaaggtaagaaaaggaaaacagtgtaaagtcaagtacctttgattgggaggagcataacgcttcacgattgttgctgactccgttgctgccgcaactgctgcgtttgaagggttttccagcatctttctctaatcgattgtgggttggtctctatgcaatcagatgactaactccacccaccactaagaaagctcttacagcaatacaacttcagagttttcagatgtgggtagagctctctatctacttaaatcttcccataaccacatccatacaccttcttatttcctttacagaacatgcaacacttgcttagctaagccttggcttataaacccatgattacacatacatatcattatcagccattctcataaacaatttacaatcaataagcgagcaatccctaaccagatcataaatcaccgactgttcctacttacaaaccctaattttcgaaaccctaaaacaaatccttaacgaatataactaaaatcaacgaaatttatatactgatagaaatgaggttaatgtttaaagtgaaaagagagaaagtagatgagaagaaaagaagtaccagaagcggtgagcgtaacgttaatggcggcagcgaccagctatggcagatgagttgaacgaaactgagatctttgggaacctccgagctaaaggagagatgcttttactcggagcaagcgtgtggtttcattggtaggccactatttttcgagttaaaactcaaatttcagtttcaatgcttaatatttttttttttttaaataaaatcattatctttattaattgcaatctatagtgattacataattagttactaaataagatgcctaaaaagtgagcaatactatttgcaaaatatctaataaaattgacataaaca

SEQ ID NO: 196806 - DNA, 2070 bp, Cannabis indica
attagatatttatgccgcttacaaacttaaaatttgggtacttataccgctatttatcctatattttattaagaaatgctaaaaagtacaaatagtgtccaacactctccaatgtattatattgctattgatataatcaaatatcaaattttatacaattgaataaaataaccaatcacaagtcgctacttatacatggtgccaagcatatttagtaatgctctattttatttgcacaacaacaagaatcacataaataaatgttgtgtattaaaatctagtcctaaaactctcaaaggggttaaacttaaatgagtagaatatttttgtgaaacaaaattttgtttccaacaaaaacatagtcatcatgttttgaatagaagtacactagtgaaggtttcttgaaattagcttggttggaaataataaatgaatcaatttaaatgagtttacttttgttgttgtgatcatgtgaaacaatttaaatttgtgtgtttgtgatagatagacacataaaaatggcttacatcattcaatttcaaattcacttggcagcttctataatgataatacaataaatccatgaaacagttggagatcaatggcaactttattttgcaaattatggaaaagttaagtgatgataaattttatctttgaattattttattagctacaaaagtagctaaaaatattgaagtacaaatattatttccttaacaacaaaaatactataattattaagttaatagtaggcatagggagtttaagcaccaaaaaattatatacttaaatttcatcgatttcttaaatagtaaaacaacgtatactttctattacaatacttagtaaattttcatgttcgaaaataaatattaaatatatttaaaataaatttaaaataaatttaagacagtgttcattataattataaataataaatctttaaaaaaattcaaataatttatcgtgcaaaaaatgagtttgaaattttttgaacacttatagtaaattaaaatacaagaactttgtttttgataatggaaagtattcaaaatttacactcatcatagtatttcaatatcaaattctatatatttttatttaataaataataaaaaattactaaaagtaccaaataacaatactttcaaagacataattttaatatttaaaggttacaaacttaataatcaaaatattttcttcactagaaagataacatgtgtatttaaaattgctacaaataatattctcaaaaaaaaaaattgctacaaataaaatagcttaaataattaaattgcagatatccctttattttaattatcaatttgcttcttaaaatattattattcattaatggctaaagacaattattttatttatttatttcataataaaaaggttgacaaaatagggaagaaaataaaaagtaagaaatttcggaaaaaaaaacaattctattactggaaaaataatgaggaacagctaataaacaaatgtatgagctgtaaacacaacaatcctaattaaaattaggtcatataataattcatttattttccaccaaatatatttattacttaaattaaacataaataatttactaatttaaataattaaattagtcaaataatcacatgtccagcaaacattattatattatttaaataataataatgataataatataattactcaaaaaaatatacagaaacaaatttaatttaattaaaaataaaaaagataaataaattgtgtaataataataatacatacacaaatccaaaaatcaacactctaattctcacaaacacattatctcagagtatttaattaaccaaaaaaaactaccattattaattaataaaagagtaataaaacataaaacaaaagaaataaataaaattaaattaagaaaaataaataaaataaaaacttaacagaactgaaaatcctaagccatgcagtagcgataagagcgaagaagctaaatctgttaccgtcaaatctaacggcgccgttatcatcagcagtctgatctgcgacgtcatcatcgtctggtgccgg

SEQ ID NO: 196807 - DNA, 1221 bp, Cannabis indica
ttaactgaagtctttgataagcaaacttcagttaactagataattatttgttgtgttaacctaaaatgtttgcgtttcacctaaatgaatgccacgttaccctgtgcgcaatttgggataacaataatttttttctatatacaatttaaaacaaaattaaacatttctttatacatataattttttttcctttgaatttattattttttaattttatttattttaatttattgttggagacataaaataacaataattattttattttgtttctagttatgtgaaaaaaaaatattttttcataaatattaaataatttaatattgaaaagtaaccaatctaaaataactcatctaattcgtatttttgcagattggattaaattagatttgagatattgtgtggattgaattagatccaaaatatgaaatccgcacttaatgcatatgagatgtactatgagtaaaatagtacggatttaattgaatgaataacactaaaactacattatgaaaaaattaaattaaattaaattatttcttaaataccgaaataatagaggtgtagtaaaacgatctttcacttaagtacaaatcatttttccaaaaatttatattatcatatctcctttacttagtttaaatgagtccatattgatgaactgattgttcttaaaaaaaaaataggtgggccgcgttgtccgaataattaatgaattaattgtttgatttttgaaaatgtccgaataatgaattaaatttatattttatttacatgttaaaataagtaccgttaggaaaatcacgtgacaaacacgtgagctcctctctttctctatatttgaattcggaaaagacgcacacaatttcaaatctcagtcgcccgctttcaaatttcgtgagggtccctccctacacaaacccttcctgttcggaagaaaaagccgcaccaaaaaattccttctatttcatcgtcatcaagtaatttcagatccagttacctatttctttatttagatcagacataaatttagctcagggttttttttctgattttatcgcatattacaagatttttttttttttgtgctgtattgcattgaagacggtaatttcagaaacagatccattttcgtcttcttatggagttagattcaagattgtttagctcaatgatttttatgcttttatcatatattttgcatgagttttgttttttttt

SEQ ID NO: 196808 - DNA, 1253 bp, Cannabis indica
cgaatatgtagatagcaagacaatagaccctgatttaagtcttaacagaatggctgagactgatatctggagttacatccagaaccagtctcaagatgatatgtacaatgctaacttagctaatgaattggccttaactggtatatactagcagcaatgaagtaaaagtctagcaaaacaaaggttgaatttcctatcccgtaatgtagagatgatattatgtatgtactgctatataaagcattacctgcttgtaagattgtagatttgttacaagtttcctgtaagtaaatctcatggtaggctttcgaggctcatgtacaacataggccacaaaaagaacatgtttgagataataatagttttccttcgtaatgcaatattgtataaacaagaattatgtgtagtccaattacatatttgatggtgtttatcataaagaatattagttttctttcaactgaaattacaagtccctacaatttctattaaagattttcatattgacatctaaaccaagaaaagaattacagtaacgaaaagagcatcaataagtaatagcttaattaaatagtacaccacacactatttaagtcacaaatacaagatttttttttggtaccaatatgaaaggacaaataacttaatattgcaaagaatatttcagaagtagttgtgcagccccagattatactttataacaaagagacacattacttgagatgttattcaacagccaacctaaaatggctgatctagttttccctccagaggacaattgattatagatgttaatatgaagatcttaaaatggtataaggaaagcaagccctaaatcaataaaggaaaatattaccatgaacatgacgattatttgcaattgaggaaagatcatattagaatcatctcagtatactgcaagagtggaacatttgatcagtatatttcaagtatgaacatatgtaaatatctcaaggaaacactgccaaccttctatgctattatgataaatcagtgaataagtcagggtaagggattaagtcaaagcttctacatgttgaaacaaaactatcgatgcccaaaaagagcaagagagttaagacactgcactaaatttgtgactaaaacctggaaaaggtattttaaattaagtttaatttaactgaagttcgtgcaatgcacttttatcaccttaaagaaatacttagcaccattaagtggcattgttctgccttgacctctataatattgtg

SEQ ID NO: 196809 - DNA, 892 bp, Cannabis indica
aaaaaaaaataataatatctagaaataaaattactatttttttaaagataaaaatactatttattctaataaacatgtcatatacatggtatgatataatacaaaattgcaatttccaatttctgggtgaagaaaaaaaatctcactccttcactacgtaagcactgatgtcatctcattctcattctcatcctattattaaaaataatatatatgatgataatttaaatttaataacttgccatactattaatttaagcttttaatttttggagggaatttgttaaaataaataaatactagtacattcacaccaaaagacttaaaaccgcaccacaataatctatatggtccatcgtgagcaattaatacacatggtaagatatctagttaataataattcaaaagaaaaaacaaaggtgtacacatctagttctatttttatatctttttttcttttgaaatcttctatttttattgttttgtttacaactcattatattaggtaaaaatctaatccaccacaaatgttagtcaattaatttttgaggaatgtacacgtattcacatatttccactagaactgtcctgtccaatggctttctatcttcttcctaactaaataaactaaataaaaaagaataaactaaataaaatatttggttttaggagaaaaagaataaataaaaatatttaattattgtgtgttgtgacaaatccgaatccgatatttcatagcaatattgatttggaacacacaataattttttctattcacactgaggactgatctgatctcgcttttatatataaccagacaaaaacagcacaagtctcctgatctcttacgttacgcctctctcacactctcacaccttatatataacataaa

SEQ ID NO: 196810 - DNA, 874 bp, Cannabis indica
aaaaaaaaaaaaaggaataattttgtatacatgggacaaaacatgcagtttttactagtttaaacttcaaagaggcctttttagcggccaaatattctccaaaataaacttctattccctttctttatttacttttttattgtatatttatatataaaggtactctttctttatgtaagagcaccatttttgcaactagagtattttttaagccactaatttttaatgcaatggataaaatatatttggttataatagaattgattgcatcagaatttggtgtaaaaagtaaaatatgtgattgtgtcataaataactggaaaaaaaggtgtatttcatttctcttttcttcctaccttccaaaaatttcttccattaaattctacaaatccagatttttttattatttattttatcttttgaagtttttatgatattttaatcccatgctttcaaaacaactccatcttccttatcttttttgaaatgaaatcgtttattagaatcacagttagatctacctcaatctcgttaaaagtccactttgtcatattatggacaataaaattacatgatcaagtaatataagaaaatattaaattagaattaataattatgttgattttattctagatacttaattatttgtttcttatatttaatatatttagttaaatagaaaattaatatttaagttgattttattctagacactcaaatattagtcatttttaggatatttaattagatagaaaattatatttaagttggaaatttaaatttcagtaaaacttaaattagaataactttcaaaatatattttattttattttattaattatttttccactaatttcgaaatgcattatattta

SEQ ID NO: 196811 - DNA, 858 bp, Cannabis indica
tttttgcgttacaaaaatatagtataacattgcgataacattaaaacaatattataataacacaaaattgtaaattatgtaaattaaaaaagtttattgtataaaatttattaagaagccgaaatatgaagaaaaaaaaggcactaatacactgtttttctatatatcgtaaaagcaccttaaagtttatttttttaataaaacgcctagggctgcacatgggttgggttttcgggttttcgtgtggtcgggtttgggtttttagatttcgggtgttggaaatgcacaatcgaacccaattttcgagtggtcgggtatggcgggttttgggtcgagtatatcaaatttcgtgtggtcggattcaggtattatttgaatgacttcacgtttcctcataaaaaaaaacatgtatatgatataatacatatgattatagttaattaaaatatatatataattcagagtatagctattgtcaaatcaataactattatagtattatatatactacgtttattgtacaaattaattaagtaatatataaaataaaaattataaaatcatataacataaatattaatacaagaatgaaagaaattgtaaaatgtgaaactgaaatgaaaagtttgaaacggacacgggcggagaagactttttaactttggatgttagggaagaggctcatcggattgagtcggtcgttgggatgcgacattgccggagaagaagaagcagtcgctgcctctctctgggagaagaagaagttcttagattttttttttagggtcttgtctattggtcttcgaatagtttgaatgaattgtgaactaaaatatgataaaattaatattattaact

SEQ ID NO: 196812 - DNA, 1659 bp, Cannabis indica
aaatagcagcaagaggcacatacatttgcaaccaatttcatttcatagttgtttattagtttctcattccattattattattgttattatttgcataaattatttctttaagacctgcattgattcttgaagatcatttttacagaaatcaaatagcgaggaagcgttggaactcttgaagatgtctttggactcttgtaaacaattgcccttatctttggtcatgttttatgatgaactgacagagctgatggactctgaagctcttcatccaaccattacagaatggtcagttcattgtaacaaccaaaggctggcagtgttatctttatgcttgttcgcagtttggacagatattaacaatcacactttgcttggataatagggttgggaaacatgtaggtgaatttgaatctatgtatctatctgatcttgatggtggacagttgcctaataaggagacttattgtagtttagaaggtgagtgaaatcatgatacttgtcttcctgcaatctgacagtatgttaatctccatcgtacattttgttttgtataataaataacttggggtgttaattgaatttccttgatcttttgtaggggaactctggatgaacttggatggtgatatttcacctatttgtcttaacatattgccattggtttctgcatccttgcagtaagtcattttttatactttatagtttactgtatcatcttttgctttgcacttggttttgttgaagcttgaaagtttcattgcatgcaggtctacctctttacaagtccttcctgcaaacttccttttactgtctactgtaagtgctgcccctttagcattgtgtataaattacagttatgtgattgcctttgatttgctgtcattttttagattgagaggttgacaaatcaaggatctcttggaggaattgacgcactacttggctgtcccttgcatcttccatcctcaaaggttggactaaacgcaaggcattcttaataatattaacaatgacagctaatttttctgtggctcattgttttgagtgtatttttcttttcaaaaaagataaaaataaaaaaaatacacacacagtgcttttacttttgctacattgcccgaacactctcattagtcagtcttatcttgtagcttgtcaatgcaattggatgagttcactaaaatgtgtttggattatgcactttccagtactttcttggaactggctggaagtctctgtctggtaaacaaaaacagaccgtttgtctctccctctattatgcagcaaactggatacgtgaattagtaagctcttacgatttagaatggcgtcatgatttaggtggaattctattgaaattttatcatatagatgatctattgtctccttgcttcaatgtagctcaatgctttttgtacacaaattgctggaggatttgaatttacaagccagactacaaaagaggacataattacaaagctactgaagcgattgaggaatcttgtgtatgctttttcattctctcaattgttttaagaaaattttataaatatgttttcttttctttcacagtatatgctatactctcatgacagatgtgttacataagctaagatccgtttacaagatgggttcctattgatgaattagctaaat

SEQ ID NO: 196813 - DNA, 981 bp, Cannabis indica
gaagtcccttcagcatacacttttcaagcctttttcctggaagcgtatgtctcatccagaagcaccttgtcttgtgctaacatggagattctgttataaggagcttgttgagtttcttaagttgtaactaacttaacaacctatcagttgcagccaccgatcttaggatctttatcctgagcctataaataccaccaatacttatcatttggaggaagctgggttaagacgagtttcgacaggtggtcttgagagagaaagattgagaggtagatagagagatttggtttgggttatgtatgaagaatcttctgtagatgaagaatattcttgagtaagaatgtaagagttggaatactttgagagaatccaatagagaatcgatctcgcctgctgcccatctcaacttggtatattggccacacattatccacattactgtccatctcatcaaccgcactccatctcgcctattagagttcaagtctcccttcgaactactcaacaaaatttcaccacaatactctaaccttcgggtatttggatgtcttgcttacccctcaacacttctcccaacaagacacaagttctctcctcgagcttccctttgtgtcttcttgggctatccaaatggcatgaaggcttacaacctcttagatatccaaacaaacaaaatttttcattcctgagatgtcatgtttcatgagaccatcttcccttaaaaactagcaacaacatacaaagtccatttgtagattctctacttcccaaaataccatcaccttgtccctaggccactactaccaatcccccataccacaacatccccaccccccatccaagacacctactaccccccataataatgaccccccaccaatgtcgaacacattcctggttcttccaccagcaacaatgaaactccacctgactttccagcttcaactgagcaaacactctccaagtttggacaaaaaataa

SEQ ID NO: 196814 - DNA, 929 bp, Cannabis indica
aacaattggtgtcgcaatctcctccttctactttctctctaaattcaaaggtttccaaaaacaaaccttaaatgtcctataaataccctcaaaaatcctataatttcaaaaatatcaaattcgaaaaaaatctggaattgtgctctcgccacggcgaagggaagtgctcaccgcgagaccatgacttgttgccgttttttttttgtcgcgtgttcagattagtattttggtcgtaacttcttcaatacaatttagaattgaacaattcaagatgttcgaaaagttgagaacaagatctaaaacttttatacttagctccaagtccaattctgcttccaaggttgttaaaatttacaattattctaccttgtaaaatcgagcttgccagtttccactattttttactaaaatgtgttaaaatctttcctaataattctaaatgcatgattactcttcaaaatagcctaataaattaaaattacactaattaataatttaaaaaatcaatttaagaatattaatacataaatcatatttataagataaaatattgacttatcaaattagaagctatacttttattagttgattgttattattaaaattacatgatttattgaaaaaaattatgactaatcacatcataatctattttccgtgcactataatatattattatgtgagatttaaattaggttattatttgatggagatttgagtgcaaagcttgtatatatttgaaagtgatgattatattggcattgaggtcgcctcctatggcgttctttcttccaagtccaaccattttgtgtggttaattgaagttgaacacaccaactatcttattatagtttgaccaattctatatatactctctctaaaattacaatcattaaaattttggcttatttttaatcatcaaggatatt

SEQ ID NO: 196815 - DNA, 604 bp, Cannabis indica
tgttacataatgtaaatactgtaatgtactgtacactaaacaattattgtgttaaacgctaaatctatataagtgtgaagatattctcaattaaaaatttaatatagtgtctcactacatttaataattaaaaaaattgatatagtaggaggaggatgtaattttattaattgattatactataataaaatccaatgaaacaaatgttttcttacttgggtgttatgatgtcatcaactctatttttgtagcagaagtacttgtgatgtgtatccttgtttgcatgtcaaaggtggaaaaataaaaataagattttgtgtaaaaggtggaaataaaattatacagttgagatttattactttaagaggagatatatggtgtactggtatttttgtgtgtaaaaaatagagctattatattaattttgattattattaccaagtttgtaaaaatattttgttaaaagtaaatatccacatttattggaatagaaaaataaaatgtgtcgccagcaaagcaagtgtcaccctaaaaatagttttaaaacacatttgcgaaaatcaaaacaatcctgaaattacaattctccaggcatgcatgcacc

SEQ ID NO: 196816 - DNA, 1334 bp, Cannabis indica
agtataagttgagtttttataataagtttttttatataaagtctatatctttaatttatattatgtatttattttttgaaaaaaagaaataaattttcttccaattcatatcttttaaaaaaaatataactattaaaacaaaaatatattatatcttgagtattatgataagtttttttaaaaaagtgtgaaatttattagaaaaaactaaaaaatattaaaataattttaaaaaatatgaaattctatacatgatttaaaaaatcaaattaattaaaattaacgtaaaataatataaaaagaaaatttcaaaaatatctatttaaaaaaattaagttcatatttttttaatcgcaaaaagaaaaaaatatggaaaaatccattttcaatctatacaaaaagtacgaacatataatttttaacaaatcaaataataataataataccttacaaaataataataataataataataataataataataataataataataattaggcacaataactatttctttccttcaataaataaaatataagccaataagattacaatcgatcttcttctttcttttgctttattcaattttttaaattaaaaaacatatttgtatttataatttgttttaatttaaaaaatgaagttattatggtaattgttattttttagatataaaattggaaaaaattatattcaaagaatcaattgggataatttaatattgagtttcatatattttaatttaataaataatataaaaaatcattaaacttatcattatgtgatacttaagtatattattagtgcaagattcttaaaatttttaagtggttcaaatttttacgtgtgttggccttggccttaagaggctggctttgaatgtattacagatgagattttgcagcttgaagaacctttagttcttgctatcttgtttttcttctaggtttctcttagtgaagaaaaaaacttagagaaagtatgagtgttttatctcccctccccattacataaagggataaaggggtttatataggcttagattcgaattcggagatacctgtgacccgctaaggtttctgtgcaaaaataggtttactattggggtaaatacatttaatacatgactttaaggcctacggtagaattctagattatggggcgaaagtatccgtacaaaggaggacccatgctatctggacaagtgtcatgcatgagtgctactatagtagacaagaatgtcagaaggacgccgttgaacaaaggaaatatatttatctttgcgatacgtgcactaccattgtgcttattttcaaaaaaaaaaaaaa

SEQ ID NO: 196817 - DNA, 2317 bp, Cannabis indica
aaaatactaccatatgctctaattaaccatccatttccatctccccctaaagtgcataaaagtaaatcgtacaacactatttgatgcaattaacaagtgtgttgatatggtaaaatacatgcatgcatctcttgttacaaagttataacattcgaaaattcccgccaagtgttttctcaatgaataaacaaaaaagtaatatgtactttataatgaagactaataataataatacaacatggtagcctctacgaaatgagaatctttgttttgatctttaaaggaagagagaaagagaatcattgatccaaatattaataatggagaggagattatgaatacacaattaattgttttgattctttaaatatatatggcagctcaatcgatggtgtgatattgagtatagtttttcaagtgataaaatgattgagattagaatttgtacatgtgggagtcggttataaatcacatgggttgtctgactcgtgtgctaaaaagatatatattaaagctgctaactcatcatcatcatcatcataattcatatatgtatgttatgtggggttaaattattcaaattccaaatacaataaaaatatcttatccaatatacatatcaacattattatctaacacactagtactttctccattttctcaataattatataagtatatatagaaaaagcacacaacaaaacattatgtagtaagagtaattagcaactatgttatgttcccatgaactttccttcagttttctatcattattttaaattaattgaaaaaaattggtgtgtttgtacttgctagctagtgcagtatattatagaaaggagttttttatttttacatttaaaagtattttttttttttgtatgtataatgaaaatatagacaatctaaattataatctaaaactacaccacaattttagaccgtaaaaataaaaaaaaaaaataaataataatattaaaaagtaatatataaagtgatgctcctaaaaaatacaagtaaaagaaaattattttaattgattaatttataatagaatgtaccaatgaattgagaattattaattaaaaaagaaaatgtgaacgagaataaattattataaattttaaaatggctcataattaagctaatgtaaaatatgtacaaacataaacatataactaataataaataaaaaagtgtaaaaaaaaaatacatgtagtatagataagctataatagtactttaaaatgcactttgttaagtacactcccaataacttctctaatctaattttttaaaaaaaatatatcataaaaattttactttaattttttttattttttctcaatattatttaaatattatatatatattttaattttataaattaaaatataataatattacacatatatataaaagttaagcaaatagtaataaaatatttttagctcatgaatatagctgtctctacatttagttaaataataatcattgaggtaaaaataaaaatatatgtaaaataactaagctttagcttatttgatggaagcttaattttatcacctattttctataatttaaaatttgagctattttggatcaacccagtgagcttctcttctatatctttcaaaatatatcaccaaaattttaactttttactattttaccataaattttatattacaccatatattaattttttttaaaatacatcatcaaaactttattttttctttaattttaatatattttattcatatcaaataataatactaatatttacacatatccccgtataaaaaaattaaacctttcaaacaataaataaaatatgttagagcaatgaatagtatcctataaatgtagagtatgaatagtaaattttcaaaaaattgttaaaataaagaaggagattagaacatttgatatagcgtatttttaatttaattcttcaaatatgtttaagaatctctattttagtgcttaacttagtgcttaactataattttttttattatttttataatatctttcttttagttataagtaaaaaaatgaataaatatgataatattttattatttgttgttattcgcattttcggaagggtggcacctggtcccgtacaggcgatcagcgtactgggcccatttactagcccatcaactggtccaagtaaacaaatgtagcgacccatctctaaaaatgggcgtgaatccgaacatatccgaatataatccagattctccaagttcccgagaagataattcaactatgattgaagcctaagggtaggagtaatattgggagt

SEQ ID NO: 196818 - DNA, 768 bp, Cannabis indica
ataaataatattatattttttttaatgtagcgtaatgatattataattaactaaaaaattaggggtcttggtttcaaacccatcagtctctctttttctcatccctcccttaccactaaactagccttagtagcttcaaataacactatgtttggataaaacaatatattgtattaattactacaaccataaaatttaatacaatgtgagtcgtattatttaatacacaacagataactcgtattagctagtattctaatgtttacaaagggtgtgggatcaaccccagccttgaacctcggacccaacccggacccataccctgaccatagatttggaccatcggacccaaacctgacccaaaccccagaccccgacccagaacactggacgtggccttggacttagacccagaatcgaaccctggacccagacttggacccccaacccgaacccgtagccgaacctggacctggaccccagactccagccacgaacaccggaccctgccccaatcccaaaccccctggccttagccctaagcccaagactcgaaccgacacaaggagggctaatcactggaattgattatattaataaatactgcagtaaaactcattaaatataattctataattgctaagtgttcaattccatatttatagtggagtaatcatgtaattaataaacatgattatttagttgataaaattcaattaatagtctagtttattggagtttagagttataggtccatgatccccagac

SEQ ID NO: 196819 - DNA, 1490 bp, Cannabis indica
ctatgttgatgatatactcatcatgggaagtcttgaccacatggtttcatctctgattatttagtcatctcagtgccaccttctctcttaaggatcttggtctgattgactatttcctgggtattcaagtcacacatgtctcagttgggatttttatctctcaaactaaatatttacaagacttattatgtagggaagacatgcaaaatgtaaacactcaaaataccccaatgaactgtagattaaagctctctaactatggaagtgagcctgtggcagatgcatccttgtacagatcaatagtaggtgctcttagtatgctactataacaagatcagaacttgcattttgtgtaaacaaatcctaaggtaggaactcttgattatggattacacatcaaatctgctccaactttttcccttgaagcattttgtgatgtgaactgagcttctgatattgatgataggagatcaacatcaggatattgcatcttctttggaccaaatttgattgcctggaagtctcagaaacaagttaccagctccaggttttcaattgaagcagagtttagaagctttgctaatactgcttcagagcttacataaatccaatatcttcttcatgagctacacatttcttcacagggtattccttctatttggtgtgacaaccgtgacaaccaaattacagttcttgctgctaattctattcttcatgctcaaaccaagcatatagaaatggacctatactttgtgatagatgatgctttacataatcaaatatcagtcaagcatgttcttgcacaagctcaactagcagattgtttcactaagcctatttcaaagctctaagttctctgaaattcgaagcatactcagtgttctttctcaggccatgctgagtttgaaggctgctgataaggataggactagcgttgcttagctgttatattctgttagttgttaacaggctgttagttagggttgtttgtaactaggtatactttgttttaatctgttaatcaaggtaatatttgttatttttgcagctgcttctcttatttgttaaacatcctgatttgctttatttatttattattattgcagggagcctttgtttggagctgcaaggcgctggtttctgaggtgagcctcaatttttgttatgttcactgtcagagcaatttcttatcgtttgaattttttctcatttcttgtaaagttgttgcgtaataagggtaacttctctcttagcacacacacacacacacaaaacaaaaaaaaaaaaacaaaaagaaaaataaggataacttctcatagtctttgtcaatcaaatttattaggggaaactagtaagaatatgatcaaaccaacttcctttgcatcatggtcgttgttgtccattggcatgaaattgtgttatataaaagtgtgtatatatatatatatatatattagaactattagagtgtcccacgttgctaatgtgta

SEQ ID NO: 196820 - DNA, 718 bp, Cannabis indica
ctcagtcaaaacagaaaatgggactgtggaaaaaaagcccaggtccagatgaaattaaaaaagttgtgtttgctatcccgagaatcaaggcacctattttccagagtgttcttgatccgtatacattggccgaccaatgtggctagctgcatgtggattagttgtgcatgtttctcgaatgaataaacaacttatttagtaggagaccacctatttttttataatttggaataaatgtatagttaattatcaatatattagtcattgcttgaaaaaaaaaatgatatcataactgtaaaattacggtttttagaaagaaaaaggccctcatgacttgcatgcgcctggttagtttcccctataagttactttgaagcttcagtaaagttgctgataatggaggccttccctgccaaagcttatactagagaatgaaattctctgatcgagtagaacacgatccacacccagagatttgtttcgaagcacttgtcgcaggtgtttgggtttctcggcccgcgatctcgctttgtggaagaaggtcactgccttccattgaactcctcatagagtagacttcaaacccaatgtgaatctaagtggtaaagctcccatacacatacacttatatttgttctttttttaaaacataaaaataaaaaactgtatatgtaagtttgttggattgcactcttggtttgaatctgtttttgagttt

SEQ ID NO: 196821 - DNA, 1188 bp, Cannabis indica
aacaaccgtaactaaaaaaaaaaaaaaaaaaaaaaaaaaaaaaaaaaaaaaaaaaaaaaatacttacaaatgtacgttcactataagaaaatcaaattttaccagcgaaactactaaattgcacccacaaaagctaatatttaccggagcatctactagttttgccgacaataaagagggttttatttgacattatgaaatacttttgctggctctgataatcatagagagtaggaaaaaattactttttaatcgttaatcaaagtaactcgctaatcgttattcaaaatataaagttacactttaattcattgaaaatctatatctaaattatatgtcgagaaaggtttttcatttctttatttttctaaagaaatgtatgacatgtgatatgtgaaatgatctaccacgttcatagtactagctagccatgtgaatacaacattttttttttctaaaaatcgatcatctactttactccaatagaaattgtaccattttgtctattcttcaacggtaagaagaatgtaaaacaccacggctaaccaactctcaaccacatcataaaaatcacaaatagtaccatgtaaccacttgactactcacatatgatgcatgtaaatcaactttctaacgtatgaaatcctaccccaacctaagtacattttctctttcccataacacctcaaaacatacacacacactcacaaacacaacctttatgattagtcttacccataatatcatcatatttttctcaaaccccacattatctccttctttctctccaactattctcccatggagaaaaaaaaccacctcaaagatgatacttttttgcagcacccaattctcattctcttagttcttgtattgggtttagttatcatggacccttttcaaatgggccctgtcggagggcttgagttcaggcctgtcaagcacaacattgctccttataagcaagtcatgaagaattggcccagagacaaccagagccggcttgggcttgggaaattggagtttgagggtgaagtttttgggcctgaatctttggaatttgatcatttgggccgtggcccatatactgggttggccgatggacgcattgttaggtggatgggtaaggatgttggatgggagacatttgctcttgtaacttcaaattggtgagtggttttggaaatt

SEQ ID NO: 196822 - DNA, 1338 bp, Cannabis indica
ttttttacttttttgtttttttcttttttgtaagactgaagaagacccaagaacttgaacctccctaaacccctatatccgattcgtccgagttaaagaactcagaactcagattgtgtcggaaaaatggcggaatctatctccaaccttcagggccttctatttcagtaatctccctccctccaaagctctaattttctgaattttctccaatttctctttgtttgttgttttcatatttaccttgcattttcttctcaggttatcggagccgatcaggaaaacaatattggaaaccccatatactacaccggagaccggaaacatctccgtcaaagccgtaatcgatcaacttcttcctgacaaatcctcacgtccagattctaatttcagcgacacccgaattcggaactcaataaaggacttctctctcgcttgtgctttactatcctcggctcggtccccaacccacgagctcctctcatggattcctctgtccgtttcgattttggcagactcggccttttgcgagctctcgaaagcccattgcgtcactttcagcgaaacgaatgcgaggaagatctcggaactgggtttgaattatggaatgatgaccgaggagaatagattaattgcggaattgattcctcaggtgctcccatcgttgaaggacattattcaggagagttccgtcgataagtcagatgaagtcaatgagttctcggcggcttcggctagagcccccgttggtttcgccattgttgctgcttatcagtttagatggtttgtgacgaaggtttgaagttgtggtagacttttataaatttttaagcacttgtgtttgtttttgtggcttttatttgatctgggttatcgtttttttttccttcagattgattatccacatttggggaaattgtgtgctttagtgataccttgtgcgcttacggccgtcgatcactggtcgacagaggttaaagtatgtgctttattaacttgtatatttattacattcttttcccatcattttttctattcctatttgatattttgtggttttaattaatggttgtgcgttactagttattttagctcagaattattaactttttcttttctttttgaatgtgttgaattgtttatcttatatggaaaatcattggatattgttagcaggtggatcatacttgttttcctctgttaatttcagggtcagggaatgattagctttatacacatagggaagaatgtaaatgctgctgagcttggttcgtatagtgatgtgattttggatgcatgctgccaaaatattgcttctgatgatgagatatggcatct

SEQ ID NO: 196823 - DNA, 1197 bp, Cannabis indica
cttctggctccccacctgtgccaattatgcattctccacctcgccctgtgactgttaaagatgagcaagattggaagataccaccatgtgtctcaaattggaagaactcaaaaggttacacaatcccacttgagaaacgtcttacggctgatgggagagggcttcaggaggttaagattagtgatgattttgcaaagctttctgaatcgttgtatgttgcagaacacaaggcaagagaagcagttgctttgagatcaaaagttcagaaagagatgctcatgaaggaaaaggaaaggaaggagcaggaattgcggatgttagatcaaaaagcacgttctgagagaattactacagctgctattattccaataatgcagacaagagaggaaagggaagagcggttacagagggagagaattcgcgaagagcggcacagagaaagggaaagagagagaagattggaagccgaagatacaacagttggaaagaagagtaaaatctctagagatagagatcgtgatatcagtgagaaggttgctcttggcatggcttctactaagggaactggaaggggagaggttatgtatgaccagaggctattcaaccaagaaaaaagaataatctggttttggtactgatgaccagtacaatgtgtatgacagggattgttactgcccagcctacactttcaaccctctacagacctaagaaagatattgatgctgacatgtgtggaggtggtgatgaggaggctgatccatttgggttagaccagttcttgacagaggtgaagaagggaaagaaagccatggacatggttggttctggagggacaatgaaagcaactgcaggctctgcaatgcaagatggctacaagggaggaggttcaggtagaagtcgcattgactttgaggggtttgttgaggttaaggtgccacttcacctctgcttcagtatgtgggactcaaatcaaagcacttctcaaagattatgtcttggtgtggtgtgtaacaatcaatattaattgactcactaatctttaccagacaaatattgtcaaacttgcatctcttatttttgaatcctataccattttgggaagaaaaagaatagaccaatataggatgttgaatatctttttgtagtaagataaacattaaaatatcatagaataatattgctcaatttatattgtga

SEQ ID NO: 196824 - DNA, 774 bp, Cannabis indica
gtcttacactcacatttacactagtaaggaaagaaaatagtggagggaaaggggtgatgggtagactggatggttattttttttttttaatattgtttggtgttaggagggaagaaatgaatatatatttaaaatttaatggtaaaataactaaattatttattatgtaatattataatatatattttattgttatgaaaggatttatatatatgtaataattttctataagaagatgtttggtagggaggatttatggagaggtgtagagggagaagacgattactttgtttggtaagaagaattggagaagggaggagaagaagtggagggagagtgaatccacccaaactcacaaaaattgatcatttcaatgatagaaggattgaggaagagagaataattttgatcaaatttagatatttatcgttaattaaaagttgataaaaattttgttgttaaatatatatatatatattttttatttttaaaaacatatacattgagatttatatctagttttattaaattatttataaataaattgttaattttttgttagaaaataagagaataacatttaatttttatgtagaaaaaatttactaactaatatattatcatttcataatataataaatcaaatttatatatgttttttttaacaacaaataattatatgtttgtatgtattagtgtaacaactaataaagatataaacattttgtatagtggatattgagtgatatggtaatttcataattaaaattcttt

SEQ ID NO: 196825 - DNA, 1437 bp, Cannabis indica
gctagctacaactgaaaacatactgattgtaaccaatatatattattgaataatatcttccccggaatcagcctacccaagagataaataatgacaaatattgctaagggccggccactcgtgtcaagcactacaagatgtgacataaacgtttagactattttggatttatttgttacgttgtattgtattgtattaatattattaatgcaatattatgtttggtattgacttatattaataggttgtgtaaaattataatatattttcaatataaactcgaccctaataccgacactaggagttcgggtcccgatcgggttcaggtctcgagttcgggtcacaggtctaggtctaggtccgagtcccgagttcaggttcctggatacaggagattgggattgactctaaattctttgtaaatattataatataagttaatacaaatcattttgttatatacattaaataatacaaatttatattgtattaaaattttgtatcgtaataattaatacaatacatattattttatccaaatattgtattatttaataaaattataagatccttataaaatttactaaacgtgtctaaagtcttacacattttaatttaacaaataatataaaaaaccattcaccaaaccttatggatgtcacaataatctgtccatttgggactatgcgtcatatacataattacatatggtttatttttatatttttatattttacacattatttaagtacgtactattattattgctaacttatattgtagttttctttcaaagaaatgtagactggtatttattgtgatcaccataatttccttaagaattaagaaacggtacgtatatggcatatatcgttatccatatatgtacttaattaattaatatacgtgatagttttttatatattctttttgaatatgggatagtttttatatatatattaattcttataatattgctggatcagaagttaataattaatcgatgaaataattaagtcatttttaacatgaaattattaaagtgtcaaatttgttgtacttcgtaattactacgtactctctctaactttcacaactaaaaaggtgccctcatgacttaattcgatttttagctgaaaatttactttactaattaattccaaatttttaaaagaaacatgatcattttcaacacattccaattaacaacaaagtacttaaatgggagtaatatgttaaaaaggtggctaaaaataaaaaagaagaataagacatcaacgaaaaatgtaataaagcatatatataacatgaaaaattaacagaaaaaaatacaatacaatggcaatatgagttgaattgaaactcattaaagagagattttgtggatttaagattcttttgttcttgcacatataaatgcaattaagaagaagagaa

SEQ ID NO: 196826 - DNA, 1284 bp, Cannabis indica
tttttctatatttttgtaaatatccctatcactaatcaataagagttggcctgcaaagaagcactaatacaattgtagtagcgagaccgccaaacaaaataataatctaaaaaaagagttagttttaccaaagagtgagtcacactattagtaatcctaggactacaagagaaagaaaattactaaattagttacaatataactaaagatatctctaacaatacatcctcaataagagtgttcaacgaaataatttctaagagcactaatatcattgaggctatctaactccacaacatgataatagccaagacgagtgcagagcctaatattagagaaaatgaccatagctccaaccattattgtagttatcatactaactaaaggacaagtgatcatggccaacaccaaacgtgccgaaagccctcaaaaccatacctaaactagctttagcctttgaaatgtcaaaaccagcatcacaattcactttaatacatccatctggaggcttctcccacctatgacttataattggcctagagccactagtacctttataatcacacatgttatttggtattctggatagctaacttgtgtgccttcatgggtccaaaccaagtcgtgggctcattcattaggcccaaacaatccaatgggtcaacccataagcagagtcggactacggctttgagtttaactatatccctagagaaagttggtcctttttggtcatggaaggattaatgtcattcaaagatatgaagactcaaagaaatgcaatcggatacctttaggggtaatctctaaagagtagtcgaggaggcgtttgagatcaatcctacgtggcacctctctgacattgaattccacataattaggggtttacccttgtgtctaagctgggaaaggcacacaacacaaaaagcaacctatcttttgtccaacatccattattctaacatttactgtgtacggtcagcaacgcatggccacatgtaaacatcaggttgtatgaccttgtacaaacaaaggaaaaccctccaattgggcatgatatacctaaccaaaagtcaatattaaaatgtattttatcccatcaatttgcttattttaacatgcaaattgtaatgggtctgggctcacctgagaacctaacttccacctataaataggatttatcccttcatgtaaagggttatgatttttggctagacactataaaaatttggcaagaatattgactcgtggactacgactcgttaacactccaaccatgtaaaa

SEQ ID NO: 196827 - DNA, 732 bp, Cannabis indica
aatgtgggtggcctcccaaagaccggcatgagaatcggttccctcaacaaagacctaaagaatgcaatccttatgaagatggatccaaaaggctcactctcaccactgccaaatacaaccacaaccagacatttcatgctaactcatcaagcaacgacaacaataatgactactaatattgcacccaaaacagaaccagcactagacagatttttatcaaacgacaacaatattttatcaaacgacatctcatcagtcgatcttctttcccagctccaagccataaagttggtcagtactgaagcttcaaactacaaacccaataattatgaatcttcattattgccttgtttctacccagaaccaacattttcttcaccctcatcatcatcttcatccagtacccaagagatgccacctctaccaggtgtagccagcttcaattggaatgactttcttcttgaagatgcatttttaccaaatgatcaagctcaagaacatgagacatcaatggctgagttgatgaattattcttcttcacagaatgatctaagccaaaatcagagtgaaggatctaaagatatggataatacttcatttgtggaagccttgctagctcgagagaacgagatgttgcttgatgagtttcctgagtttttagctgaatcgttgtactagctagctagtaaaagtttttatttttcatgcagtttttttaaaagaaaaaaaaaa

SEQ ID NO: 196828 - DNA, 1146 bp, Cannabis indica
aataataataataataaatactttggtggttttggtatgtctcccacagatttattgacaggcagaaatccgtgaaaataattgttttgtttggaataatatgaattgaatcttatatatttaaaaaaaaaatgaaaaatgaagtatttttttattttaattattaatatttttattatataataataaaaattggagataatgggtatctgaaactaaatgaatagtcaagagatttagatagactagattgaatactgcctaactgcatatttgtcattgtattcaaatatagggaacactatttctaattttgcaggctaattataatattaattaatacacagaaaaatataccaatttattgttattattattattattataacaaataatgaataattaagttattgtagtctcactgaattacatgatttcttcttctattttctttttatttattctaatgatatgaaattttgatggagtgaaaacacattaaaaattaaaatatggagttttcttaattaggtagctaatttattaattttttattttcttttactaattgttgacgtgatttttaatcaaccgacgcagagtcgtaataaatgagatttaaattaaaatcgtaataataaatgtaattaatgatatcgaaatttgcaataaatataatgaaagacagcgaaatttaaagagttgtaattagtaatagcctactctctttatattttattgatgagagttacaaaagtcaataacaggttcctaaatgcaaagaataacagagtgtttttttttcttctttaagtgctcaaaattgcggattcccttcccaggctatagggaaaaaggtcgatgcttttcacttcaggagatgcgaccaatgcggagctatctcaactgtctccttgatttttcggaggtagttgaaatctgatttttatgataatatcctgttatttttcgtgggtttataactatctttgagcttcttgtgggatttgaacatttgataactagtcgttggcgatgagggtctcctaaggtgtgacacggtcgttgaccaccttcgggaatagaagctaacacttgggggtgacacccctgagacccaacctgagggggcgtcaattgtcatct

SEQ ID NO: 196829 - DNA, 877 bp, Cannabis indica
ttattttcagttccacatgcgtaaaaccggttccctccaagaaaattgataggcaagatctatgaaacttggtgagttacaagtgactaagagatcgtaagtttgcttgctcatttgggggaaacccacaccatacaagcatcgagcaagcacaataaacttaagcagagaaatttaaagcttagtataagcaaaaaattgaaagctaagtaagtacatgcatacttcaattagacataaaaaaaactaaatccaaatacttacatgtctagcaaaagaagaaatccatgattaaataccgcatgatcggtcatatgtccaaaataaaagaccctcagaccaaatataagtagtgttcaaaagtaaagggccaacatgccatacaagaacatgaaactaatgtggaatataagcataagcataagatactaataaaagtgtctaatcgtgtgtaggtgtaggggagtcgagctgtgagctacagcatcctgatctccaagaagctggtcagccatagcctctatagactagccagccataggatcagcaacctgaccggccacctcatccaaggcctggcttgccatatcctcatcaaagtgacgagatgatgttccctcagtttggccgacagtttggcctgccccctggctggcctggtctaccaatatcatgctctcatagagctccttcccctgagcgagtgatctcttgcagaaaggagaccctatgtacctgaggttgacattggggttgtgcaagtacacctcgtacaagacctcagaggataagcccaaacacttgtccttgatggcttggtctccatcaagggccaattacttttcccgacgctcgttctcaagctccatctccaacc

SEQ ID NO: 196830 - DNA, 918 bp, Cannabis indica
ttcctcaaacacaccaaatctccatcctcaataatagtagcggccgccggattttgaatccgattatcacgatcagcatcatcatcatccaccttcaacctcttcactcccaactcaaaaattctatccaaaacaccaacagaattctcccattcaccgctggaagctctcaaatcgtcaattttatcctcgctcttccttagaaattcagctcgcttttcaaaactctcactctcactctcacctaaaccatcattctctctctccttagtaccaatgctctccaaatcaaaattcctcctcatatactccgagacccgatcgatcaagagctgaaccaacaacaaaaactcggctcgcaaacgcaatgactcgggatcgaagctccaaacagatgtcgcattatcaaactgtaagagctcgagagtggccaagaacgtaagtagcgacggagacgggcaagacgaagaccatagaacgttttcaaaacgtccagagtgagaaactatcgtctgaagcacggcaagagcaagctctggatttcggtctctgagcgcgatgattactgccctgagaggctcgaattgggcaagatggatgtggttggcggcaaggcgagagaggatttcagtttctttgtccattaagcagcgaaaggaagacgatatgccaagggttatggatttcgaaacatggagaaattggtttttcttggtgattggtaatctaatggtgtcttgacttggattgatgatcggttggtctgtttggctgtcgagaaaatattaatgagtagaaataacggtttgtaaaaatattaaggtgtctttcggttcgagataatgaaaggtaactgtatgtataatatatgctaattacgattttattctacaaagttaacattaacataaatcatgc

SEQ ID NO: 196831 - DNA, 995 bp, Cannabis indica
acatatataaaacgtgggtgaagttccaaaaaaaaacctttttgacggccaagcttggagaagatagagctggatttccattcaatctctcgaacacagccaaatctcttagtctctcacgctgcgttctttccccctctgcgcttaaatatacatataaatatatacatataaaggtagtcgcttttgaaaaaataaaagaaaaaaaaggagaaggagaagacgaagccaagtggaattggtgatcgagaaggcacctggacacatgaaagggcaagttccaacaatggtgggaagatcggaaaggtcatttggattatgtggtccttgtggagcggagtatctaggtctgcttcggccatggcgagtgttatcgtgggtattgggaccagatttaggggtagacggaacgagattggaggatttggaggcagtgaagcgggaactgttcgaagaagaagaagaagggtttcgacgttggaagttcctactcctgtccatcactgacagaacagaaccccctctctctctctatgccacgtaatcggccaggttaatgcttaatgccggcaaaatgagtcacactactcaaaaacgcccacgaaataaacacaaatcttcgggagatattggcagctaaatcacttgaaatttaattgggatttttttacttttacatttcaaaataatttttttgtttgtattttaactgaattctacataagaatctttattgcgctgcaacctaagtagcaacaaaaaaatcatatagaaacctagcgttgtaactacttcagaaactcaaactgaaaaaaaaattaaaaaaatagtatacggggtaattccttattttttaatacttcactacaaaaatcaatttttcagggcaaaactacctaaactcttattctgttttactatatacccctccgtccaaaaagcacagttaagtgccacggtgaataatccaattgtatacacttgtacacgtgaca

SEQ ID NO: 196832 - DNA, 962 bp, Cannabis indica
gtctacattgctctcaatgaagtgttacaagtatgattttctaacccctttctatatctaaaggagggatatttatagctttaaaggcctaaggtatatggtggtcctaaggggacaatgtgtcactttgaacctgcaagctgcaggtgcaggaggtggccttgcacctcatatccttgtctggtgtcaggtgctcccaggctatagggatagtggctattgtgtacccttggtcgggtctttagaacttctagaaggcatggtcgtactcttcttgcgtgcttattctgtccttgtgttcatattcttgtcactttactcccctcttgctagagaagactacaccaaatcccgaattgtcatgactaaatgactttgtaggagtcttggccaagtgacttctcgaggagctttgcttagtgacttcttcaggagcttggccaagtgacttctttaggagcttggtcaagtgacttattgaagagcttggccgagtgacttcttgaagagcttggttgagtgacttcttgaggagctgggtcgagtgacttcttgaagagcttggccgagtgacttctcaaagagcttggctgaatgacttctcaaggatcttggctgagtgacttcttgaaaagtttggtcgagtgacttctcgaggaacttggctgagtgacttctcaacagtcttatccaagtgacttctcgaggaacttagtcgagtgacttcctaaaagtcttggttgagtgacttctcaaagagcttggtcgagtgacttcttggggaacttgactaagtgacttctcgagagtcttggcctagtgacttctcgaggaacttggctaagtgacttctaaagagtcttggctgagtgacttctctagggacttggccgagtgacttctcaagagtcttggccgaggtgacgttcttgagaaacttggccaagtgactctcgagagtc

SEQ ID NO: 196833 - DNA, 1485 bp, Cannabis indica
caattgctaataatttataaagtattattttatgataatgtttttttttttgaaagagttattttatgataatgttaaacacccctaatagaaatactcatcaattatgtgtatgtgtgttatatatgatgaagcttattctctattataactttctatacttttgatgtgtacacgtgtcaaggttgatatacatctatataatgtttttcaaagtttcgtagccaaataggtttaccaaataccaactcttctagaccaagcaaagattccattatttgacccttctaactaacaaattatattaattgatttcaataatatttagaaaggtggacaaatcaaagaatatcttaagtaaaatctttcgccaaatggtacaaaagaaataaaaaaaaaaaaaaaaaaacttctcactcaacattaggaatgaaaattgcacggtcccgggtacatatccttagtgtggtaaaaatttcttgcttaaatggaaaatagagtgggtatgagaacaattttctgtctctaaatattaaacgaagtgagaatagaatagcactctgttcgacggaactcgtttaattattttataatattattttaaattattatacatatacatttacgtgtttttgtagtttattttagtaaatttttaatattttcatttcactttaaataacattgtgtattttaaattatgactcattaatatgtatactattttaaattttatgtaatttgcctttttttttattcataattttatttatttttaaataaatgggttactcgtaggttattatttgtcccagtaggaatttctcgccccacctacaatagaaaatgtgcagtgatggagggggaaatgagtattaaaataattaacgaagacgagaaagtattcacacttatttttttttgaaagaactatttgttcattaattaataaaaaggacggaatcacagggggaataccctccccttgatacaaaacagccgaatcgctagcacgtctagcatttttggctacaccatccgcaaaagcgtttagagaacgattaataaaatgaaaattacatactaccagttttttagaggcattaataatagaaaaaaacacattcgaaactctccaatccgggctactgtctgcagaacataaggcttgtacagccactttcgaatctgataaaatgagcacctctccccatcctgactccaatgcccaattgagagcaagaagcattgcttttaattccccttccaaggctgaactcgcatcaatctgctgagacttaacccaccagcatccagactccaaaattaacgctaataactgctattccagcttctcccttcacccaggaagcgtccgtgaacaagatttggctaacctgtttggatgcaggaagctggattgcatcgcacctcctggtttgaactgtgctgatatccctttcaatctccttcctgcacatactg

SEQ ID NO: 196834 - DNA, 956 bp, Cannabis indica
aaatgttgaattgaattaagagttagtaagcttcagggagaaataattggttttcttttctcaaaacaaaaagtgaggagaaaaagaaagaactctccgtgttatattaagagttagttccacattactaatgtgtggaaataaattgtgatatataagatgaatgagctactccttccataaccaattgattttaagatggaaccccattcatcttattctccaaattctaacatgttatgatattttaaggtctgattttattggtattatctccggataagatgtctctcacctctcgcattctgtaggcacgtaattctcttattgttttattccatgtcagatttgtgatgttctcaccacttctgggttgaattgttcttctttgtattcacagtgatcatactacaatcaatatttgaaagctgaaggtgatcgtgtttgttctcttcaataaaaagtttctcatccttacattttccttttttgtgtgtatatttattgtagttgcatatataatgtgataaaatgattatgtgaatgattagtttacaagtgtacaactttgtttgtttttgcataatttaaaggaatactccatgttttaaagtgaatgcaattttgtttgtttttgcataatgtaagggatatggttgattgaattttattttgaattttccgcatgttaaattattttaaatttttaaaagaaaatttctggaaattaaaaatgtaaaaggagtatataggtacacgtacacccattatagaatttccctagaataaataatttcatgaatcactacagtgaaaatttctttcaactataccacattccattccaatttcttgaggttagctcaagtagccataagaaggtgcgtgtgtgttagaggtcctagttcgagttccaaattttacattatgtcggtaatatatgaacgcttaaatca

SEQ ID NO: 196835 - DNA, 1025 bp, Cannabis indica
tttttttaaaagcatgtttaaatctacctaaaaaagaacacgcttaaataatcttgcgtggcctaaatttgattgacaattgatttggttgaatgcaatgaaaactgaaaataataattagtattttaaaaagaagaaactaacacaaaaacaaagaagtcaaagtttatatctttatagctataaaggccaagtaagtaggtatattgtattatttgtatattaatttatatataagctagaatagaaagatccccattatggggtttgaatatgtgatcgagactagtccaactttgtctttctatatctaacacagattttgattctattacactcaaaccacaaaatgtatacatatttgtatatatatttttgactgattcaacttccaacccaatggaatttaagacagtaataatttagtaaccgatggatatatatatcataacatgtttttctaggccaagctaatggaatggaagactcttcttcttaccccttccaaagaggacaactttaatatttatttctaattccatcccagaaatccaggttaacccttcaacaccttatattttgcttttttgggtttatggccatattacattatgctaaatttatcaccacatttgataggtataagatcatctctaatctatcggcaaaatgttatatataatgtgattttttttacataatgctctaaccaattgcaaaatttatgtttcactaataatagaggggactgtaaattatgatattttttaactttttattaattaaataatacattgagttagaattagaaaaaatttaatgataacatatttaaataaaacaatataattataagaaaatttagtgacttttttattttatacgcttgttaaatagatagtttaaatattgatttctacattgtaaattattctaaatttctcaaaattttgcagaatgtcataaataactataacgtacatgactatgaaaaatttagaataaaaaattcttatagataccga

SEQ ID NO: 196836 - DNA, 967 bp, Cannabis indica
ggttcatagaaatgtttctatcatatttaactctgataatgttttatcgatattatacccttcctcatccattctcgactctctgacgagtatacagtgactaatgctctcgtcaacagtaccactcgataacgagagtataaaactcactacaagaaatgtcacttttgccagcacatttttgtgctggtaaaagttagtattgtgctggtaaaatagaatttacttgtgctgtgttggcaaaagggggttggcaaatcaatgttggtattagaacttttaccagcataaaatgcaaagcgctagcaaagatgacttttcccagcacataaatgcgctggtaaaagttagattttagccactgcaaatgtacgttggtaaaactttaacctctttgccagtgcagtttgcaaaatgcgctggtaaaagttacatttcttgtagtgactaatccacaggtagtgacagacctaaatcaaaagcaacgagggggtttgggaatcttgaatgattggtgtgtaagcaaattaaatatgtggaaaccatctctttttccatttattagtaataattcattaaaagtggactcaattttgttgatttttgcagatcgatgtaaatttttttgttgttattatgaggtaagaatcatccttatgtaattttatcaaactgaatacaagacttgtcggttgttgcatatgatgacgagttactatgcacttgaaatattgagagtgaatcaaatcccaccaacacttacaaaccatcccacacttggctatgcttttcgagtcagggggtttggaatcttgaatgattggtgtgtaagcaaattaaatatgtagaaaccatctctttttccatttattagtaaaaattcattaaaagtggactcaattttgttgatttttgcagatcgatgtaaattattttgttgttattatgaggtaagaatcatccttat

SEQ ID NO: 196837 - DNA, 786 bp, Cannabis indica
ttttacagcttttcatgtccccaaaagcttggtttgcatacataaacaaaaagcaacagtttaaaggggggcttatttctgcctttttctttcggcaaaaagatgacccccttgaaccatttttcacattttcttttgtgttatttgttgaagataacagatcactattgtccttcattttattttatttgtatggctttttcgaagttgtctttttgtttttgacaaattaaattccccatatgtacgtgtctgcatattctagtgtcgtgtaacgcttgacaggttcagacaagatgaatcttgaacatggctgccctacccttgttaaactttccagagtttcaaaaccatttctcatcctttgatctaattcaattatagcttaatattcttggcttttattgttacttggtctttacttaaacaagaaaatcaagtacatgagtcttcttgttaaataaaaggcaaaaacttttgtcttcagtacctagtttaataagataacagtcagaaattccagtcgtgggcttttgggtccaccccatgtactatttgcagcaataatgaaatttgaagggaattacaatttttttttaatgcagtttatttaacttggatgctatagtccaaaaaaagttgatgcataaagtacactgcaaaagattaaagcagtagtgtacaatttacctccatacatatgtatactatattttatattttatatgtgaggtgtcttcaatacagatcttaaaacctctggcaggggcgctaggcccgggcgct

SEQ ID NO: 196838 - DNA, 2100 bp, Cannabis indica
ttttgtcttgaacgaaacaggggcaggcctagatacttaatacacccttcaggcgagtcaatccccaaccggtccttgatgtctttcctcatgttgggcggggtattgttgctaaaaaaaatagacgtttttaacttgttaacttgctgaccagaccacagacagaacttttcaagacacctccagaaaccatcaacctcattgaagttggctctacccatcaatattaaatcatccgcaaagaaaatgtgggataaagatggaccacccctactaagctttattccctgaatactaccctgagccagggcgtcatgaaggagtctcaaaagcacttccgctgcccagatgaacagatagggcgaaagagggtcaccctgacgaagaccacaagacggggttattttcccaacctgacccataaagccccttagttatgtgtgggatatttttttacaaattcatattcaaatgcttcaatccaatttgaaaaggggggtgtcttattagatcactcaaaataaataatgcattactatgaacccaacaaaaaggaggaaacatatgttggattcccaatattggacgtggaggctggctccttgtaaatgtcaactagagggtgtaaaatttatgcttattttgtattaattttgacacattttgcattagaatctattcataattttatcgaaagaataatgctaaaagatgctaatagggtctaaaatctttttaagtgttatatcactattaatataattatatattagatcttatataaattaattaaataaattttaaaaaatattgctaattaattgtaaagtgtcatttctaaataatactcaataataatgttcttattaaaataggttaaaaaatggcaatatattatttttatagtgttctattaaagatgttcttaaaactataaccgctactaaaagagttataacttttgatttaattatttttttttttaactttatgagagaattagtcaaactactttggccagtttgcatgattgatcgtattatttccttttattttcgtttgaataatagggttgttattgtttaatattttgggggaagttttttggttgataatcattgatagatttgttttgtctttggttcatttaggtttggaaacttagtcattctacacattttttttgtatacttcaaagttggtgaacttaattgtcattttgtttgaagatattgttaggatttctttcttgattattgtaaacgatttggttagcttattattattgagtctgctctttgagtaatatcatcatgtaatggactttatcttatttacctattaatagatatttctattttcttttcaaatatatatagtgagatgcatcctcatgcatttgcttataaatggatacatgaatatacacggagaagaaaaaagatgaaggaactccaatattatttgagtttttatttttatggtaaaaatttataaaatatgatttttttttttttaaaaaaaagtatttcatgaaaaaaaaattaaatatatacataaaaaaaaaataagtcctcgttatcttaaggaggtatctagttatctagttagcctaaaacgtcactagttacactaaattatttttctcatattttttaacttttttggcaaaaacttttaccatattattttattggtataaaagccatatttttacacattatataaacttcattcatttccacacattatttttcatatctatctaatttttgttagaaaattataataaatgacccaaaaatacattattatgtaagtaaatatctttattttaaaatttacacagaaatgctcttttcacattctttattacttaaattatcttttatcacataaaatttgtatggttctaacatttttaattatatattaaatttatatttttaaaaaatatttagaagcatatcacttagatatcatggtatatctatattagttttcttaaaattatttttgtattaaagttatgttttttttttatggattattgtgggttattagtatacatattttgttatacaatataattttttttta

SEQ ID NO: 196839 - DNA, 3388 bp, Cannabis indica
cttatgcttatgctttgcattatttcttaatggagacgaggatagaattatatagaaattaagactttatattaaaaaaattacacagcgaattcccacctcaccttagtaggagcgaatccacacgagtcctcgatcccatgagaaaactgtaggtatcttttctcgctctctttttctcactctctattaaaatgtctatttgaacactatttcatacacacatttaattatgctctcataaaggtgaatgcataataatgtaacatttgaagacacaaattaagtttttgtttggcataaatacatacgaggacttctattttctattgtgttttcttttgagttcaatcccacatgccatgaatggctccaagaacaatatgagaacactaacaactcacaaaacataagcgcacatacacacaagataaaacctttttgatgaaattatatctttattatattgagtatttacaatgatgaatcaactactttacagttaagaggtcagagatatttataggctaaatgcctctactaacagaatacttacatactcgagttaagactcgagttaagacttgggacttaacagacttaactgttgaacctgttaacaactaactacctaactaattgactaaagacataaggacacatgtataaaatctagacatacagatttaacgattctccaccttattaactagtgttcctagggctctctttctggttagctcataaatctgctcaccaaacttaccccatagtataagtctggcctagtgcacaccatcaaatacatgatgcttccaactatgctagtgtagggtatgtttttcgtataactgaggtcttcatctattgttggagtttgacttttggtgagtttaaatgtcggtgtgagattggtttcacattgttgaaaccaaatctttagaatcttggagatgtatccactctgagccagtttaattcttctcagctttatgtctctaatgatttcaatccccaaaattttctttgctggtccaaggtctttcatttcaaatttttgttcaaaaccttctttacattgtttatctcttccatattcttagttgcaataagcatgacatctacatatagaagaagatacacaactactttagagctatttacatagacacaattgtcataggcacttctcttaaagccaaattttagaacaaagtcatcaaatctcttgtaccattgccttggactttgcttgagtccataaagtgatctcttaagtgagcacacatggtcctcctttcccttgaactcaaagcatttaggttgtttcatatagatcggttcttcaagatctcaatgaagaaaagttatttttacatccaactgttctaactttaggtcttcagttgcaactatgatgagcagtagccttattgaggtatgtttcactacaggggagagaatttcattataatcaattccttccctttgtgtgaaatctcttgccaccaatatggccttgaatctaggcttttcaacacctagaattccttcctcatatttgtaaatccatttgcagcttataaaatcttgcttcaagtaggccttatcactagaatccaggtaccattcttctttagagacaccgcttcctgactcatagcattatcccattcattttgatcttctgataaaattgcttcttcataagactttgcctcctcatagtgatcaataccaacaatgttcaaggcatagtgaaccacatctacaaaactaaatctgtatggtggtcttatggttcttttttctctatctcttgccaaaagatcatcctcagtctcattatcaccttcttgcactttctcaacttcattctcatcttccattccaacttttggttctacatcagtacctgcatttccattatcctctttgtccaaatccacctcaaactgaattttctccgttggtttcttaatggatgtgatgagcttttctcctcaagcattaagatccttatacaatgtcatctcatcaaaagtcacatctctactgaccacattcttctaatcttcaatgttccacacaacttgttaacctttcacccttttcagggtaccctagaaagatacatatttttgccctaggctcaagtttatattgccttatatgagcataggcaagacaaccaaaaaccctcaagtgatcatagctagctgagactcctgcccatacctccattggagttttaaagtcaatagcaaaggaagggcatttgttaatcaaataacaagctgtaacaacagcttcacccaaaattattttggtagtcttgagtagatgagcgtgcatcttaccctttctagaattgttttgttcattctctcagcaaggccatttccatgggggtttctaggaacatacttgtgcctatcaattccaagtttcttggaataatcactaaactggtctgcacaaaactccaaaccattgtccgttctcaacttctttatcttcctttcaatttgagtttcaagcatggtttttcgttccttaacttactgaaggcaccattaatcttgttctttaaaaatatagtcccacacaagcctagaaaagtcatgatctatgaaggtgagaaaacacctggctccacctcttgaaagtgttctagatgatccccataaatctgcgtgtagatagtctaaaatagatttggatttgtgtttatctctaacctaagtttcaccttggttgctttgccaagaacacactactcacaaagtcttataggattgacatgaatctgtccaagaatacctttcttgcctagtatcttcaaaccaccataactgacatgacgaagccttctatttcatactaaggtctgatcctctccatcagttgcaagaacattagcttgacttttctttgtggtcccttgtaagacatagatatcattaacaatcttgccttgtatgataattaaagaacctttcatagccttcaaagtgccattttcaatgttgacattgaaatcttcttggtctaatatggagagagaaattaattttctcttaatatcttgtacatgcctgacctatttcaactcaacaattttgccatcttccggttccaacttgactatcgcaataccagcaattgtgcaagctctattgtctcccagtttgacagttccactttgaacatttctatattcaatgaaatgttctttgacagggcagatgtgaaatgaacatccaaaatctatgatccagttcacttctgacttgttctttgagatggctaacatacggacactatcatagccatctctgtcttctacatctaaaacaatgcctgcatttccatattaatttcttga

SEQ ID NO: 196840 - DNA, 1339 bp, Cannabis indica
tatcattattataatagaatcttcattaacaacttacaatattttagaatttatttccagtctacttgttaagaactggattactgacttgaccatcggagtccctttagctggcaccatcccggtgtcccaaagactttacggtctacttcccttttgttgtgtgcaggttgttggtgcccactttcgactaattcattatagatccatatgtctacaatcttgcgcccaccgtggggccctaacaaacaatctaacaacaaagttaggcattcaacaatggaaaatatagaggaatgggagatcgacatcaacactcaagttgctcaactcatgactcaaatgcgagagaatgttgagcgagtctaagcgcttgaagaggataatcaaaccttccgtaaggaaaacaagatgttgaaagagaagttggagtcaatgtcaacgaacatggccactccactcgaccaaagtcacagttcagagttccaatcaacccaaccaatcaatggaattgactccaatgaatgtgacccaaacaaccgtattcccataatcgacaatggtaggctcaatgagtcagcacggaggaagttaaccaattggagaacatcatgcgtcgactagagttcctatgaccaacagtagcactccattcgacattccatctcaaaccaatggagttaacccacctgtacctccagctacaacaaatatgacgtctggttttatgcagagtggtacaccagtcgacaacaagaaggtgtcactctcccgatgtaaattgacacaaactttgctgatatgttcaaccttctgggtcaacctcaccagtatatggggggagtatgtcctatatcaattgcaattgattcatttctaactacttcaataattgcagggaaaataatgccacatgagaacacttttgacttagggttagcacgtaggatggcggagatggaggccctgatccatcgcatccccagagtgccaacaccaatcaaaaagagtttacccaacaactttactcactctcccttcttggatgtagttgccctagtagagatgtcgcggaagttcaattttccaaccatgaaacaatttgatggaacgactgatcctaacgatcacatcgcacaatataaataaagaatgttcacgacggcaattcctcgtgacttgcatgaagcttgcatgtgtaaagggtttgggtccagctttgtcagcctaaccctatagtggtacattgatttacaaaataactcaatatcttcatttgcacaactaattgatgtgtttgttgaacaatttgctaacagcaagaaactcgagaaacttt

SEQ ID NO: 196841 - DNA, 664 bp, Cannabis indica
ataaattcctccactttctcaaattcctccaatacagtcaatttctccaattctttctccaacaaatattctcgattatgcccttctcgaattgatgaagaaatgaggtctcgattgatttttcgtttctccaattccttgttcaacaaactttctgtttccttaactgagaaattattgagctcttgtttctcaatttgcatcaattttgtttttaatatttttctttgttttttatagtgatgcctcaaacatttctgaatcaccattttaagtggtaattaatatctttgctcctccaattccttccctttctccaatccctttttcaaagttggcatttcttcaagtgataataaattactgcttctcgaatccaaataacactttccaagaatcaaaatgaaacagtacaaaccagaaccaaacaagtacaaaaagttgggatctttactcaacaagactatttcaatagaagtgtccattgtcaattgaataagaaaactcaacatacaaaatctcaacacctctttctctttctctgtctctgtctcatatggccttaggatcaacccaagtagagaaaatgatccaactgtgaacacatcaaatatattatgtctcttcccctttttaactcctattgcggagagtcaaattgaaa

SEQ ID NO: 196842 - DNA, 801 bp, Cannabis indica
caacaacacaactcaacttagatacagtacaactcaacttagatttgtcttaaattaagttctcaagtccgaagttcaaataatataaagtgcttttataatacacctctaaaaataaatgtatttatgtgatagtgtataaatatttaggacattttagaaatttttaaaaaattcagaataatttatagtacaaaaggtcaaacagattgtatcactttatgctctattagggtttttataacacttgttgtcgtcgtttcctattccaaccaaggcttgccgtccgtccatggccttaggcgtggccgtggtcagggcctgattcatttctccaccatatctggcttatgtgccttgtttatcctcacttcatcgatttttcttttctttttctctagtggtttcttctttgggtgtgaggtgtcggatctgtcggtgctttgcttagctggtggttgtaattttttcttcgactgtatttgatctagggatgttcataatacccaattcaatcaaattcgcacgatccaattcaatctatttaccaaattttttgaaaactgattataaaataattaagcttaagaaaaaataaattgaagaagaagaaaattaagattttatgtggttgtggcattaatgagtcttagtctacgagtcaatattattgagctagaaaaacttcaagatatttttacccaaacgtttttgtcctagctggagaaccctaattcttagctcttagttgcagaaagatgatttttccaccaatccctttgcacgaagggatcatgttct

SEQ ID NO: 196843 - DNA, 846 bp, Cannabis indica
taactaagtatacgtacaatgcaagtaacaataactaaaatatataaggctaattaaaatttttgccataaactttaacatgtaccaaattatgctccctgaacttttctagctgttgaaaattccttatgaactattgagattcttgaatttaaagacttttgtccaatttcatttaattttactagttctgtaattgttcatatactaaatcatgctccccagattttgatatctccaaatcatgttcctcgaactttgacatgtactaaatcatattttttgaactttcatctttgctagacttttcatactaaaattgaataaaaattcttaaatcaatctcaatagtgaaatttttaatgaccttaaaagttcagaaaacatgatttggtacacgtcaaagtttatggaaaaaaaatcacaattagcctatatataaagatgcttataactcatatgcctagtaacaatgtttttaatcttcttagagcatctccaatagtaacattttttaaaggtactaaaaatctctatatcatctaaaagtataatattttattttatctcttttctacattatctttaacacacttaattctaaaaacactctaatgatataacatatttcaaaaatgctataattataatctcacatattattatttaatatataatttattttaatcataaatattatcgcactaattatttacttttatttttttaaaaaaaagatagcattaatgtcatgtagtgaaacgaacacaattttctacgataacacctatttagagcatttccaatagtagtattctctaagaatactaaaaatttacacatcat

SEQ ID NO: 196844 - DNA, 1805 bp, Cannabis indica
gatccaataaatctcaagaccgaccttttctcgagttacttggcagtacaaaattagttgagattgttacaaagttgttgttcgacaattttacaataattctaactaattttgtgttactattacgagtctcgagatggagctcgtgatatgtaacaatgcacttttgtaatagaaagaaatcaagtattttttttatttttatttatgacagagtaccagagattgtgttttggcatataccaagtgaagcatatgagaaagtagctccaatgggtgtgatacaaaaaccttgtgtgggttcaattaatgaagagaaagtggctcctcaacaagttgaaactggtatcatgaaacttcttcttcaaaggccatctgtcaaggtcacattaaactttctcaattattatatgattttttattttatatttttgtcagtaaactatttttttcaaaaaatataaatttaatgacgtggaccaatcaagaattgttacataagtttcagaaatataagtatttatgccttaaattactctttacaggaaaataaactctaaaatgtcttggtatatttttaataattttttctagattccatattaatgttgttgtttatacatgatgacaggcaatattttcaggacacaaccatggtttggattggtgttgtccctatagcaaactatggctttgttttgctaggcatagtggttatggtgggtatggaggtgagtgggaaaaagggtcaagaatattacaaatcactcaacatcctttctctataaaatcttggattagaatggaagatggtcatgtccatagtcaacttcttctctttaatgtctcttctacttagatcaatctaatgagatgtacaactacatagtgtattatttatcataatgtgttacactatgggcttattatttgtaatttataatttgtgtgtaaagcttataaattaggtcaagtagaagaaaaaccacgtgtaggggcttaattgtcacatttccaaatctatggaccaatttgctaaaccaagtataatgcaggggttcaaatgttaaaaactcaattgtcaagaaggaatatattatatatgtactatttattattcaaatattaataaagaagtcatcgatattttcaatatttcactcaagtccaaaaatttggaccaatctgcaattacacaaattcaagtgaacaacaccaacaacaacagagccctcattcttcttgttctacttcgatgaagaagttgagaaatctttcaccaatagtaataattttattacattacacgtgtctctgtcttaacattcagttaatctccaccgttgaaatagatgacggaactaacaagatcgagagtcaccattatgaacggtcaggatggacggtgagtctccggatgaaagaggagaaatgggaagagttagggcggcggagtgcagcgtttaagattgctttgtttgcagatcttcattttggtgagaacgcgtggagcgattggggccctaaacaagatgagaactcaattagagtcatgtctaatgtgcttgactatgaaaccccaggtcattttatcaaacttttcttttttttttttcatgtcttttggttaggatgatttatgagcttcatgaaatattttcaaaagtaacatactagctaccaactagaattttagacaatgatagctatttaattgtttttaaaataaaaaattgaagttaaaaaattattgtagctaaaaattagaataaaataatagcgactaggatcaataattaatagta

SEQ ID NO: 196845 - DNA, 720 bp, Cannabis indica
gaagacgttctctgtaattttcaaatttttttcatttttcgagtcggtccgatataggctcgatataagtttgataggaggttccaaaatttaagattttgagattgatggagaaggtccaatataggttcgatggttgtctgatgcatcataacttattggtgagcgtatttcctattcgatcggggtccgatactgttcgaatggggtcgtctggacttcatcggaccccatcagacacgaaatacatccaccaattagctactatgcatcaaactaccatcaaatctatattgaaccactattggaccttcaccgtcaacctcaaaacttaaattttagaacctcttatcgaagctatatcggacactatcggaccgactcgtaaagacagaaaaaatcaaaaaattacagagaatgtcttcgttcgtgttttctccgtcatggtctgcatttgcagtccctgttagtggcaatagcctcttcattcgcggttgaggaagggattggcaaggtctaggtcaaattgaaatgaagtcctctagatcagtcggattggtgcggtctcagtcgaatggttgtagtggtcgcggtcttggatcctttagtggattttcatgtgtattttagtgagaaccaaaagggaaaaatagaaaacgagcaagaagaaaatatagagatgttaaaaagtttgagatgaaaaaaattaacctattgtgt

SEQ ID NO: 196846 - DNA, 1180 bp, Cannabis indica
gtctaaggatccctttctccttctgttgttgaggcattggctattctccatggtctttgtctctattttacacttgagtacaaagaggtggaagttgaaattgattgtcaacgtgtggctctcttactttaatagaaaagccttaagttttgctgaatctattttggtgctttagaatattttaatatttatttgcatgtttctattataaagtttatgttttgtaatggttcaacaaattatttagctcataatcttgctaaactgactttgtcgctagatgaggcaaagagtgtagtaactggggttaccgatcttataaggcattgactttaattggtattttagtcttagtgaaagtttcattccattcataaaaaaaaaaaaaaaaaaaaggttaaaaaatagattagtaaaagatttcatatttgttttatgagggacagataactttacataatgttgatttcaaaccaacaaaaacttctattttttttttaataatgatgatatattactttgttattggaaaaatatagaaactttatttaagcgaaataagtaactataaaaacattaagaatatgaaatagataagatttaattaaatatttaaagcaatatatatataaatttatatagacttattaaaaactaatgccatgtttatttaaagggaataagaatcaatgatatggtattgattctcatacaattatttactaagtattagaaagggagaaagtagtgcgccccacacaaattaaggaaaaataaaagaaaatgttctccccctatttttataagtaatatatttttctttcttagcttaatttattttaattttaattttattaattaaaaataaaaaagacaaatatgttctttaaaaaatctataaacagaaaataattacatgttttaataatgatgtttagtaaacaacatgataaatattattttaaattatttttttattttaaactaatttatttctctcatttattattttgattttagttacaattttgataaatgcgccataagaacaaaactttatattacaatttttaaatattatatatttatcattttaaaatattgtctagaacctaaatttgttagatcttaattttttgaattgacaatagataaaaaaaaaaaaaaattaatttagtac

SEQ ID NO: 196847 - DNA, 860 bp, Cannabis indica
cttttttgtaaaagatacatttatttataaaatactagacctcacagttgttacaccaaatattcataggaatactagcaacatcaagacgtttataatagttgaaataaaaattacatctaatcacattatgaaccataaaattacaagttactaatatttgtcgataaagcataagtgtaaagttcaataagtacttagattgcaatttagagtaatatattaaaaattgttacatataaaatccaagttttcattcgtgtactttcatttattttattggccgaccatatcatataaaccaaaaaaataaaaaaaaaaaaaaaacaaactcaaatcaaaagtttggatgacatatttctttttgactttaaaaatgaaaaagtaaaaaacaaaaataataaaatagtaagtattattattggccattttgtcacgagtgacgtccaagaccattatttattttgattcgagtttttgtcgttagaagtaatacgacaacttacaattcttcttcttcttattattattgttattattatttaccaattaataaaataaatgtcttatatgatcccaccaccaaaatctccacaccccatcctattttggacctttatgctatatcattttgtttttatttacattttctttttaattcaagcctctactaaaaataaataataattgaagaaagacaacaaaaaaaaaaaaaaaaaaaaaaaatacaataattggatgtgatatttctacgaaataaataaaaagataactttttgtttactaattactatatattaattaatcttttattattgataaaagtacctctaatttgttcaaatataaatgggtaaatg

SEQ ID NO: 196848 - DNA, 886 bp, Cannabis indica
tcaaacactgtaagaaggacaaccaatttttcaaaattaagggaaattttatcagttgtattataaagaactatagaaataaagatagactcatagagtatgtaaattttagctacaaaatcacgtaaaaaatctctctcatattataatatatctatataaaatatacagtatttactaaacattaaatacaacattaattatcaactctcattcatgttaacgaaattctgagttaacagtttggtgttttcattgggagtctttgataattaaactctaaaacacatctccctacccagacacaaaagtttccattatgaataatgcaaccataaacattcctattgaacatgaagaaactattcatcgccctaaaaaggagccccaggggcctcaacttgcaggtaattaaaatacaagaaataggtcctcctgaatgggactttgaaataactagtaacaaggaaaccattctagaaagaaggaatgaaaaggcatatgatcctactagacatgttcctttagtggaattagaaaattgccaacttcaacaaaggttgacaaaatctaaccgaagaaatgttgaattggagcgtgagagttattgcaacacgtgcgaatgttaatggcagcttgtagaacaaactgagccccaataagacaaccacgaggaaggccttgcgaatcaagaaataggagggcaccaaacgtccctattgaagagaacaatgcaaacaaccctggacatccccaggaacaacaaccagggaatacaaaggaagttctcgtcgatagagaaattccacaaaatctaggtgttcaaaatccaaggcaaatgcaacccgatgttctgaatctggaaccatctcataggaatatgaga

SEQ ID NO: 196849 - DNA, 1527 bp, Cannabis indica
ggtaaaataatttctaacatgttgggccgtcttggacaaggttgctgggaagatttggcatcgtacatctctagttactttttagagatctgtttgcatctcaaagtattttatgtgcaccaggggatcttccttcccggtgtacattttccaaactggcatcttgaacttaggtaggggtagtgcattaacgtatgctgagaaaggtgatcccattaacttttcaagttatagatctgatagctttgggccggatagacatttgaataatgcacatggtacttttttcaacgaaaaaaaccagttctcaccatgttccacatactgcactggttcactcagctatggtaagctagtattgcatctctcttattttttttttttttgaaacaaatagtatttagtttctaatattaaaaatattaaattttaaaataaaataaataaatgtaatgcatttgagccctccacgtgtcaatatttatgaattaacagaagtagtagaatgggtgtaagaaaattataatattaagtaattattttcaaaaaaaaataatattaagtatttttacctaaaaaataaaaataaggtatttaagtgtataaaatttgaaatattatgtatttaaagaattttatcttaaattaaatttagatatttaaaattattttttttaaaaaaaataattaattaattgatttgataatattaattttaacaattaactttaacgaaaaaataaaacaatctgttaaactaataattttcgttaaatagtgacatttagagatatctacttagttttattaatactttagtcatctatacacgtgacaccattgttattcaatgaattaatttaagagaaatattatatacgaaataattttttagtcaaattgtttctcatagtcatataaattataattatttaagacaccctgtaaaattttaagaaattcaaaaaagtttaacatgacaaaaattacgattgcacgcatgactattttattttatacgcgtgtaaaataaactgtttaaatattgttttttatattataaattattctaaatttctcaaaattttgtaagatatcttaaatagcaataacgtacatgaaaatgaaaaaaaaaaattagactaaaaaattcttttagatgtcggaataaataaaaggtacatcagtacatatttttttaagaaggtgcattgtaaaatcaccatattatataatttccatttatttaacttaaaaatagaaaaaaaaaattaaaaaattagaagccctaaaatctcatttcaactctctttcccttcccgtgttcagcttctcttctgaccccagacacgcgacagcctgcctgcactagacagctccggctccgtctccgacttcttgcgacgccgagacccttcccgacgggcagatccctccgccaccatccgaggtaaactttcctctcttttcttatatcataaagacttcagattgtgacatggtactccattttttcataatccatat

SEQ ID NO: 196850 - DNA, 751 bp, Cannabis indica
aacacgaattgacaaaatggatttttcgaaaaccctgccattaatctggttaactagttctacaagacttgtataaccggttagctagtttgcaccagataacccaaacaagtccaaaacttggccaattcatgtccaaactataccaaaccttccagaacacttgtaataacatcaaaggatagtttccaaccaaaaaaagccataattttccacaaaatttcaaaataccattgttgagccaagtttgagttcttagaactgaaacttgctcaacctaagaatcaagcaccaaaaccagaagattcagacataaaataaccccactaattactagaaaacaaccaaatactaaccctaactcgaatagtagcaaaaacaccacatcaacatgcttaatcttaacaaaacaacttttaaactcaacaaaaagaagctagggctcttaccttggttagaattcctcagacctttgatgaattcacagtaaatagcagcaatttgaggatgttttcctctagttctagttagggtcgaaggagagagagaacaagatggaagttcccaattttttcctttgtcttattccttaattgattaaaccaaataatcctaagaaaattaggttgaaattaaatgatatggccagttgccaacctcacaagcagccaccttaacaaacacctcaaattcccaaaatgcccctttaacctctaacttaagcaactataagctcaagagtttagttttt

SEQ ID NO: 196851 - DNA, 2133 bp, Cannabis indica
ctatgaatgaggcctctaaacttgaatgaggcctccaaacttcaatcgcaactagatcgtcttctttataagcaagaaatttttggaagtaaagatccaaagtgcattggttgcatgctggggacaaaactactaagtactttcataataaagcttctgctaggaaacgtactaactatattagaagtcttaatcttgatgacggcaacaaagtttccaacttagtggacattgaaaaggttgtctaaaatttcttttccactctcttttgttctcaaggttctaatactgaagccattgacatgatcctctctgttgtggataacagcttgagtgatcaacaataccttttggttgatgctcttttcaatggtgccgaggttaaagaggctttatttcaactctttggggacaagtctcctgggttagatggccttaatgcctatttttaccaaaaaaaattgggacattgttggggaagatctcactaataccattctcaacattttgaacaatgatgtagatatgtctgctattaacaatactttggttgtcctcattcctaaaaaaactaaagatgtctctcttaaagattttagacctattagtttatgtacgactttgtacaagattgtggctaagactattgctaacaggttaaaggctgccttgagtgatattatttccccaacccaaagtgcgttcttatctgataggcttattttagacaacatattcattgccaatgagatgattcatgctatcacttgtaggaagcaagggaaacttggatggataggccttaaattggacatggaaaaagcttttgatcgtgtggaatggacttttgtcctggcgattcttaataaactcaacattcctagtccttttattagacttataaacaattgccttttccctatttccatatgttttaatataaatggccatgtgtctaaagaaattttcccttcaagaggcttaagacagggcgatcctctctcgccctatcttttccttctttgcgctgaaggcctgtcctcgacactaatgatccaaaaaggaatggccttttcagggtatctccattgctcgattagctcctcccatttcacatttgctctttgctgatgatacccttttattcactgatgcttcctttgattcttgtgatgctttaaaagaggctcttcatttataacatcttgccactggtcaaaaagttaactttggtaagtctttgattttattttctcctaataccccacctcagatttctgattattttcatactaatctaagattagataataagccttttgttaaatacttaggtgtccctcaatgttttgatcgctctaaaatagccagtttcaacttcatccttgatagagtcacttctcatctgaatgtttggaacaataaaattttttccaaggctggtaaggaagttctcctgaaagttgttattcaggctattccctccaatgttatgtcttgtttcaaacttcccgtatctatttgtaagaaaattaagaaactcatggcccagttttggtggggatctatgggaaattcctctaaaatccattggaaagcttggtcttatctttgtaattctaagttttttggtggtttgggtttccgttctgtgattcatcacaatcaagctcttttagctaaacaagcttggagagtcttccttcatcctaactctctcttatctcgtattcttaaagctagatattttaaattcaatactttcttagatgctaaaaaagggcattctccttcctttacttggaatagcttactttggggaagagatctcctcgtgaaatggcttatttggaaagttggggatggtagtaccattcgtactcttcatgatatttggatcccaattgtgaaataccttagatataagggtgatcatcctccttctaaagacagagtcagcttctttattaatcaaaatttccaatgggaccttgacaaattaactcagttttttgacagtgacattgttgataatattcttcaagttgcaattggaggtaatgatagatttgataaacttatttggagtggagaatcttcaggcatgtattgtcaaatctgcttaccatttag

SEQ ID NO: 196852 - DNA, 4500 bp, Cannabis indica
tggtgtctgtattttttacagtgtcatccatgaaatatcgataggatatcaacggtagatcaaaatggggtatttgattgtttgaacatatttttgtttttattttttgactgtatcttgataggttatcgacatattatatatggtttgtcgacatattcgagtaggattatttttaaactatttatcgataggatgttgacaaaatatcgatagtatgtcgacaaaatatcgatagtatgtcgatattatagcaaaaaaattaaactgggttatatagtatttttatatcgatatgatatcgatggtatgtcgatatgatgtcaaaaaatatgataatgatctatttttattctttccttgaatttcgatgtaatattgacatattgtcgatattttgtcaataggtttttgatggtttttcgatgacatttctgattttttttcccttttacagatggctctgaagcttatagttccattccctgagcatttaacaggtcgtgtgacctacagaggaagtgatgtttttagcaagttgatcaaagtagaatttgagaagcacagtttgactgatagggcaaaggcaagccctttcggtcaattttggtaggctggtgctttatcatttttgtcagtactattccaccaactgatgctggataaaatgattgtgaatgctgagaaggatgacgaaatgtggttttacattacacgaaacgagatgaaatttggtgtggtcgagttcgagctgattacaggcttcaacttcacaaagaggccagcagacgatgagaaagaagccatgtcaaggtctaaccggttgataaatctctatttcaaccagtcagataatgtgaagatagaactactttagaataagttcctagcctgagaggtcctgaaagacgcgtacaagctacgattgtgtttgtttgtggagactatcttactaaacagagagggaaatgcatgtattacaactgacatactaaaattggttgaagatcttaattttttcttcaagattctatgggggaactactcatttgccaaacagatgcacaccctccaaaaagacatattgaaacagaaggcaaattatgagaagaagctgaagatggatgttcagcacgaatgcaaatacactgcttacggctttgcacttgcattacagtattgggcctatgaggccattatagaggtggggagcaagtatggttcatctcaagggattcattttccaaggatgataagctggattagcagggctgacattaaaaaagtaggaaatcagtacattattttcaaaactggcatgatcatttaatttttttgaactggtatgtttgtttttctaaatatttttgtttgtcgatatgatattgacataatttcgatgcttttttgatgatgtgctttagtgtttaatatttttaatattgcgagtttgtcgatagtttatcgacatgttgtcgataactgcttaaattattgctgattattttgttgttaaattgttttatgtttcattttatcatttttgatatgatgtcgataggtttttgatgcattatcgattattgttctatgtttaagtaatgttagtttgtcgatacattttcgacaatttgtcgatacttatcgacaatttgtcataaatccttacacttgataattattttatatttgtcgacatgatatcgataggatgtagatatgttatcaataattttagtgtgtttgtttctgttcttgataagatatgatgtcgatggtttgttgataatttctgatgatttgaaaaaaaatcgactttttaattaatattaacacttattttgcatttgttttgttatatagacattcgtagtgatgaaggggctacatcctcgctggatgaagaggcatatgccgagaccatcacctgcaatggtgctgagatcctggttgagatggatgttgatgagacacaggttgaagacaacacccaagactcttaatttttcgctagccaagctaagagagcctcagaacattttcaatctgctgctattctggagattgaacctgctgctattcttgagactcaacctgctaataaaattgatgtggttgacatgttgaataggatagaggaagatgtgaagggtctttacgcttctgagacagagttgaatgatgcatatatgcgtagccacctagaactgaaggctggccaagaccatatgatggagcagctaagatctatcagtacttcactgcaaaataggccaacaaatctagcaccagaacctccagcaactctggctatgggtggagatgatgaggtccttcctgacgggtatgtccctatgaggatgctccagctacccctatcgatgcaggtattatctgcatagatgacatcgagtcacagggtgaaattttggctttagaggcagcacctgaggttgagtttggaaggaggaagagaaagaggcctatttggttttgtagactacacagagaagaagaagaaacagaggccttcttcgacgtctgatcccctggctccacccgatgagaaattgaaggatactttctggaagtggtgttcaggattcattctgaaccatcgacttcgagatttgcaaactggtgattgcagtacatcattcttttagaagttgttgacgcagcaggaatgacttacagattgcgtaagtaaactaatctataattttactacattttataagtcaagtaatctacaattaatatatttggttgtctaactgctttctctaacctttatatgcaacatatagatacagtcgtccatctactgaggaggcgacaccacttctttccattgacatttcctcagaagggtatcattctctcaacatatatcaccactgttatcagcagtgcatggacaaaccataggggtcacagaaaaaactttgtttgggaggatcatatcttggagtactgcagaggtattcatcaggtatttttttagcaagtttttaaagtttcaactataattacaagtttattatgttcaatatttttaatattgtgagtatgtcaataagttttcaacagtttgtcataaattcgtacacttgctaattatttttatgtttgtttgtttttatgctttgttttatatttatcgatgtgatatcgataggatctcgatattttgtcgataatttatgcatgtttgtgtctgttcttgatatgatatgatatcgataggatgtagataatttttgatgatttgaaaaaaaatcaacttcttaattatcattaacacttattttgtatttgttaattgtttatctgttctccgtaattacagaaccaccaattctatccaagattggtgggtaatgacttcatttgcttcattctgcatctacccacatgaaggcactggatagcagttgaagttgacattaacttgtggaaaatgaatgtgtacgactgtggttctagaatttgtaattagaagaacatgaaagtcatcctcaagacttggcaagatatgttgccatcattgatctatgcaactggagatttcccaaataataatcagatcatggcgctaactatgagcgacatcaaggagcttccgaggatgcatgcagctggagtcacccacgacttagtttcgaaggtaacattaaggtacatagcgataaaaaagtactgtagtaataaaatttgccttacattgtactaacttcatattttatgttgtgtgtagctgtgattgtgacctttattccattgagtacgtggaacatctcatgatgcaacgtctagtagctgatgtcacgcaagaacggataaagatgtttcgtcaacggtggtacattgatttgttttaccagaatctcgattaaacatgaagttatataattatggatactttgtatattttgtcaaattaacaaaattaaaaatacagttatatatttgtatgttgatggtatatcgataatttttcgatatattattgacattaattactcaatattttttacaagtagagtgcattattgacctatcattgacatattatcgacatattttcgacattactgagttaattatgttttggttccacaatatagttcttgtcgacattttcgacatgatgtcgatatgttatcgataatctgttcgattaattggcttgtcgataatttttttccaaaattagagagaacattgtcaatgtcatatcgacaacatgaacgtatcgatatgttgtcgatatttttcaaaaattgaaaaaaaatctctttctcaacatataagtagagtaacaacctgattttaaagcagttttgaataacaaatacacaatacacaacatgttattacaaataataactagactatgccttaaatgcgagctttgcatgttgctctaatatgacctgaaccgccacagaggatacaatttcgaggtacatatacttttttatcaccagacgggaa

SEQ ID NO: 196853 - DNA, 1318 bp, Cannabis indica
ctcaaataccaaatttgattcgaccattgaattcgaaatggtcaaaaacagggtgaaagatctcgttctcaagttctagaacattggaagtatcaaaacgacatcccaaaagctccgaattgagtacccaacacctaggttgacaaatggcctggtgcgctgggttctgcttatccgatttgattctgtttcaactgtttgtctagtttttcacaataactaagatctatgaagtcatagaagtcaaattcacaatttcacatttctcattccaacatgggaaactcactcgaaaataaagagtttctagtctctcatttctgcaaaacatctccgagaatcggtaaccaactttaccaaagcatagaaacagactatgcgatgtcaaaatatcacttaggcatcataaaatacaacatctggaggttttttcacttacccagcgtccaagttgacgtcatatgtcaacttgggcactgggatgtcaacctggacactggatgtcaacttaggcgttgggttgtgaactgccttgagtaaaacgaccataactcactcaatattaattcgattgatgcgattcaacttgagtttcaaagttaattcaatgctatatcaagcaataactcatacttcaatcgtaattatgaagttatcgacctcaaaattcaccccaagggagttacgaaaaataagttgcgagttacccgcagcgagtcccgcttggctccaaaaattgattatcagcttcagaattagttttgatctttgaatcatcatctagagtaaaaattggccaatttatatatatatatatatttatattttgatttttttcctatttttgtggatctccttcacctataaaaggacagttcccttagctcatttttcacattcagaaaactatccataaggtcagagcatctttctctagaaattagagtttacatacttagtctttttctatataccatcttatgagaaataaaaactcaaaatagacgtagttatattaccatcacgacatgaggagtgaagtactataaattgtgtgtctctctaaattatatgcttacaatcataattcattttgccaatccagcgagctggtgtttgccacttttcagcgtcaatagtaagttttaatttttgatttgtgtgttcaactatggaccttttttcgagggagagttgagttttttatgtgttaaacttttgttaaaattagcattgtaaattggcgtgcttttcaggaggagtttatttctatgattttgctatcttcattttgtaggtatttgaaaattaaaaaata

SEQ ID NO: 196854 - DNA, 601 bp, Cannabis indica
caaaaactgtcgtgatattaggtgtaatgtttgagaaatgctaaagaactttgtttttttttttttttttgtactttgggaagggaggaccttttctctttgtgagaggaaaagtgaaactactaagctaagcctatgactacgagaaatgctaacaatctctctatgtattattgttatattagagcatctccaatagtagttttttttaagagtcttaaaaactttcacattatttaaaaatatattattttattttatctctcttccacattaattttgtactttttgttctaaaatgatttaatggtaagtatctttaaaaattattaaaataatattatattattatttaatatatattaaataaataaattttcttactttataataaaataataataaaaaaaattagaaagagaagatgtaaagaatgatatggtatgatattctttttcattccaatggtaagcattaattaaaaaatagctaaaaagtgtattcatgtcatcaaacgtccttcatagcatcttcattggagatactctagatacactcaaattgcacataaatgatgtgtattaattattaggagaattac

SEQ ID NO: 196855 - DNA, 788 bp, Cannabis indica
agaactagaatcccaaaaatctatttatttaaaaaatagaaaatagacatattactagttattattattttttttccctatcaccttttagaagttgaccatttgatttattgtggggtagttatgaataattattatatatggtgtactagctagttatatctttttatgttacgtggttttcttattttaattttttttaggttttgtttttcttatggcttcaatttttgtatttcacaaatacaattaatttgttggcctcatatgttataattatagtttttataaggactattgggtcgtaattcaaatatgttttttcaataaattagtaacatgttgattttttaatcttgatcttcaatttaaataaaaaagaccaaaattatttattaattttgtagcttctaaaaatatttaagatattttacatatgttctatttttgtaaaatagaatacttaagatttttttttttttgcttatataagaatactaaagatgtttgttaagaggaaaataatcaatacataaaatatttaattaatttcataaaatagataaataagatttttattaagtttaaatttttttattagtaagatatacattctattttattgggtgtaaatagatagatattgtcttaatttaattatatatactaataaatttatttgttatatatatatagtatgattattagtatatatattggttatataattatcaaatataaaatattcacttaaaaagaataaagaaatcttattaatttaaaattat

SEQ ID NO: 196856 - DNA, 1084 bp, Cannabis indica
attatagaatttccaattattttatataaaataaaaaactcccatttttctatttcgctcagggtgtataaacacaaaattcagtgagtcactcgcattgactcggtgagttcagggagggaactgtgagttcttcacttcttcagtcggtgctgttctcaatctccgttgattgctccgatggcttttccagtggttgacgccggctacctcaaggagattgacaaggctcgtcgtgatctccgtgcccttatttccgccagaagctgcgccccaattatgctccgcttagcgtaactctctcttgttgtttgtttacccgtaaaaaaaaaaaatcccaagaaggaaatgaagttttgtgtaatcacaagtataagatagaaaattaatttttgtttttaactatttttaacgaaatttatttggaatttgcaggtggcatgatgctggcacttacgatgcgaaaacgaaaaccggtggaccaaatggttcgattaggactgaagaagagtataaccacggttccaataatggattgaagaaagctattgatttttgtggtatgccctcaaccatagctattagcaatactcaacattaaattaaccaactttgatctcaaaaagttattatgatacatgttatagctcatcaattgtagttgtgggtgtcttccatactgacttcatggcttgaatgaatgattgttacttgcttggctttgggttatgaaatatatggtgttcatgtggttattaagtaaagtacctacattttaggctctttatcataatgcctcattttccaaccaaacaagcagaattagattgtccattatttttatttcttttattcataacaagctattgttgtaatcatgctattatttgggaagttcattttattaattatttatgcttgtttacgtttcttattttgacttgcgactctatcttgtattgttatttgttgagtaaataaaaggaacagaaagaaagtagaacctaggataagcccctggtcagatttgtgtaccatagaaagaaagccaactaggcttcactagaattgttttaacttttaa

SEQ ID NO: 196857 - DNA, 2065 bp, Cannabis indica
ttataatatactactagtagtataagatagatagatgtcagaggaaaataataatctatatcttaacgtttttctaatactatatatagctattctatagtatctttcaatacaataaaaaataataaaactcatatttattaagctttgtccatttattttagcatcctctaggataaaatcaaattaaaattttccaattcattattaatgtcccctatctcccattgatgacgaaatcctaacatatttatacaataaagttatattattttatatatctatttatagtaaaaaatcatacttatagtgaatataatttaattaaaattaactaatataattacaatccaattcgacttaattctttcttatttattatctatataggtgggcaacatcataaccaatattaaaatattctaattattttagcaattcgatttactaaaaaactattcatatttgtatctatatgtacaatgaaaaactaataattaaattcaatactccttaacctttactacctatttattccagtaattcccaataataaaataaaataaaaaatatcctcaattcactattaatatccccacctcccattgattaagaaatgtccacatttataatttttacaccaaaataatattatcttatatatagtgaaactcacatttattgtcaatataaattcccataaatggaattaaagagaactaattaatatattcagaattcagtttgagtattatcacttaatatttccttatttagtgtttatatagatagattggaacaccaacaccataactaatattaaagtcattccaatttgagtattatgacttaatatttccttaattattgtttataactaaagcaaaaaaaaccaatcagcgtcgcttcatacctgaagcaaaaaaattagtatttacgtctacggttatagcatcggttacactaaccgaaacaaattatttatatgtcacttaaaaattgaagtaaaaagtcttttttgtagtagtaaaaattgactatcaacctaagaagttaattttgactgtttatatgttgaattatttttttctattcttatgagcctttttaacctataaaaggagagttcccttagttcatttttcacatttaaaaaactacccacaaggtcggagaatctctctatagtttctctctgcaaaaactagagcttgaaacacttagcctatttctataattgtcatctcgtgagaaattaaaactcaaggtagacgtagctctattactgtcacgatacagagagtgaactactataaatttattgtctagctctcttttataaatacttaacaaatatttcaatcttgctaatctagcgagcgggtgtagcttagaagtctcagtccagatttttgagtcaataatacttggtggtggtggtagagaagggtttgagagagatggctgaagaaggttgaagagctgagagtaaaaaatggaaaaaatgggtagggggggggtatttataggacttattagcggcgggacctaccgctaatgccccgttgctaataggtatttaaaaatatttgaactgaataggtggaaattttcccgcccacttattagcggcgggcctcgccgctaatactattagtggcggaccagtagcggtagacctccccgctaataatttattatattttatatacaatttatcaacccagaataagatggactaactcgctctgagaatttagtgtcccatggtttggcaaagcatgctctgcggttagacgatgagctatcctggttcaaggaggttccagggccagttgcgaatatctgctttgtaaattcatgagtaattctaatcacttcgtaaaaaaaaatttactcttttacaaaaaaaaaaaaaaataagtagaatgatgaagtggcaaaaagcatgccggtggtgagtatattctcttcgtataatttagaaaccctagacgaactccccaactaatttcttgcacagagagagaattaaaatggcgtccttcgacgaagctcctcccgg

SEQ ID NO: 196858 - DNA, 619 bp, Cannabis indica
tgtaagtgccgatttggcatttcaattttaatgaagttatctactttcattcaaaaaaaaaaagatacaaaaatatgggcccatttaacaaaatggcctacccagaactgttttggaaggcccaattatgttggagaggccgtaaacttagcctaggtatgttgttctatttctcttatgctagtaacgttttttttttttttttttttaaatataattgcagcaaaactctcaatagtttaactctactagcaattaatttttaaattttaaattttggcaataaaactcccaaaactaaaattcagttagctatttataattttcatctaaatttaaatgttaactgtcatgttagattgtacaagtgtacataatgtatgtgacacaattttattagtccacataatttattaattaaataaataaaattcaaaaataaaaataaaacatttaaaaattaaaaatatatttttttctttcttctttttattttcttttcttttattttctagttttttttcctcttcttctttcttcatagccagcatattgaatcaccaccaccccactcctctctcccacaactagcaccaccattatcacagacaaaaaaaaa

SEQ ID NO: 196859 - DNA, 1638 bp, Cannabis indica
gataccaatagtgtatagaatgcctccgttatgaattcgtgggctcgtagcctctcgacctactctttgaatgtttgggtgtgctctttatccatcaaccttcttttttattgaacaggttggatgcttggatcgatgttgagtgcatgggtcatcactgaggggtcgattccaaccatgtctccatgtgaccatgcaaaaaggtccaggttttcccttagaaatcttatcagtattgatttaatttatgacgctaaacccttcctaatcttcagtcttctttttggaaaagtgggatcaacttccacttcttctaactcttctacaggctcgaaacattcttctaagatccccaaagcgatgatctatgtctgtgtccctgctttgggctggacttcattactttttgctgggctcatcttctgggcccttggcgggcatattctctttcttggctttggatagagtcatgttgcaatagtgacaggcagactattggtctcccctcacacatgccaccccatgccttattggaaatttgaggcataagtggtagatggatattaccaccttcaaatcattgagggtcggtcggcctatcatggcattgaaggctgaaggaatgtcaatcacaatgaactacaccatcaaagttctaccatcaaagttctagtggttggattttctccaactgtgaggggtattgatatacccgacaggtgcgatgccttggccaaagaagccatacatcacttgattgtaaggcgccaggtcagtgagctggagccctatcttttcatatgttgacttgaaaataatgttggaggaggctccattgtccaccatgcatcttgctactgtcatgttcttaatttgtgcagtaatgaccaggggtcattgtgcgggaaactaacctgagtagcgtcttctttggtgaaggagattgtgggctctataagctttggttgcttagagcccctatctttgacaactaggatatcacttttaggctcgtgatggagtgtccgagcatagaactccctagctttgctggtctctcctgtaatgtgggatccaccaagaataacccctaggtgtcatgccattagtagtggcattagatctccgttttggacaccttgtgcatgcgtttggtcgttctacacataacgacataggtggggattgttacaccttatgaggtattcaatctccctcttcaaattttgacactcattggtgtcatggccaaaatcgttgtgataccgataaaacttcaacatgtccctcttgctcatctcccttttaacaggaaagggctttcagtaggggaatgttccctgagtggccatgacgatggcctcaggtttcttggtcaggagggtgaagtgggtatacttctcttccttattcttctgtggcatgggagaagtgttaaacttaccatttttgccattattcctcctagagctgttgatgttgcgcttgtttttccactagaggcctgtgcagagttattggtttctgcctgtgcacctaataggtcatgagactgtaggatgtctcgtgactgtttgttgttggcgtgccctatttgggcctatcgtatggctttttcgagtttgataaagccatcaa

SEQ ID NO: 196860 - DNA, 1173 bp, Cannabis indica
gagtatgatgtgtcatagctctttccacaaatgggtttgcattttatttctttattgggctttttccttcctggatgagctttaccaaaacaaaatgttttttcttcttccccaacaatggtattcctaagaatctcagtgttaaattgatcactgttttataatttgatcatagtcatagttttattatttatccttaagaatctcactgtttgatgaattaaaatcgtgaaaaactacaactatctaaattaattaattatagcacttctagaataggacagaaaacaggtaagttgaaatatagccattgttttcatcagttaactaaaaatagccttatttcattaccgattataccctctcataaaggtactgttgaaggaggtgaggaaggttttttcatttcataagggtataatcgggatataataaataaaagaaggtataaattaaatatatagaaaagaaaggtaaaaatgaaatagattaacaaaaaaaagggtatatggtgcaatttctacacaaaaaaacgcgttaaaagataaaataaaagaactaggctcaaaaatttaaagaatatgatgtcttttttacaaagaaaaaaaaaaattgtccctactaaaatatgggtctgacttcgtcactatacttcaaaggttctcatttcattaaaggacggtatcactcaaaaaccaaatattatccctcgcgaaaaggtgtgaaagaatggcagcaaagacatcctactttacaaccacttgaggctagctcaagtggccataagtgggtgtgtgactattggaggttatgggtttgagtcccaaattaaacatgttgtaatatataaacgcttaaatcaagaaaaaaaaataaaataaaataaaacatcctactttacaatttaaacccttgaaaaataataaaaaatgcatatattaattgtactgtaggtacctgaggggcaactagtataagtccatgggaggatatgtggtggagtagatcttcatagaatttgttttcgagtaagaatccatggaagaacaacactacaggataagtgccctcctttgttggactcacgatgaatagttgttttggaggtgaaaaagtagcccacgaaaccagtcttggctcaaaaaaattggatttaatttcaaaacacccctt

SEQ ID NO: 196861 - DNA, 2308 bp, Cannabis indica
tttgtacctgcaaggttagtatcctcttttcttgtactaggatttccattaggtaagcaagggaaagtattttcttaaaatataacattcctaatgttcttagttttaaaaccaccattttcccttacccatggttgttatctgcgtttctacgaggtatgacacgtgacatttattaaagaaggtcaaattaatcgtttattacttgaagtcctttgaaattgttctatcactgaaaggtatcctcgaaccaagaatcttccaaaatgaaggggcacgtaaaagcctatccacgactaccttagcttcccaaatttggatggcagaaaaggaagcttctctcccgaatctggaagaatcaaatagggaagttcgcttggagtatcaccaaacttatatttgaaggacctagtggatattgaccctcactgggtatcgcggatattgactttttccacacaaaaggccaccaaagtgacagttatttcatgacagaatctgatcttgtctcctacatctgagcatggtagtgcatgcaccaccaccatccttttaccacatggacactacagactttagcttataaaggaacaagctttgaatgatacgcatcccttgatttcaaaggttaaacttttatgtgacacgtgtccaagtggtacaaaatgctccccattatccagctgctacacacacgggcataatgctacccacgggatcaactagagagctctacattgcatgtaatttactccaacagtgggattaatatagaaatcttaggtgggtgatgggtttgtccatacccgccacttagcctataaatacccctttattctcatgcaaaggggtcaagccaaaaacacatagctaaaactctgctgagattgcccttgatcttcttcttctttgaaaataaattaagggtaaagagttagggtttcctgcaaaatattgtaaacacatcaatattgccctttgaggctaatagactgactcatggactaatgtttattaacacttgaaccacgtaaaaaatcttcctctcttaatttctgcaaattattatttctttagctcctaaatatttagtttcttaaaatctcggtaaatatttagtgctttcattgagagctaaagaaagatgtaaaccacagctaatgcgatggtgttcactcagaagatgattctcaaaaagaattttcaaggtcaccttgagacggtcatataagatgtagatcccctcactccaaggcacactcaaccgaccggtgtgaaaggcaaggatacgtccaacgtgaatgatcaagaggataacttagacaacgtgcatgaccacgttggtgatgacagggatgctgagaactatgaagagcaagaaaataaagacgattatgtcaaagatggatattacaaacacgtctatcactatgatcatgaccccaaggtggtccgagtgtccaatgagctactcaaaaccaaacaaaagttagcctgtcaagagaagttttctcataagatggagaaaatgatggcttgcctgtgatacaaagttcagagatctagatgatgaaggttctaacaatgaccctttgctggagtgcgtcagaggaaatactaaggaaaactttgctaatgttggaacatgctcccacaaaggacaaaaaggaaaacaaaagtgggtgaccctaagaactctcatgctcttgaacctccccagaagaatatgaatcaagccaacaggccttctcaggcacataagaaggccaacacctctagacttggatgtcattctgcccaaaaaggccttgtgatgccaaaggaggctggtacaaaaataacaaaacccaagggaaggaaagactgccctagtaattcggtaaactaggatgttggggcaaagggacaatattttgatgacaattggtccactgtggacctcaagaggcgtttagacacgaaataacaaaaaagcaaaaagtgagaaggcgaggccacgtggtaatgacctcaggagcaacttgaatgataaggtccatggaagggatctctcgaacagttatacagagaggttggaagaacacaaactaagttggtctgaaagtaaagtgggaccctaactgattcagaagatgaagactcaaagccttgcgttaggaggatcatagaaaatccactcccagagaacttcaaaatgtcccaaatcgagttatatgatgggcgcatagatctgaagactcacctggccaaatataacaagatgatgcaaatggcgagggtaagtgatgacgccaagtgtttatgcttt

SEQ ID NO: 196862 - DNA, 890 bp, Cannabis indica
actaatatgagatgtattttctgtgaggatgaggaagattcggtaattcatctctttctcaagtgtccgttggcccgaaaatgttggtttagcacacaatggggaattagaagcgactgtctaaatttgaataatctgaaagacttggtgttgtggctgttaactaaatctccaggtcaggtttctcccccagatactgatctgtttacccaagtggcggtttctctttgcttcaccttgtggaatgcgcgaaatgcgtgtttccatgaaggaactctggcttccctggaggtcattctttgcaaagccttaactgaggtgcagaagtggagaatctcttgttccaaatcgattcctgaaacggctgatctccccttgaatttgtccttgccttctcaagcttcggtgagagccttcactgatgctgttgttcgaggatcctctgctttctctgctactattatcttggattcggagggtcaaattctgggtgctgcaaccttcaagttccaggtttcctcgcccttggaagcagaagctcatggtcttctctcggctttggacttctgtgcctcttcgggatggactgaggtgcttttcctgtcggattgtaagactctggtgcaagccttacaagaccgtagctgcccctcctagaaattgttacctcttttttctaaacttttttctttgatgtgtaatggtaatcgggtgaatgtttgttgggtgcctagaaaccacaatatcattgctcatgagttggctcagtgggctgcgtctcttggtgtttgccaatctctttctgctgacgatattctcccgattgtgggggatttgaacactttggtgtaagttggttgtattttaaataaaggtatcctttcatcaaa

SEQ ID NO: 196863 - DNA, 1094 bp, Cannabis indica
gacgagatagaaccgttagctgatgatatcttcaaggtatgggatttgagtattccatcagaagaaaatgtgcttgacaagcagttgaacaagatccttgaggaaagtgaccctcagttcaaaccatcaactcttaatgattccgatatccagaaagatttgaaagaagtctcacttgatgatgtaattgctgcaatcgcgggtatctctataaataaaaaatgaaaattctagttaggtaaaacaaagagaaaaagaaatccatgttgctcatttttcttcttgtcacatatagtgacactaacaagggcatttggtttcatggagattagaatagtgtcctcatttcagagtgtaattctctgtatttatggtgaaaacagaagtatttgagagtaggtggtaaaaaaattattaatgattattaggtttgaacctcaaaataatcatcttgccaaattgcctttaccacataactacagccctaaaatgtgtgttgatgcttctttattgtatctatggtttggatacttttctgggcaatttttatttttatgaattttttaaagtaaaatttataaaaatatgatttgtttttttgaaaaattattttgtgggtcaaattcaaaaagggaattaaaaatatgagaaaaacaattggggtaaccggttactcggaggttactacttacctctacactttgtttttgaattttcttgtgaaataacttttttgtgtttttttttttggaaattttcataccacatactgaagttttctattttttttttctttttattgtggggatagggataagatttaaaaaaaaaaaaattctgtattgtgttaagttttcactgttgtcttttagttgttttactgtaaattttaattgttctgttttattgttttacagttattttatttttgtaaaaattttcgagtggcagtaaaattataaatttttgtccaaaattcaacatttttgtaaaatctcttttttttttttcttttggggaaaacaacttcattttttaccccctaccactatttttaatgtttgaaatttattcttctcgtccatgtctaattc

SEQ ID NO: 196864 - DNA, 579 bp, Cannabis indica
ttttttttttaacattttttataaattaaattatcgaaggttggtgctccgcctgatgtggtggctcggctcggagcggctcgtcaggattttgagtcgcggcagcgatctctagttagctctagagactcttcgaaagacccagaactcgatcaatttatggtaattaaatataaaaagattatcttatgcataaatgtatattaaaatattaattattattattattaactttttttcttgttgttgtgcgtgtctcctattatatatataataatgaatactgaaaaatagggatctaattatttaattaattaattaattaattaattgcaggaagcttattacgatttgttggtaaagtatcgggacgaactgactaggcccattcaagaagccatggatttcatgcgaagaatcgaaactcagcttaacatgctcaacaatggtggtcctgtacggatcttcacttccggtatactactttctatacatatctctctctctctctctccctctctctactctctacttaataatttcttttaccacaaaactcttgtttttttttcttttctt

SEQ ID NO: 196865 - DNA, 767 bp, Cannabis indica
atgggccatattggattggagataatttctaaattaatggtatttatagaagaagatcatcattataagttattaaggcaactcgtaatatatagtttagtggctgagtgtggattctctcgttattaggttgggcaagatgatcatgacatgtcatttgactcaaatttaggaaagtatcccaatcaactataaaatttatattgggttacatttacatactcttttaaaatatatataatattgaaaagaaatatttattattaataagtcaattgaacatagttcatcacgaaaaactaatatttttagagcaaaatcaaccaatatatataagttcgactaataataataactctaataataaacattgtgataactctaataataacttcgactaataaaacgcaagcaatcaagtttctaacaagtgcgaagtaaactgagttctctttctaagtgaacaagtgactccaccaatagttgctttgctagccaataatttatacatcttaaaataaacgagaaataacactattcaaactaaaatgaaaaaaacaatgaaataacaaccaaccatgctcataaatcccaaactagagaacaagataccacaaaataatgggtcaatagatagagagtattgttatgggacattaaggtgtctaacaccactatgaggtgtgcctccgatatcaaattgtaccaataataatattacactgcagaaggtactaggcacagtactatggacgccctttaaaatt

SEQ ID NO: 196866 - DNA, 777 bp, Cannabis indica
ttgctttagtaaatatactaaatatataaatatcaaatagcatggtcttttatattatgtttaatcagaatgtttaaacaattatcaattacagctaaagcaataagttggagttatttcaatttttttttttttaaagaaaggtattaaggccaaaatgatatgttttcttagtttattgaggaaattatctttatttcttttttagaaaatcacacacaaaagattttttttttgtttggtttgattataagatgagagattacggggtgattggtaagatacggatataataagatagagactcattccatttccttgtttggtatgaatatgatcacaactgctacaatagaatgtttctacttaataaaatgggcagatggaggttaaataaaaagaaaatactatactatatgtataatttaattttagatcttgtaattttaggatacttagtattacgaaaagtatacttgcaactcggtacatggggtttttggtgataactggaagggtccatacttcattgttgaaaagataggcaacgcaacgtactgactctctgatttaaacaactcagtttttgacagagcttggaatggtgaacatttaaaattctattatcagtagtactcgcatgtatatacttagctaattttaattaattgttcaaaattacttaaatataaggagaatacatgcatcactactactattaataaaaatcgcattattgatcatgaataatatcgcacaattttcaaatttttatcc

SEQ ID NO: 196867 - DNA, 1414 bp, Cannabis indica
tatgaactatatatataattttagagtaaattttggcattaactcataatagtgtcccattgctagcgattaacccccgaattcatatttttgattgtaaaatcctctaaacctaaattccattagcacttatagtctcttacatgtatttttggcatgtccatgtgaacacagggtattgtccacgaacacaatgtacacacgacaccatgcactccgacccaccttatctccgacgagaagagcgaggaggagaggaagatgttcgttcacttttgggtcgcccacgcacaatggagaaggaaggtcagtgtgtcaactgtcggcggtgtgtgtgatgacttagactaaatttagtcatggttttagtcttagtagggccggagtagggagcgcccgtgcccatttatgccatgggtttaacatgcccaccctctcctatccaagctcctcaatatttccaatccactttttctagctatggatcttgtggcaaattgttgtgcataaaggtactccagatctccgccgacattccacaattaatcacatgaccaagcatattatcatacaaataaattagccaatgcatcaagaactgatcaaattttcttcattgttggtggtctggattagggatattacctgcaagagagtttgatataccatgacataatctaaggatgtagccatcaagatcatacactcgcacaacaacaagaaccagggatcttcaaattgtgtaatttgtttgatctaatcttagatttagtaggaggagattatcattcagaactgccacttgagcttgaacattttgttgttgtggagctctttcttgctctgcggatttactctttaacacatctttcttcctaagttaaaaggtttagaaaaagaagagagcaacttacttgccatttttgccagttttttttttattcagcattctttggtgtcagagcatcatacttgtaatttttactcagtatcacaaaagaatattcttcagcatcaccgaccacattgatctatcgtgatcatgatacaatatcaggatgtagtgttcaagtcagtgccgaatttcaatagaaaaactcttaattttcattaataatcttttatgaaaataacgttaagcaatttatacaattaataaattgataataagctcctatactatttcaaagtgtaatagtagaacaagtggtataaaattatatatctaatttccactaatccatcttatttgatagataagactgatcaattgtttttttattcgcaaagtgaactgatttttcattcttccttttcaagggtattattaataataacatacattaaatatatatatagcactacaactaatatgtaggaaaattcttaagcagggtcatcattttagctttcc

SEQ ID NO: 196868 - DNA, 699 bp, Cannabis indica
tgatcataagcgactatttggctcaagcgttttttctggctcacttttctcaaatcacaagtcattcttttggctattcctttttaattaatatttggatttgggtcaaatactcgttatattttatctgactctgatatcatgttagattgtaagagtgtggtggagaatgtagaataaggtgagtgtatggtaagatgtatgaggttcattctcaaaattaattagcaataaaaggagtagattatacattttatatatgacattaagtttctacacattatcaattggagctctaatatcatgtgaatgaataaacaaaatttagagtgattcctttaattatttatgtatactttgtttattcacaaaaattacaatagtggtgacctaaaaaattgtcacgagaggtaaaatttattaacaatagaaggcaaaatttgaaattttgctctcataaacataaacctatcaacttaccactaaaccacacttaaatgtatgacatactcttatataataagccaattgccctcttttaccctaatgcaaattaactttatttaaagataaagttaatatttgcagatttaaaataaagaaaaatatgtttaaagtcatggttggaaataatttaaaatgtatctttttattttttttttacttttaagataaaattagaagcgaaagatgtattat

SEQ ID NO: 196869 - DNA, 1031 bp, Cannabis indica
gtataaaattaaaaattgccctaaatgtaaagcaccttcaatcactttaatagaaacaagcacataagattagtaagttgttcgatttaaaaaaatccatataagcacagtaaagcaccttttatatctctgtttagagtcacatgggcaaaccacattcttacttattcagttatttgaccattcttcgccaaattagacttggcaatatctaatggtgtagatcctatgagcttttacacctgaagttaataaagatcatgggaagaagtttggttcattttatttccaaataaatattaagaaactaaaagtaacaacttcaccataaattctcacacgatcatatattctataataagagagttaccgcaacacaactacaatgcacatatatatcaagtgcaaaaacataaaaaaaaatgtaataaataaaactaaagagtagcaaaacttgatagatcaagaataataatacctcaacaagactctttggcattggttttcctaatttctataagctttctatcttcccttagtatttatttagtccatgtaaactttgccagaggcgcattcaacatttgtaattgtgcaactgaaaatttttgctacctctttcttatgactaagttggagattctacaaagcataaggtctatatgactacatcaatatcatggtaaataaaattagtacaaccataaggtccatataattgcaaaattatcacaatacatgaaattcgagaaattctattaataagaaattaatacaacaccaatgagatcaaaccatccttgtttctcaaaagcctcaccaaatatcgcttcactgcttttacccggtatatattgcttgaagtctcctacttttcttgttttactcgactcctctacaaaacctttgattaaacaagtaaataataaattgattatcaaaaataaaagtggagagaaagaaaagtaaattgttaggcgacctaaaatacaaagagcaaacaaattttttaacacgtatataatatataa

SEQ ID NO: 196870 - DNA, 2190 bp, Cannabis indica
cggtgtccatggtaatagtgaaatttggtcagttatggttcgtttcatgaaaaaaaaaaaaattacctaacattgtataatcagctgtaaccatgatgaaggttactatttacagagtttttcagaaatcgaattaaaagatgattaagttatagaaaataagataaaagatggcaagataaattttttacgtgattggagtgttaataaactttagtccgcgagtcaatattattagctttgaagctagagagtatttttcttacaagccttgccaaaaatttctaagcctttgcttgaagggaaaataccatatctataggctattgactaatgggtcgggctgacccaaacccattagagtttgtaaactgaaaaagcccattgatggggtaaaatacattaagatatttactttgggccaatttggtaaggcccatagttggggacaatcggcgttcgtatgcggaggtacacgactgacagtgacagttggggcatgagccgtgagtatgttgagggaatgtcatagaagtgggggtcggccgaaaaagatgatcttctttttattgtgtgcctttcaaaggtctgacatatgggacaagccgcctgattctttaaaattcttgccgggagtgtgccacataggatggttctcgggcacttattgttctcggacgccttctcgactactccttcttgggtgacccccaaaggcattcgtctttgtctccttggatatttgttgatagaacaaatgtccaccttctcgatctatacattcgacttattcatggtagaattatagttgaatccggactcttcgttcagcttattcatggtaaaactgtagttgaatctagactctttctctgactttgctcatggactgggtagtcattccatctaggcttagtgaatgggcccattaagctaattagacagactccaatgtacacgtgttattttcctagagacgcatataacaattatcccaaagccttcgtggcttgagagtcatggaagcttgcagccttcatctagatctattatagtacacggggccatgaacgattcgaatcttttaatactctgaagtgggaggttgtggaagctcgtgaccctttcatatttcatgattgaattacacttgtcaactgctctttggtatgtgtctatcacacagctcgcagaagcgtgtgttactttgggttacggactgacggctggttatttcagtgagctatctgaggcaaatatcatcattaatgtgcatgtccttgattccataaatggaatttaaagaaaacatttgacatccctagactgttggatccaggggattggtgctttctcagattcaatctgagcccttggatctaaagcacagagattgacactttccttataaatatgaaggaaactgactatttttcattttagtcactttgccatttttcttctaatttttcagagagaaaatacccaaaaaaattataaactcctccagtgaaatgttcgatctctgtgtccaacttcatcatcggttcatgatcgtcttctccatctccgatcaaggcttttcctagaagcacccttgttcgctctagtaaaaacaccagtctcattagattttcaagaaaacgttgatgagttcgtcaaaaggttacacaatttttaggagaaacacctcgcgcgtacttagaatccactgcattcgacttcaagtgcaatatgtacatgcttgtttccttgactttgatacttcatttcttgggtatttatactctgggtaatgcatttaatagggcaatgccatgattttggggttttcagaaggttattttctaaagtttgctaagtagctctgtcatgtatagaggttttaggcttttcacttgcctgagatcttaggaaattgtaaggtaattttgaacatagagaccttaccttgtttagggaaatgagattcctggtgttgttttttttaactatcaatcccacaaatgctaataatatccctgagggttttattgtgtcccgcttacattgttcgggacccttctggttccggactataatacgcttatattttcttttcttattcatgtgttccaaatctatcatctaggagttatgtttcctgggggagtaactccaggacttggggttataaaaataagagtcata

SEQ ID NO: 196871 - DNA, 1047 bp, Cannabis indica
ttctctttagtcaaaagtttctaggggcattgggaccctccctcactccctagccaattcttctttttgtaatcttaatcactaaaactcactattcaagataattgttaaatcccaaaactaattaggattaaacaaacacttaattagtataaattacctcttttgattatccaactgtaaagtaaacaaactcacattggatactgatcaagaaggacaaagaaagctacaaaaatattaataataatgtaaccatagagagagatcccttctcttttttatttcatttttcaccactaaaatcacaaagcccagaaaatcccagaagctgaaatctctcaaccatgcctgcaaggccttaccctgcaaatcccaactccctaacaactccaacaacaccaagtttcttaaccaaaactagagtcttgttcttggttttgaccatttctgcttctttagttatacttgcttctattctctactttctttaccatctttggcaatctcttgttcacaatagagctaagaccattccatttgattctagtgcacctctaaagcttgaaagattcccttacaaagagctaaagagtgctactaatgattttgattcttccaatgttattggcaaaggtggttctggtactgtgtttagaggcatattgaggagtggtaagttgattgcaattaagagacttgatgctttgtctttgcaatcagagagagagtttcagaatgagttgcagattcttggtgggctaagatcaccatttttggtgacccttttgggttattgtgtggagaggaataatagaatccttgtttatgagtatatgcctaataagagtcttcaagagtcactttttggagatggggttttgattttgagttgggaaagaaggtttgagatcattttggacattgctagagcacttgagttcttgcatttgggatgtgatcacctgtatacatgtgatgttaagccaagtaatgtgttgcttgattttgagtacagagtcaaagatttcagattttgggtgtcaa

SEQ ID NO: 196872 - DNA, 972 bp, Cannabis indica
ttgatgattgatattgattgatactataaaatacaagtttgtattaatttttaatatgttatattatgtacaaaaaaagtacacctccctcacttataaaaaaagtccggctagacctccttggttggccatttccttcactttggtcttacttgattatttggaactcttattaattgacgtgttgtgcatggtgactttgcttatccattgacaggctgtatttcacgtggcctcacttttatccatgtggacataccacgtcaagtggacggaaattggaataataaaaaccaacaagaacttgtcaaaacgtgttccctcaacactaaggagtagccctcctcgtattaaatcttgggtctgccactggatttaagaacttttgtctaattccgttcagttttactaacacggcgattatccatatgctaaaacgtacgtgtcatccaaacactactacaaatatggtattttttatcggtttgcaacacatttattcttttagcgtcggttgttaaaatcgacgtatatactatagacagttagacacaaaactatattattttgcgtcaattttcaacagtcggtaccaaaaattattgaaggttgaaagtagacgctaatagtgtaaaagtcaaattttataacatctcgtcgattttgtaccgacaaaaaaaaaatagatccggatcatattcatccgagctcacacccaaatctaaaacaaatacctaaattttaatgttcattctaattttatagatctaatatttaaatagacaaatacgcaaatctacacaaataaacatacaaaaaaaaaatctaaaatagatcaaaatacaaaatacaataaccactatcatgaggtcaaaaacctagaaatagacggtggtcgtcctccgagagagagagagagagagagagagatggggtgcatctgattatgacttaggttttgatttatattag

SEQ ID NO: 196873 - DNA, 3265 bp, Cannabis indica
gaaccttgtcctcaaggttgaaaacagggaattgttggcggatggtctcaaacttctcccatgaggcttcaaacaagggtaaattcttccaacggatcaaaacatcaagttcatcaccgggaccactagtgccatggcgcacattcagtacttcctcgggctccacttgcagttccaactccggagtaagttggggaggaaaggtggaagaagaggaggctgccccaatgacggctcggagctgagaaacatgaaagacggggtgtaccgctgcactaggaggaaggtcaagcttgtaggctacttcaccaacgcggctcaagactcgaaatggcccatagtagcgggctgccaacttctcattacgacggacagccaacgttttctgtcggtagggacggagtttgacaaacaccaagtcaccaaccgcaaaatggacctcacgacggtgggaatcagccgtggtcttcatgcggtgttgagcacgaaggagatgcattttgagatcatcaaggaaggaatccctatcttccaacatttggtccacggtcaagaccgccgacccgcctgaaggataacgcattaaagggggagggtcgcggccataaagcaccttaaaaggtgtacaccccaaagacgaatgaaaactggtattataccaatatttcgcccaagacaaccacttggcccacacccgaggtttctccgaagcaaaacaacgcaagtaggtctcaaggcagcggttaactacctccgtttgaccatcggtttggggatggtaggccgtactatgcttcaaaatcgtgccttgctgcttgaacagttcagcccagaagtgactaaggaaaacacgatctcgatccgagacaatagagcagggaataccatggagcttgacaacattgtcaatgaatgcttccgccactgttttggcagtaaatggatggcagagagtaatgaagtgactatacttgctcaaacgatcaaccacgaccagtatagtatccaccccttcggaacgaggcaagccctcaattaaatccatggtgatatcatcccacacctgggcgggtaagggtaacggttgcaacaaaacggctggagacatcgccatagacttgttgcgttgacacacctcacaacgacgaacaaagtcaacaacttgctgcttcatccccgtccaaaacacatcagcccgaaggcgttggtaagtgcgggattccccggaatgtcccccgatgggagtctcatgatattccttcaaaaactgaggtaaaagagaagaggtggcaacaagcactagtcggcccttgtacctcagctggccatggtcaaaggagaacccggaaacctccttgtgttgctccaaatcagcacaaatcttagccaagaaggggtcggctagcacttcttgatggaccacattccaatcaagccaagaggatgtagtaaggatgacacaagttgcgggaagaactcgcgacaaagcatcagcagccttgttagcaatgcccggacggtattgtatctcaaaatcaaactccagtaacttcaccaaccacttttggtgttccggagacaccaaacgttgttccaaaaggaatttcaagctttgttggtcggtgcgtaccaaaaacctccgacccaacaagtatggccgccatttgagaatcgccaacactatggccatgagctccttctcgtaaatggacttaagttgagcccgtggcttcaagacttggctgaaatacgcaaggggtcggccttcttacatgagaacggctcctagagcatatcccgaggcatctgcctctataacaaattgtttagtgaagtccggaagagctaaaaccggaactgtgaccatgccgtgtttgagagcttcaaaagcggtggtagcttcatcattccaaaaaaatcgatctttcttcaattgctccgtaagaggcctagcaatggatccataccccttgacaaactttcgattataccccgtaagacccaagaacccgcgaagacttttcaaattggtgggcagcggccaatccaacattgcttggaccttgttggagtccaccgagaccccagaagaagagataatgtgacccaagtattccaattgttgttgggcaaaacaacactttttcttgttagcataaaattggtatttagccaagttatccaggactacctgtaaatgtgagagatgtgcctccatggttggactataaaccagtatgtcgtcgaagaaaacaagcactaagcgacgaagaaagggtttaaagacctcattcatgttagcctgaaatgttgctggcgcgttggtgagtccaaacggcataaccaagaactcatagtgaccctcgtgagtccaaaaagcagtcttaggcacatcctccggttgcacccgaatttgttggtaccccgacttcaaatccagcttcgaaaagaccttggcaccatacaactcatcaagaagatcatcaatgactggtatcgaaaacttgtgagcaatgggttctttattgagagcccggtaatccacacaaaaacgccaacttccatccttcttcttcacaagtaatacaggactcgagaacgggctcgtacttggctgacagatccccccttgcaacatttcacacaccaatctctcaatctcatcattttgcacatgagggtaacgatagggccgtatactgatcggggctactccggagcggaggcaaatagcatggtctcgatgtcggggaggtggcaatttgtttggcatgtaaaaaacacctgaaaatcgctgcaacaactccaaaacagccgctggaatgtcctccccagcccccacggcagttgtatggccgaactccacccacaacccttcatgttcttctttgatggtcttgatcatcgtcttaagtgagacccgagtcttgtggagggtggggtcacctcgtaactccaccgtttggccgccccttttaaacctcatgaccccttccttccaattatggtgagtgtcacctaacatctccaaccactggacacccaagattacatcggtgcttcccaaagccaaaggcagaaaattgtcaattatctctactgtttgcaatgaaaccggcacccccaaacaaattcccgctcccttgaccgcttgacccgttcccatttgaactccataggcttccgtagttgaaatgggaagtttgagttgagtaaccaaggatgtagctatgaaattgtgagtagctccactatcaataagtac

SEQ ID NO: 196874 - DNA, 1223 bp, Cannabis indica
tttttgtaaataactctctccaaagcattccaaattacccacttaattttatatcacttatacacattataaatgatgaaaataaatcctcaacagctatatttctattataattttgaatttcaaaggattaagttgtgtgacctcttttatacacttaatgagtgatattatggaagttacaaaatgcatgtaagtactccacctgatatgttacacttaattgttttgttgcataagaaatgcatgaacgatctcttgtttcttggtgtttccccagatctgcatagctcgacaagagcaattaagcacaggatcagtgaatttagtgatgcgttgatcgacaactactagcctgaggattttgaaccctgtgtttccacacctcttgaccctggttgggatcttaaggtgagagtacacgcgtctgttatggagggctttgctggtttgagtttggttcaaaacgaagttgctaatgaggatgcaagggtgattctgcaatacaccaaagttgacaacgtcctagaagctgagttactggccattcttaatgcactacattaagcaaaggagaagaaggtcaagtcagtgatggtggaatctgattctttgattgctgtcaaggcccttgcctcgggtgttcttttgtttgcttagggttctttccctgtatttcatgaatatcgtgctttgttacctttgttttctaaatgggttgtgtcatttatccctcgagcggacaactctgtggaaatacaggtaggcaacaacttttttaaaatagaaaaactttaaaatttttaaagaaccatactaaaaatacactaaatcagagccctaaaaacttttttttttttttaattattttaaagcttatttaaaatttattattcatgttccacctttatagaatactatttattctaaaaaatattttattaactttattagagtttaataattattttcatataggattaatatgtgtatatattaatattatatatttaaaaggaataaaatatattaaaattaaaaaaagtagaatttgtgtaatgtattttaaaaaaaattgatgtatgatgtatgtaaacatatactccaatgacgtgataatcaaaaattacttttaaagttaacaaaagaatagaaaaggatgaaaaagagaaatacatgcatataaggtaatgaaatatactaaaataaaaaaaaaattatta

SEQ ID NO: 196875 - DNA, 1414 bp, Cannabis indica
tttttttatttcattaaaaatttatttaatggcgccccttacaaatattttctgtgatatcaaaatgcttgccattattaatagtattctttaattgaaattaactagaggaattattgagccaagaaaacggaatagaccactaagcttacatataaaaagcaggcgacaatattaccaaaattatgctaatagatacatcatcaatcacaaattgaaaatactaattttatattgggcttctctttccatccttttctttaataatttactaattttctcatagccaatcaataatattattaaaataaaataaaaaattatatatcatttatttacctaaataaatcaatatgatcataaacttcaaaattcacattgttatttttttcatctcgtaaatatgaaatatgtaaaaaataataataatttcctaatctgaataagtgcaagtatattatgctaagtaatggtatgtaaatataataatttgtaataatttatgtaaatgttataataacttataataatttatagagttaatattattttggaggttggaaattataaaaaattactaattagatcttatgttttgttaaatgacaaaagaaatcatgtactttataaaaattttacaaataggatcatttagcttaatttgtgaccattttttttttatataaccaacttgaaagataatttctagcagaaacaaatataaaatatgtaacaatttttgtcataatacttttatattagattattattaaattttattttgataaaaaatcagtttagaatactatttatagaatttaatttattattttacaaaccagataatccaattccaatcagtaattttgtaaaaaaaaaaaaaaaaaacaggagtaaatataatatttattctaatttatattataagaaataatttacgtaaattttataataatttgtcaacgacattgccttttgatgtttacatattagctattgtggcgaaggcgtgtctctttttcaaggacttgttagctatataatatattgccattgaattaattaggaatttcatttccttttaaaaaaaaataattgtatataagaaaataaatcttaatttaatattgggaaattttatttatactccaaaaatttctaaaaataccatattttaatcatttttattttatataaaatttatcttttattgtactaagtttttttaatttttttcttccaattcatattcttaaaaaatatacctaacaaataaaaataaattatattttaaatattatgacaaaaaaaattaaaataaaaaattatatgaaattttattaaaaaaaaaataaaaaaaatatatatacatgagttagaaaaaattataaaaataaaattaatataaaataat

SEQ ID NO: 196876 - DNA, 2164 bp, Cannabis indica
tttgtctacgaacaaggaagctacaactacaataataataataatatctgatgattttgccatcaaaattttagttgatgtgattattgattaagtgtcaaaaaaaaataaaatttaagtaattttaccgtcaataataatattaattgtagatttgtaagaattgtaatagagtagaaagataaatctacaacattaacaaatagaacaatatcaactagtttcacaagaaaatataatggaaggcactcaaattcattagtagaaagttactaacaaaaggtctcaaggaccatttagcaaagaaaactcataaaaggcatcataattagcagttaaaattgtaaagaaaaaaaaaactagaatatgttctttccattgatagatagtgtttctaaagaagttaaattcatcaaggcatctttgagaacatactctttctcgggtttacaatcagtaataactcgaagatgcttccaattaagcaacggataaggacattcgttcttcaaattttctggccagatgagagccttcatgtatatcatgattacaaaaacataaatgaattattaacatgattacatgaaattcaaataacaccacaaaatcatatcaaagaaaaacaaacatacctcacttgtgcaaacttgcagagttacaatattccaagaacatttgagattcagaagaaagtctctcatattggtaaaccactttgtatcaaagtaatcctgcttatcaagaattacaatttccccattcaacgaatttgatgactcaaacaatatgctaaagtcgatgtaaccttcatatcgaaaatattctaattttggggcagattcgattgtaattatctttgtgtttatcattccctttccataatgaaacacatattcatcagtctctaccactaaactttgcagatgtttatttgagattcttatgtgctcaaaatatgcatattggaagtgcagagtcaaattttcaagaagaggaaaattcgaaataaaatattctaacttgtttgaaggacgaacataattatgataacctaatctaagatttctaactttcttacaagcagagaaatctatttcgtcgaattgaaggcaacttaaaaccaaagattcaacgtttttggcttcaacttgaaatgtaatctcattccttatacctttaaattctaaaaacttaaggcttaaactttgcagtcgaggttgatcattcatacttaagaatttataaatatgtaactgcaatttctcaagagaaggagaacccaacaaaaacttatataccaaatcaacctttgaagcttttgaatgctcaatatataccaatgacaaagtttttaaaaatgggaaactaaaggaataagaattagtatccaactctactccattcaacttcaaaacagtcaaatatcttgcactgtctaatattctaggaggtaactggtagacactgctgttagtattacgatctttgtaaattttaagatgtattttcttaaccttattctcaactacaaaagctaaccatttatctacaagacgagcctttcgtcttcgaaaataatcattgaagtaaagcttaaaactaatcaaatcttttatacccgaatcgatcataaaattcttgcgctgtttcaaacaattgtcaacaaaataatagaagttttcaatatcatcagtaattgctttggagaaaaagagtgtagggactgaataccagatgttttcccaacgctttgaaagaatgcatgttcgaacaacatcttcagttggaagattcgacagaatgtgctggatcaatacatcaggaagttccgaaattaggtcatcaccagcaattgctgttgttgttttagcccattttttcgcggaacgaagaatcatgctcttattatgccaatagtattctaattaagcataaaaacataccaagattagaattagattaaggcttttcacaacaatgcttaaaagaatcaaaatataacataaaacccagttcagtaatataacagtactaagatattgaaaactcatcaattaatagaatcaaaattagaattagactgaggattttcacaacaatgcttaaaagaatcaaaaacataacataaaacccagtatagtaatataacagtactaagata

SEQ ID NO: 196877 - DNA, 2441 bp, Cannabis indica
aatgcacaaggccttcaggggcacagaacgctccaacaacagcagtaattgtagtccccggtcttggaaattcatacccttcagaagctgcattgtcagtcttagatgattatgtagtaacattttaggtggacctcatattgtcagaagcactcgaaatgcaaaaaaaatggtacctgaatgagttgaatcaaggagaagcttcccatttggtacaattattcacccaacatccaaagatgatgaatttaccaatgacttttacaaaagacgacgccagtcatgtgcacttccctcataatgaccctttggtaatagaggctcaaatagtaaataataaaagagtttctaaaatcttcgttagataatggaagctctatgaacatcatttttaaaggaacattccatgccattggtctagtggaagccaatctgctaccatgccctatccaattgcaaggttttaatggagacacattgatccccatgggcaaaatataacttccaatgactataaatgaggaagttcccggaagcaacacagtatcttcattcaagtacaacacatttgtaatagctgattgccctactacttataatatcatcttcagaagactatttttaatagattttggagtcgtgacatccattcggcatttgtgcttaaaattccaaagtaataccgaaagcataaggacaatcagaggagatcaaagaagtgtgcaaagttgttatagtatttcaaccataattgtactcatggtcggagaaggaaataactctaaagttggaacatcttcccagccaacactgggggtggtccaggaagatgaagtacttgatccacgaattggcgtggaacgtgtcatagaaccaatggagaaagtggaagaagtatgcatagatgatggagatcccaccaaggttatacaagtagggaagaacttgcctccggcagtgaaggaaaaaattatttccacgatcaaggaaaatagtgacgtgttagcctggactccttctgatatgaccggcattagttcccatattatttgccatgcactaaacgtagatctcaatgcggaaccagtccaacaaaagcggagacttctggattcaacgaggttagaagtagtaaaaatagaggtagacaagttgacaaacattgacatcctcagtgaagctctgtatcccatatgggttgtcaatccaattctggtcctaaagcctaatgggacatggagaatgtgtatagattcatagatctaaacaaatcttgttcgaaagactgtttttcacttctgcgcattgataaaatggttgatgctacctcggaatattaactcttaaccttcatagatgcgtactctagctacaactaaataaaaatgcatgtgactgatcaggagtacatcagtttccaaactgacaaagcaatctactgctacaagatcatgctatcttgattgaaaaataccggagccatttaccaacgaatggtgaatttttaggttcaaagaactagaaatacagtgtaaattccatagctatggagctcaataacagtgacttgtaaactaagactcattattgtctcaattacataaaaattttatctttttttttttttagtttaaatacttatttaatttgattttaaaaatcttgataaactgaaggaaataaggagaaaagtaaataccaaaataaaagtaaaatttgaaggattgtgctgtcttcaaaaaatcaaattaagaggtttaggacatgaatttaaaaatttaaagtacatggggccattatgattgttgattggtagaatgtttctgaaaataaaattcaaatatcaagaagtaaaactatgtttaattaaatctattaaaaaaaagaaaaagaagcttgtatgtgttgtttcacattgatgattggtgaaatttatattactcctaaaattttaattttataatagagttttgataaattttttaaaaaaatactaattacaatttctaattacaaaaattttctcaatatttacatctaaaaacatatgtagaaataaattataatatcaaaaataaattttttgatattttaatttaccacgtggtttaaaattactcgggttaataacgcttaaccgtgaaattctttcgtgatgggctaccgaaaaacaagatgcaccttgttgatataggtagtactaatcaatccatttaagccatcttcaactgtgtagttctatacctacacaatctcagaatcatcgcgcatgactttccctaggtgacgtgggattgtacagctcccggtcttttcccttcagatcacgaggctctgactatcacaatcaccccctttagaggtccgacatcctcgtcaaccacacttacggctaggtcaatgctctgataccattttgtaacatccccgcttcaagcctt

SEQ ID NO: 196878 - DNA, 874 bp, Cannabis indica
actactttgtttttccccaaatactagtcccacataatctttatccccaaaccatcaatgtaatattaaaaaaaatgcagagtcaactacagcagtaaagagaagagacactcacctctgcaatcttacaagtagcatagtgaccttcctttccccaacccagtatacctggaatcaatagaagaaaaacaagttccctacaccataacccagatccgtgcatatctccaaacaaagctggaaagatacctaattgagcccagataagctctggtgatgaaattttcctggggtttcagcctaacaatgatgaattctgttaatccatgtttggctggcgaggaagggtaaaaaattcgtggaaaatggaaatcaaacgctttaaagtttaaactatggtttgaaagtgagacaaatgacgatcactgcaaacagagcagatgttaaaaaaaaaaaatagacaaaaacacaagatttattaatgttatactttgttgggtcaattttaggtagtttcgtaaaattggagggaaataaaattaagaagttatttatcaattattttataattttttctttaatttatttctaaattaaagtcacataactaataactgtaaaattttctcatttccttacagaaaatattaatatatctaccatggtaagattgtgtgcttctatttttactgaatatagatagatacttttcagcttagtcaacatttgcatcatcggcttacattaatttttttgtattttttccaacataaatatctatctatctattcaacaactaaatatgatttttctaataaaataaactcatcatctatattcatgtatttaatgcaaaatttgtttaatattgttc

SEQ ID NO: 196879 - DNA, 2568 bp, Cannabis indica
gtaaaataataaaatattctaattttttaaaaatactgggaaatgaaaaatttaatattaataagggaattaccctatatactatttttttttttcaaatttacgatttgggtttctaaagtggttgcagcgctagttgcaataggagtttctgtacgattttttgttgcaatttaagttacagcgctagttacaataggagtttctatgtagaatttcgtaaaaatacaaacaaaaaaaaaaaaagaaaaaaaaaacgtaaaaataaaaatagtcttagttatttttttaacatttatactgttaagcaccaaaacagaacaattcgtcctcaatctcagcaacaatgatcggtagccacccaatgacaacaaattagtcggaaaacaactacattttttgggcttacaaaccgggtgatttcaaattgaagggaatctaccaaaaacaacttctcagtacttggaaatcaataaaaaaagtaagaaactaaaacccactaaaataaatataaatgtcgaacgattaacaatgttagccaattgttctttaagttgaatctaaagaacgaattaaattactggagatttgatataaatagctatatgacggtaccaatttgaattttgaattgatttttttgaatgtcagaattatagctattcttattcttccatttaattatctcatgatcaacaccgctttgatgttgtttgtgaatgattaaattaaattcatgagaaattactattataaaaaaatgatggggcaactcgtaaaaacaggggctaattttaaaacaacactggtattagttgttttatagttgttctactattgttttgttgaaactatgttgttgaagtgttgctatatggtaaattgttataggacatggaatctataacaattctataaagaccaacaaacactgagatgaaggaaaacactacgttgattataaagctagtggcaagttcatacctaaagaatgcaagtatgaacaacaaatgctaatgttatcattggaatgtgatcccgcaacaacaaacctaaaaattcaatatcaagcaaaagaaaaaatatcaccaataaaaatattcaacaatgcaagtctctttttttacttgcagcttaagatcaaggaaataaaattcaccacatattcattatgtgtcaacacacacaacaacaccacaataactgctacataccattcttcgcatcaagaacaaaaactattgaacgacattgccaatgcttgaaaatgggccactaacaactaaagccaacacaaatagacaacaacgagaagaacaacaaactaaagaagaagaaggtaacaacatttgacataattgactatgcaaatctagtagttgaagaaatggtagaacaactataaaacaactagaaaaagatagatccagagattgacattaatcatacaaagctcatcacagataaattccacccaaaggcgtaaaaaggacatgcatataaagacataaaaacacttaagagtgtcataagctattatgcaatctgtttatctcacctttagtcaacgacactgagtcaatcaaagtgatgagataatggataataattaatatatttaagcaataagaatgtcataatttatagaggttcgaccccatgattatggtaatagtatagtctactccccttttacttgtattacttcaaaaaattattaagatcacaaggagctagccaagtgagtttctcaataatcttaaggaaaaggttacaattatttaggcaggtaaatggctctctagagaatcagaactcggatccctcaatagtgaaatcactctactatttatagagaaagaaatacatgaaattggtttcctaaaacaaattagaataaaaagggaaacagaactagttcctattatctctttacaatgtgtgttaaccctatcaaaataggaatttaaatgggagatatttatgggaaatatccctaaaaaattgtgtttaagcttcattcaccctgtgcggggtacttggcttcactatcacgttggaagctactccaatggtaacattaaacttgtttggatgttccatgttggtcttcagactttataattcttagacatgaatcaccctgaacggtttattaagggtaataccgtcagtccaagtttgagaatgttctttgcgtctcactcataaaaaatgctacatcatactgttctaaaattgggataaaacttttccccaagtctgcgtgggaaccatttgctcatacatggacttactcagcttatggggtgcttgaatgggtgacacatgtcaggatcctattgtctaccttgtcttgatgaggttagatcacgaggtatgacgattcgactgtcctttcgtattttaggcatttttttaccttactttaaaaaatcgaccttgatatgcacgatgacggttgtactttccaccaagtactgattgtactttggttttcgtttttttggggggggggggggaaccgaaattttttaaaactgtgattaccaaattaccccttcaaca

SEQ ID NO: 196880 - DNA, 750 bp, Cannabis indica
aatctgaattttgactccatgtggccaactttgtcgacatatttgtgttgaatttaaggtcgttcttcagttgaagcaacaaagatttctgatcactgaagcattgaccagaaacaacatttagctccacactaattagaaataatatcaagcaaaagggtgtgaggaaaggccatgaaaacatataaattttcatcggaagggcaagctaataaacaaaatgggctaatgaaatgaaagaaagggtggcttttcaaggttgatcaatggtgaaaaagatgatatttttcttcttctacgttatccaagacaatggtgaggtttgctataggcttatagctaaaacaacaagggatgaaactgttttcttttgcatgctgaacgtagataattcaggtcgtctacctttttattagatactaaatattagagaagagatggcttaacatttcactatcgaggcgaataaattaatttatagtaataatattgttttgcatgcacttatgtgacaaagtaagtattattttacccttatctttaacatggttaaaattaaagctcaaactaattaatattttttgggggggctttttcattttaataatttaaaacaggttttttttttttttttttcatttttacggaattctacatgaaaatttttatttcaactagtgctgcaacttaaattgtaataaaaaatcgtacagaaactcctattgcaactagcactgcaactactttaga

SEQ ID NO: 196881 - DNA, 1296 bp, Cannabis indica
tccttgcaaacattcctccaagcaacagcagcaatccccttaagttgatggctgccactccataaaaagctcctgcaaatagcctctatttctgaaataactttctttggtagcactattatttgactccagtaagagtgaatagccatcaaaactgagttgataagaaccactcatcctgcaaaagtcagatgtctagtactccaaagttctaattttggcttccattttctccaccaagagagagcactttgatgaagaaattttcttcgcacatattggcactcccaagtacctaaaaggaactccatgccgtttgaatccagaagcatcaaggattctctgaatatcagtgtcacacatgttattacaatacacagatgtcttgaagggttaggaaataaacttgatgtttgagagaagaggtcttacttaggtgcattagataaaatgtctttcgacttaaacttcccgaagcatagtttcgttatgtggatggccatgcttaacttactcaagacaaaggacaagatagctaaataccatcctaaaattgacaaaacttgtcgttattggtccaactaagtattgggtcccatataatttaatataacagcttttagggagtattactagccaattacaacgagacatatcaagaaagtactaggtatcactgatgctttatagcaatactcctaactaattagccttagcaaaagataaaggaattgttccagtcatatcatatctgacaattgtcataaaataaaaataaatgattttaggttcttgaactctaaaccaacaaacacaacagtggactattcaggtggccacactgttttataggctcttcaatgacttttcaccatggctaaaagaaaactactttgatggctttatcattatcattacaatcatagaaaaatcaatataaaagaactcaaaatggtaaaaccacaattgggattttcttttaatatgaattggtagtagccagtcggtggttactggttaccaaagagtactaaataaatagagtcagaaaagtagattgatttgactataacaatgaactaataataaaaataatagtaacaagcacaatccaaaaatacgtgaaacttagtatttgtaaacatgacaaatataatgtcaattcaacaacaccttctattgacatgcttgacggaccaacacgacttcattccctactcagcatatacacctataggtatacaaatcaagtagatgatcagatcttatacatattatatatatctgtatatatat

SEQ ID NO: 196882 - DNA, 1789 bp, Cannabis indica
tatacatgacttagctcaactgagactgaaccaaagactaaactgaaaaattaatcagttaagagaaagttaactgttaacaaactaaactaactttcttcaacaatatgtatgtaggagtgcattaataattttgccactatccgatccataaagaaaatttgttttttatacgtagataaataatagtttatttatttttttagtatgataatatgtattgtaattatagcatgcgaaaatataattcaaaattgtccactttgagcatattataaaaaatattggtgcaactactgaactggtattaaaaagattgaactagttttaattatgtattaacccaaaatatgattatttgtgaaacaataatttttttcggcaatgtaaaagatctatcaatattcatttacaataaactaatagatattagtaaagttttatcttcttcttcttctttttttgttttttttttttttaagtaaaaaggttttgtgggattatgtgtttgcctaatactaataaaataatggggtagcccaagatgaatctaaatggattgtgggttgctcctcctagcccatttgagaatgaaataatattgtgtttgagaactctccatccaaggccctacctcatatgagctcaaagttttgagtttcattttctaaattcactttaacatgtttatgttgcttttggaagttcaatttatttggtattgccttatataagtaagagagatcatacaatttgacattttatattatactccacaacaagttaattataaccgagattgattttaccaagtaactaactaactcatgtcgaccaaaacttattaatgcaaagacacgagttttatcaacaaatgatggctaggtgaattttcattattatttatggtttttttttggtcaatgtttataaaaatgtagtttttttttttcaaaaacaatattttgtgagaaaagttccaaaaaagttaaaaaaaaaatgaaaaaaaatgttcagagtaaccatttaccatatattacaccttgataatctcataaaatactataaaatgtgtaattttcagaaaaatgcatatatatacatgaaaaatgttaactattatgaaaaataccaaaaacaaaatttactttggaatttgagcatgagtaaattttaggtaccattatctgttattgtaattatatgtatttttggtaaggactgtaatatcttaatttgaatgaaaacatttttagggggaggaaagaagaagaagaaaaataaaaactggttggaaaaaaataaaaagatggtttctcagtaaaatgaattatcatcttcaaagcttcttcaaaactctcccagtcagcttgaacgccgtacggaaccaccgttgcttttcggtccaattcagaaccaggtttccccttttaccacccacctatcctatgctcacactttgaaaaaatgatcttagttattaaaacttacactaatcagtatatatgtttttctgggttcggtagaatttgtcttgataagacagaaatggaggagaatggtctatctggtggttctgaggtggtggttgctgaccctgataagttatcaaacaaaatctctgcaattcgggctgctggttctgcaaaactccaagtaccttcttgcattccctttattctagtttttattttgtgattttcgggtccttgatgtttaagaaacatagttcatctacaggcaaggtaacacattacactatgttataaggaatatacatatacattta

SEQ ID NO: 196883 - DNA, 1087 bp, Cannabis indica
aagttgaatggtcatgagaaactacaacacaaacaccttatcagtggttgtctccaagggtggtgtttgttgtacgaaaagtggaggagaacacttcttttttaagaatgtccttttaatcaggtattgtggtataaaatgatcaatgaattcggagtggcgaagccccgctcatgcacctagttgtttgtgagctaattgaaaggagacaagaggatttcattattgaggacaacaaccattattgctatcttgtggattgtatggcttgaaagaaatagccgaatatttgaagataaagaatttgaagcaagaagggctatgagaaagctcgggttttttatttctaaaaggttataaaggatgtcgttcttgtttacctgcttacattatgttgtttgtcattttgtgtgcttcagtggtttatgttcttgattgtaaccacagatttccacaaccaaaagtgagggctataaaaatcttgggaggaagtcactcatggacatgtggccttttgtctcttgtttttcttctttttttttttcttgataaagagaaatatgtattcttcccatattaagaataaacaaattaaaactcacaagaaatgacagataccaatgaaaacaatagtggaaagagagcaatattaacctggcttacaatacattccgagaaaggaccttgaactctttctggttgatgaaagaccatcgtagtactggaagacaaaacattacaacattttaattttcataattatgcacacattttcatttctaagatgtaatttaaatcctggtgagaagtgtacccaataccaaggcatccattttcatttgagccccaagtgtacaattctccaccacctatgtatcaaatatacatgtcagtatagaaaaagacatgtgtcagtgtttaagctatttttgaagacagtaaccagcatgaagaataacactaggccggaaaatcaaatgctaaggtaatagcttggccataatacttctactttgattctatatgatttcatacttggtaatttgtcaggaaacagccaatagatttagttttgtttttttttttt

SEQ ID NO: 196884 - DNA, 1618 bp, Cannabis indica
atggactaaattcaagtatctcatttcaatcacttcaaagaagttcttagactttgtagtgaaaaatataatttttcgattcagaattctcatgaagatagtatcaaacgatgagactcaatttcatagtgacttatttactgagttttgcaagagaaaaacaattattgaaagtttctcatcagtggttcatccacacgaaaatggccaagtagcggcagtaaataaaattctaaaagattctattaaaaagaaactcgacccagtgaaaggaaggtgggttgatgaactaccacaagtgttatgggtgttgagattttattccctaaatataattcagtttcaatgtaatgttatttcctattggtaagatctgaaatcatatcttaactttatcatatgttttttcacatatatatttcataattatatatttaatatataagttttattaaattccgaatatatagttattcacaattatagtaatatcatcatagtggaaaaaaattataattatatgcttcaaaaatatttagtctcactatttatcagtgcaccagatttattagtctcactataattatatgcttggtgacagggacgcgccttgctccaacagtaagttaatcatttgggtaagtgatggacgtcaaagaaacacaacaacaaagtcgagaagagggggctaagttttggttcagagagatgagtaggggtgaggaggttgtatgagagagttctctaggcgaaggattgctgctaaagtggggaagaaaaaataattttaatcgccaagactttcatttatatgggtggcaacacttcaaacatttttgaaataaacggtctagattgattccatccaagtctaccccatctaacgactaaagattcgaaaggttttcatttaatacatcttaagaaaaagaataaagtatttattactcatcatttcgtggctgcatctctaacacaccagaaacctagcgtcttttcaattccaattgtcactcgcttcccacgagaagtgcgcttaaactcagagtgtgagcctcacgactccactaagtaggtaccacgcttcagcaaattgacaccaataccacaaaacatgataacccttcagatgcctgagggaatgcagaagacttctttcacattccaacacttggtcaacaaattacaaaaataagacaagcattcgggggaaagctgcaagctcccaacactcatgagtcttgggagcttggggggtaaatgttacctgtattcttaagtgaagtgtacatggcaatcacgaaatggtgccacgtctaattatgcatggttagtatatacccttcgcccctcgatgtcatagaaggcgttatataccagaagctacccggaggctcttccctgttagtgaaggcagaaaggaccttttgagattctcattagtaaaaactactatggaaagaagggatacagaagttatgagtgctccaggatggtagcaggttagtctggtcggggagagccttagccaaatgttcttaaaacctattcaggtgtgtcctatgcagagccacatgcgatggttgcatactttctgacaccaaatcaaattttgtcc

SEQ ID NO: 196885 - DNA, 2683 bp, Cannabis indica
aacaagagtagagagaaggaagaggaaaattgatgtcataatttagtttagtttgattttgttaaataaatttggttagtatgggtgttgtatttatagtttaagacaagttgttggaaaaagaaataatgtagctgtcaaagatctcatctttgtgtctccatttactgtcaaaacaattaatataaaaagaagcacgtgtcttttataaatgctaaaggccacttaagtttaataaatattatagtaatttgtatctaaatataagtttaatttttaattataaataaatatttaagtttaaattttaacggtaataatatctaaattataattctagaatttctgtaattatttgattgttaaatgtaattaaattgttacgtggaatctgattggtctagcttattaaatttttaatttttatttaaatatacaaataagaaaatgacacgtggattacgactggacatttaacggctagatacttacggggttttaaaattataacttaggtattattaccgtcaaaaattaaacttaggtatttatttacaactaaaagttaaacttaaatatttatgccgtaaattattctaatatttcttaaagtaaaatatttgtgacccgatataaaattgcatcaataatgatattacattttaagagtgataggcactatgggtaccctttatagcattttttataaaatcttattaagataataagagaattgttaaaagatattattagtgtctaactctcctcagtgttataccactattagtataattaagtatcgaattctatataacttaaaaaaataatttttagtagaatattgctaaagcgctacctatatattgtgcattattaatgttcaatagaaatttataagaggacaatttatttagttaatttttgttagtattggtgcttgtatttataaatgttagctgtgaaagaatcccatgcctgaactgaacaggatcgtctttgcgtatcccatactctgtcaaaacaatataaaaagaaaaacacgtgttatatacatagtaatgacaatgagtaaaatattgttacataataagtgcatcttcaactacaaatggtatctctatctcctctccattatttaactctacttttataagttttagataatagtataatgacactataaattaaacagatcccctctacatttctgcatgagtattgctattaaagaatgctagtgctagacacaacttaaaggtaagtaaggtgtgattaaagagtgttgttattggacaacagtattgtgtagcacttttaaacacatcgccttgtgattgactaataatatttcctaaaagttattacattaaattatatatgatctgaatcttaattagatcattagcgatattaacatataataagaaggaaataaacactactggtatcttctagcatttttcgtgattaaagtgtataggattcatctttaaactaattagctatagaggagtagttcatagatcttatatatgatgttatatttctagatcttagtaatgtaggactcaaacatcccttcaagatggtggttagttttttttaccaatcttagattactcactcataagtgacattatcggctcacaacgaatcacaaacaactaatttttggcttatcttttcagactgacagcattttgagctcacaacagatcacaagcgtctcttttataattcgtctttttagattgacgacattttttggcttactatttttatcacaagcggttttggctcatctttttggaccaatgatactttgagctcacaataaatcacaaaaggttcttttaactcgtctttttggaccggttattggatttagatcgaatactcgttagagtttaattagtttgactcttatactgtcttaaaatctattaataaggtatataaggttccatctcaaagctaattaattataaaaaaagtaactcatttatcttatatgttatatttctatactttaacaatacgagactaaattcatttttaggttgtgctaggtatgcatcggttctttttaatatttcttttttacactgagaatgcaaaagtatgagaggaagaaaaaaactagagtaattaatggaaaagtatgtagaagagtgctttggagccgtcaacatggactaaataaactataaattaatgatccttcatccttctattctactcaaaaatgtaggatattatattttatgtttaaaaaccgtataaaaatacaccgacacatataagaaagaagattccttatacactagcttctcatttataatatctattatatatgttacctcctcatttctattacactcatttatgctaattacctctgaacaaaggtagagctaagtataaaaatttaggggatatttattgagtaaataaatgaagtggtaaaatattaaaatgctatactattagaggaaaataaatatcattttaggaatctgtatgaatgttgttattgtaagaatttagacaacaccaaattcatgcgagtattcaaaagaaataagaatacgtagttaaaaacgtgctagaatagcgagtactccaattactctctactaaatagacaaaataaaagtagaaataaagagaaaacaagagaatt

SEQ ID NO: 196886 - DNA, 2274 bp, Cannabis indica
gccattgttggaattggaagctcatcatcatcatcatcatcaactaaggtgtttattgttccttcaatggtggttaatgtgtttataggtttattagttttgtctttatttttaggagttaactcttcttattttagtattattattattagttctaacaagaaaaaagaaagagaacaaggttttatattataccttttttggatgttaaatatgtaattattgcccttgttttttagtggaaatattatatacatatcatttgacagttttgagaatttttcttccaaggctgattgtgatagtaatacctttgttatgatctatttttatattttcttattcttttttaggattttgaattttgattatgatagttaaaatttataaaggtgatttgcagtgtaactctatgtttctttttttttcctataatattctatattaattcaccctatatatgcaataaaattttaaatgaccaattttaggatcaaattcaaattttatccttgttccaaataaattcacaataaataaaagctaataaatatttgcaactgtaaagacaagtacaccaagtcttttctttgtttgtgatgttttttttttccttaagcaaaattatcaatttgtgaacattctagctattaatgctaaacaatgggataatgttattgtgacttagttcccttgaaaaaaaaaatataccgagcattttgatcaatttaatttttttttttgtttttatctaaagatttcatttaactagatcaacgcggtctcaacaagatcgtttgacaaaacataaaaatctttaaaaaaaaatataaattattacaattcttaacgatactaccaaaaatagattaaaaaccattcaattgtctaaagcttgtactaatatcaaacaattagattgtataacggtagccccgggaaaatttcgctataaccacaaaagcaattccttgagagccacaacttcagcaatctctggagaagtacgcttaagccgcaatcacgaaatcccaaccacgacctgacccaattaattctgaacaatcttaccaaaaccataccttccctcctcgccaaacaatacaacatcaatgtttaccttgagttttctataacctggtttagtctataactcaaccccatctaagagataccaaatatcaaacgacagaaataaacttctttcttgagttttcctccattgatcaagagtgatacgagccaaattgacaacgaattccacctaacttttcttaccgttccacaaatgttgattctgtgccaagtaaattgcccaaactaacatcactacatgaacactttgatcatcacccagccgtgaaaataagtgtaaaaaccagtctctaaatgaccctgcaacaactaagaccacagccaaacatacacagtttaactgccaaaacttcttctaaaataccacaatcattcaacactaattttcaatacttagtttcaacactatttttttattttttaactttaatttgaaagaacaatcattcaaagattatgaaaaaaaaaatggtacaagtcaagcaatttcttttagacatttttgtgtaatttattatttttgaagtcaatgaaccattatgcggattacccggcccaacataaattccccactctacccatgatggggaattatgtaacatgaggacattgatggattaagataactcattgataggaccgattctgagttaaaatgggccatagataaaaaaaaatagatccttactataaagataaatgatatttttaaaaaattattaaaaaaaatatttacattttttaaaagatatttttttaggcccctaaaatgagtgggccctaggcgcgggcctagcccgcggcccgcctatacctagggccaaccatgctcatgggggagcagtcttcgactctccacttattacccaacattatttccattcctattggcaagccatttatatgattgtttaacattatttcataattttgattatctcttaacaaccttgttagagagtcttgtaatgggttatttctctcattatcaggcctaattctggacatagataagctaggtttgtgcctatagcccacctagtataagaatctaaaaaaaaaatctcccttttaaatttatctacttttttttagtaattttaaaaaataccacattttattttaaaaagggcttcaaaatttattttttcgtatcacctactatactttaggacgacc

SEQ ID NO: 196887 - DNA, 800 bp, Cannabis indica
gtgaacatcttcacatcgggacacaagccgtttctccttttgttaaaaacctcagctgccaccctcacgtatccgtacttgcaaagggtatcgagcaagaagtggaaatcctccgacgtcgttcttgtcccgacgaaggtctcgatgtcgtcgaaggccctgatcgcttggcgtgtcaggccggaggatatcaaccgtcggatgaggatgaggaaggtagtagaagtaggagtgagattgtagttcgccatctcaacaatgagctgccaagcaacgtcgtattggcgaactttagcgacgatgtctataaggagattgtacgaggcggtggtgagaggagaagggtttgggatttgcttggcgtagtggaaaaaggcgatggcaactttggaagtgtgcttgagacggaggagggtttggttgagaaggtgcggagaaagagaaattccatgtagctggagagaagattccatggcgtgataggggttgtgatggtagagaaggagcttagctactgaatcggcgtcgtttgacggctccagcgtcgggagttgatgatcgactgagaccacggcatcgtctaaatcagaagaagaacaagaagaagatgaagagaaataatagaaaggagtagcagtgagtgagcgaccaaggggggccatctctctagccagcggccattgctggagcttcagaagagtacaacctaatcgtttgtcgggaaaccagagcctcctcattttctttcctctgtaacttcacaaacaaatagttgagaaattatagtaaactgctcaaaa

SEQ ID NO: 196888 - DNA, 1694 bp, Cannabis indica
atttttattttttgaaaaaattatatactattataaggattcttttaccgtaattatatatataagatatattcatagataactcaaaacctaaaccattcttcgttcatatttttcattctcttctttaatctcttttcttttactatctcattctcaaatggcttctcctcaaattgttggcaattctttttataaaatattcccatacaatcctactagaatagaaagtacaaactcggtatttctaatttacttatttgcaaattttactcgtcattcactatctatggaagtttctactacttttacaaatgtcgtggtactttttcgtgacacgttgatgaataatagcactgacgctaaagttattctagaaaaatctcttgcaggagttcaccttccttcttctgtgtttcctgtaattgatgaaattattaattatggtcgaaagatgtggaatgacaaagatcgtaatttaagtgtgagagtggatgttgatgttttcgttgatgaattacctagtcaaccgatgaatgataatgaagggtattatgatgaagatgacgatggcgatggcgatgttgatggcaatgatgcgtatcatgtgtatgatatgaccgatattcatattcgtttcgtggcagcaagtgagcagtcgattgaaaagattggagaaagatctataaaggatggtcaagtaatttcgtgcttggtttgctttgagaatattgtagtcggtttggaagctacaaagttaacttgtggacatagatatcatgaagagtgtattgttaaatggctacaaacaagtaaattttgtcctttgtgccgatctgaagtagcttaaaaaaatttaataatgtaataaactcctaatttgtgactattacatattgtaatcatttctatatttgtttgattactaaattgtattgataatattcataaatgaatgaattttttttaatcttattgtttttatgtttcgcttacattttgtgagaatttgtgttactcaacaatggatatataatatattttcatgttgtaatatatatatttaaaatatttactataaataaataaataaagttgaataattgagagataacaataagaacatcatttgttaattttgttgcatatttaacataatctgatttttctttctagatacaaagaataattaattgatcaatatatattttttttttgccctttttttggtgaattaaattgggaataatatataaatgtacaagtacatatagatgacttatccaataagtctacaagtatattattaactttctcaaattaaacatataaaattaatctttctcaaattaaaatttttaaaagtcatataatatctggtattttaaattatttagtttcaaatttaacattaagtttacatatatggaaatctaaaacgtatattcttaaaacatgaagaaaatatttttaaaaaaaaacatgaagaaaaatcctaaaattattaattaattgaagttatttaaatatggaaaaaatatatgatagatgtcattaacacatattttataatgagatcacttgtgtgtggtggtgttggctcgaaatcacttaagaatagttttgtgagtagttatcgataggttcactttctctgattccctgattggtgaagtcacgacttgtattctaac

SEQ ID NO: 196889 - DNA, 551 bp, Cannabis indica
accaatcgagctttaaatctctcaatggacccatctgcatggaatttgattttataaacccacctacaaccaatcacatgctgtccaggaggcaatgtaacaattatccaagtttcattggcttcaagagcaatgatttcagtagacatagcatgatcccattcagggattccatgtgcttgttcaaaactggtaggttcagtgagactagaaatggccagaaccaaagcacgaaaactggggacagcttggagtagtcaagcacctggtttatagaatgtgcagtggctggcattgagtcctgagaagcagcagagacactgttagaagacaaaaagcaatggtaatcgtttaagtaagaaggcttactgagttttctaacaggtcgagtatgcaaaggattaggagaaggagtaacaggatgaacatgtctactgtcggacaaaggcaaaacagagtcagcatcttggctgagagaatcatctgaggaaggctcagtaaaaacagcagagggtggtgtaggatgagaaaaaaaatgttcatactgaggt

SEQ ID NO: 196890 - DNA, 1170 bp, Cannabis indica
cattgtctagaggcttgtttgaggtcgtaaatactcttgttgagtttacaaacgctattgggaggggctttatagccaggtgggattttcatgtagacctcttcatggaggtcaccatggagaaacgcgttgttgatgtcaacttgatggatatcccaattgtacatggcagcaagggcaagaaatattttaagtgtattaaaattagctacgggagcataagtttgatcataatctattccttgtttttgattaaccctttggcgataaggcgagccttaaagcgaacggcttccccttgttggttatatttgactttataaacccatttacatccaattgcttggtgtccaagaggtaatttggtgacaatccaagtatgatttttttaaggcctcggtttcatcatccatggcctttagccaatgtatgaattgtgaggcctcggaatatgaacgaggttcaatatgtgaataggctgcgagggcagggaccctgaattgtggacttagtttagtgtatgagatgaacttttcaataggaaaagctgtagaggtggtgtgacaaacgtagtcctttaaatgtgagggtttgtagatggatcggccacttttggattgtttatgtgggtcaggaagtgttgttgaagtcaaattattgatggggcaaaggttgtttgttgctgttggtttggatatagcagcaatgtcagcatgtggaggttgagaatcaatgtgttggactgtgatatcagtttgaatattagagttgcattgtttggagttattgtcaaccgtatgagttgttgtaatgttggaaggattggtcgaaagtgtatcagcaacagcaaggtctggtgtagtttttggagcagcggagatgataccaggtgcttctttagcttgctgaattgttgctggtttagaaataatgccaggtacccgatggggtgtggatttaatgtgtgtattgagtgatgttttgggaaatataccagtggaatctggtatattttgtgtgtttacccgagagagaggttgagacattgggaggcacggttcttgaaaaaaactgtgaatgtgagaatgagagatgtggccaattagaggaaagattgtttcataaaagacaacatctctagagtgatatggttgttttgtctcaatgtca

SEQ ID NO: 196891 - DNA, 505 bp, Cannabis indica
tatatatttatcttttcttaattatattaattacatatcaagtgtggttatctaatgcaaatggttgatttagcggttttatgctattataacagatttatgttgttatttttttcaagttaacagtcataactaacaccaacaattaattaattaactttctgaaaaaataaatttataattattttatttgaaatatttaaatttaattattcattttatttttaaaaaaaatatataatatacaagtctaaatttaaattatatattaaatccatttaaaaaaaaattatatgtcaaatcgtttaattaattttttagaaatgaaataatttttttttatttttattatttgaattaacaattaagtaaatatatcattcaaaccgaaccgaatttagaagtaggcacatgcctaggagtcaccagaactccaaaaaataattcaattcatttttacatgataaaatttaggacattcttccccttggatcaaatcccagcc

SEQ ID NO: 196892 - DNA, 1055 bp, Cannabis indica
agtgtgtatgaatttatagtgaagtatcactgacttctcttatgtattatttatatatagtatcaatttcgaactttattgctggtctaacttagttgattattttttatgggattcattcccaatagatgatcacccattagacattctaaaagtgttagatctcgacagataagtatttgtaaatgcaaaatttagtcgactcatccccaatagatgacaacttagactagtatttatgatgttcaaataatggagaacttataaaataagaataactttgactctctcctaatcaggacatcgttggatttttattttaatcggaatttatctttatctttcctcttagctttttcattaagaaattccttaagataatatattattggacaagaaggtttataatacatctgcttatgatgtcactctattttcttccaagataatgaatggacctagacctggaccccggacctaaactccggacccgaattctagacccggacctcggccctggccccgaacaccaaacttgaacccaaaccctgaacccagggtctaagtcgcagttcgggtttggattcaggtccaggtcccagttcaggtttgggggtctgggattcgggtttgagttcgggtctagggcatgttccaagtttagggctgggtctcggtagaggtcatgatcttagtctaagttcgagtccaggttgtgatcggggttaggatcgagttcattataaagaatttataattttacacagcttataagtacaagtcaatatcaaatgtagtattgtattaaataatactaatataatacaatacatataatacaatacactactatacaatacaatataatacaatacactacaataaccacgatgtactaaatgagctcttaattacatactttattttcacaatacaaaaacactagttagttgacaacaaaatttaattttgtgactaatatttagtcacgataaaatatgcctaattcgcacccagtgacatcattccacattctataaaaactatataaaagg

SEQ ID NO: 196893 - DNA, 874 bp, Cannabis indica
atttttatcttgaattaaaaataaattgcactaaactaattattccacacatagttaattaataattgtccaatatgctgcattaaacaaataattattgttcacacataattaaaaacattcataaataattattgtccacaaataatttaaaattaaactaataattattgtccatacataattaaaaacttacactaattattattgtcttcatcaagtacattatctaaaatttctgaagtgtcggtgttcaagtttaaatgggttgtttgtgcattgtcctgagcttgtgataatggcggtgaagggtaatatgggctgttgcgaacataataactcaacaaattctcgagtttgtggttgttgtggcagagtcggagattgttgttggtgcaaaaaaaatcggagattgttgctgaaatttaccacgaaaaaatattgactttatggactgaaaaaatgaaacttggaaaaggtggctgcagtgaacccccaatttgactatacatcattggttgctgagaagagtccccaaaattgaccaaacatcggttgttgtgactgtgatcctccaaacaaattagagtagaaaagttgaggagactgcgaggagcgtccaaacatgttcagaattagaggggatttggaggaacttccatgcacgttaggagagaactgctaagcctgttgaaacggttgttgttgcggccttggacaagttatactaccttgaggctgtgttggtaaatattgctatgggtcatacaaatcagaagtgtcgtgttctggtggaaagtgttcacgcattctattcccatctcagccataataccaacatcttgggaagcagttgaccctgcttgagattgac

SEQ ID NO: 196894 - DNA, 1292 bp, Cannabis indica
tttagggtagtttggttggaagtaatgaaaatagatgaatagaaatgacatttaatacgaggaaaaagttatttttgttgattatgcattagaatagcctttcttccaactttggaaggaatagccattccaccaaaatagtggaaaagccattccattgttttcgattgcaacaaaacatatccttagctccaaaatggtgtaagactaatacttaagacatatcagcacctataaattgttgtggatctaatgagacaccttaactatgcaaaattatcatttctggtttgcaaagattctggaaattgctccagatttgcttggtcacgacttacttttctcgctggaccagttaaatacctaaaaccctcagattttgaaattaagggaatgaaacggttgtagtcttatgtagtaacaagtgttggtgtttgagcatatgaacaaagacaactatgacatattttaccactgtcatctttttggggcgtgctaggtgctgtcaagacggtcttctctgaggctcgtggagtggaaggaattactcgaaaaacaccacgtagagatacacttccatctttggtaaggacaggaacagaatgcgaacggtgaataggtattcgtgtccctcctttctagtacagagaaaaatatgaaagaactaagcataatctacagaatttaaaaatccaaaatacatagaaaaaatatgcaaaccatagaactatacataaaataacacaactgcagcataatgtcccaaattgacttttaaattgatttaatttattattgtagtaattaaataatcaatcccaagctaaaaacaggaagttaatactcacaaccagatatagcaactcagtcatgtttcctccatgcatagactccggattcgaatgagcaataggtgttactggcaatgatgaagtatttttcgatctgggagtgaaaagctttgtcaaggacaaagttcttgagaatgttctcttctcttgtctctcttctggtgagctttccagagctagaagaacagctttttgaatctcagagctagagtttcgattcttaaaacttagttttggaagaaggtttttcatatttgatttagttttagatgaagaggggcctggggacctagtatgtctgccaaaaactaggactaggtaaatggggaaaaagttcactcttctgggaggtggacttggagtttgtgtgttcatgtttattcttacaaactcttctctagcatcctcaatatccctagatggtatctgtaaaacaagatg

SEQ ID NO: 196895 - DNA, 993 bp, Cannabis indica
ttgaatattttaacagaaaaagttaaatacactacactacactcaagagaagagagtagattattattaatttttttaagaaaataaataataaagaaaaaagtgttattcgggttttggaggcgggagagtattaaaacttgaaacccgaacccgccaaaaagagactatttagtatttacatatattcaggtcaattggattgggggtagaaatgtaaattcaggaagttaaaaaagattgaagacttgacttctcattttatttatttattttttttgtgttaatttacataatttttcttctttattcttacattctaaaacatatatttaaagtgctactgtcaacctgttattacaatttttttgtcaacttctgtactcgaaatacatgtcaaaatattctttttaaaaaaaaataaaaaaattatagtcatattcgttatagactatagttataacatcatttttgtaaatttttaaaaaaattcgaataatttatagtgtcaaacatatgtttgaagttttattaacatgtgtggtaattaaactagaatattaaaaaccctattttcgatgctgtaaactatttagaatttttaaaaaatttacatgaatagtattataactgtaacagataccgctataaaaaattttaaaaatattccaacatgtgatttcgaacatagaagttgactaaaaaattataatagaaagttataattaacactctttaatatttaaatatgtggcactccttgggagtaaacgagtgtctaggtgtcctttgggtaggccatggtttccttgggtaggagggtcttagttggcatccatcttaggaactatgtataagccttaacttactctctatggtctctaaaattcctataaattaagccaaagaagttaggaatagaatgtgcaccacttgatctcctttctagtattaaaaaacacacatatttaaaataaaatgtattttaaatat

SEQ ID NO: 196896 - DNA, 1293 bp, Cannabis indica
aatgaatagaatgaccattagctgtgaaaccccaccagaaacgagccattatactctcaataatgttacaaaatgaagcaggaaacttgaaacaactcatagcataagtaggaatagattggaccacagccttgaggaggatttctttcccaccaatggagaagagtttttcttgccaggtagtaagtagtttccaaatacgactcttgatctcattgaaagcttcactcttattatggccagtataggacggtagacccagatattgttcatgacaggactgaataggcatttcaaggaggaggtgaaaagcattctggtcagcagtagaagtgtttggagagaaggacataactgatttgtcatagttgatgagctggcatgacgctctgctataaagatccaaagtgtgtttaaccgtagcaagtgaacgagcatcagtacgacaaaataggagactatcatccgcaaagaggaggtgcgacactttaggagcctgtctaataacacctaaacccgtaagcatacctcgttgttcatggaattgcagcaaccgtgagaaagcttctgaacagacaagaaaaagatatgaagaaatacaacgcataataagctcaacaagaccatgaccgaatcccattttcaacagaacacgttccacaaaatgccattccactctgtcaaatgttttactcatattgagtttaagagcagcataacttactcttcctttggttttgttttgcagacaatggagcaattcaaaagcgaccaatacattatcagtaattaatcggtccgagataaaggcgcattgaaattcaaaaattactaagtgtaaaaaaggctttagtctgagaacaatagccttggaaatgagcttgtagatgatgttgcaaaggctgatgggtcgaaattgagtgacagaagtaggatgcttgacttttggaatgagggtaattagtgttttgttgatacatgaagagtctgagcggttatttagtacatccaagacagcagcggtgatatgagggccaatggtactccaatgattagtaaaaaacataatagacataccgtcgggccctggacttttgtcacttcccatgctatttaaagcagcttgaatctcatcacttgtgaatggttgttgtagcataatgttcaaatctggtgtaatggtggtggggatagtgtccaagacaagatcaatagcaggagagtcaatactagcagtgtcaaaaaggttggcaaaatggctatgaaaacagtcagagatgccttgcaaatcag

SEQ ID NO: 196897 - DNA, 1520 bp, Cannabis indica
aatagtaaaaacaaagtgttcagcatttttactttcttttgtgcaaaattgatctgattatccatgtgacttaaaacgtagtttatggagacaccttgagttacttttttttggtaaggtgagtacttctctaaatattcttttattgtggtgttgcaacatttattgattttatgttacataaatattgcccattgttattttcttgtaaacattggctttgaacgtcccttgtttttaccattagataatagaaatatttttgtggttcaatatatctgccttattgctgttctatgaactatgagaaccttattatactaagagatgccaagcctctctgtgtatgtcgtaatagtttacttggtatttaaagtaatgacaagttttgttgatgtttcttacaaaatctgatactctttgtaggctgcattaaactcactatcagaaaaggagaaagcggatctggatcagttagttggcaagatggtatcttattcgttaacgtataagaatgtgaaatcaaaccctcttcctagtgacctgggaaatggagcaacatcagatgtcacggttcttgcatttgatccccccatcgctgactttatcaatttcaaggtttgttgctgtggttatcttttctgtcctcttatgttgaaaatattgtctaatattgttttcttacaagtgaacaggggtacaagtctggccattacgtacttgcattagcaatgaagcaggtgctggtaaacgaggtaagctcttttcacctaagggaacaggaatcttgatttcagttgccataactattacatatttctgtatatgttgcccatgataataaaatattacattttctataatctgttgcatgccaggtggaaaagcaaaagatcttgcaagtaagcactaggagatttgcgagtttaactaatggaggaaatgagggtaaccaagttcttttaggagaagaaaccagcagatcacaacctgataaagcagctaaaatctttggaaaaacttcaaggccttcaaatcctagcatctctgctacttcttgtaactctgattccagcagaagcggtaccacagcaagtgtgaatttgaagtcagccaaacctccaaagagatcctctacaagtttttttgacaggtaaaacgagttctttgtatatgtatatgttcttttaatgttgcttataccaatcaacacttcctctttttttctttttttttaaattctattttcggtaaaccaacttcttgttgtatcagtgacttgtttacttgtatttattaaatataggtaaataatgtatgcatgcatctcctagtttgcaactatcttctcttttgtgtactcaaacttggtgactaagccattttcgtttgcgtttctgtagctgcgataaatttggactttgggcttttgtgtaattgttaaattttcttcttttctttctccatctatcttccatgtcattgtatgcttatcctgatactattgtatgtacttctca

SEQ ID NO: 196898 - DNA, 860 bp, Cannabis indica
ttttcttgtgttagtgcttgttgatcctaatcctcttcttcaattaacttgtgttcactaggcccaacgtaattctttccacttctcaaggtaattgtcttacaattttcttttggattcacttctatagtgcttggcaaacatccttgggctcgattagtcatatgagtagccaattgtctcatttgaatcttactattttaaatagaagatcgagtttctaacatgaattggcttattgtatgagattggttctcgaaccttccacccaaaaattgttgttgttgattagtgggttgaaaattttgttgatgttctggcctatttctctgttggaagaaatcttgttgtggctggttgtattgctgcccttgataaaattgacgacgtacgtccattaaggtaagcatactcactatcttttgagtatcctaatggcttgcgcttgctccatcgataagaccatctccattggatggtgtatattttggattaaatttggcctaaaatataccataaagctgtatttggcccattttttgatttgtgctccaatgcacaaagtcaaattatctagaaaagtcaatattaccattaatgatcatttaaaatatacaaaataattaattttatttatattattttaatatcttctaaatatatattaataagtggcaaagagataattaaaaaaagtagtatttattgtgggcttaaatttggcccatgctatgtttcatgccaaaattggcacaatttttagctttgggccaaatttggcaaacattttacaataccattggagttaagttttagcagaatattttaaaatatagcaatacacaacatttatagctctc

SEQ ID NO: 196899 - DNA, 2639 bp, Cannabis indica
gaggtaagctcttttcacctaagggaacaggaatcttgatttcagttgccataactattacatatttctatatatgttgcccatgataataaaatattacattttctataatctgttgcatgccaggtggaaaagcaaaagatcttgcaagtaagcactaggagatttgcgagtttaactaatggagggaatgagggtaaccaagttcttttaggagaagaaaccagcagatcacaacctgataaagcagctaaaatctttggaaaaacttcaaggccttcaaatcctagcatctctgttacttcttgtaactctgattccagcagaagcggtaccacagcaagtgtgaatttgaagtcagccaaacctccaaagagatcctctacaagtttttttgacaggtaaaacgagttctttgtatatgtatatgttcttttaatgttgcttataccaatcaacacttcctctttttttcttttttttgtatcagtgacttgttacttgtatttattaaatatagataaaataatgtatgcatgcatctcctagtttgcaatattcttctcttttgtgtactcaaacttggtgactaagccattttcgtttgcgtttctgtagactgcgataaattttggacttgggcttttgttgaattgttaaattttcttcttttctttctccatctatcttaccatgtcattgtatgcttatcctgatactattgatgtacttctcatcagtatatacatcatttggtggaatatttatttcaaaaaagaaaatgtttattacttattttgattatcaatttacaatctctttcttttgtgagtctttaagtttttattataaactagaatatttataccactataatgaccagtaaaggcagtattatcttgcacttttcttcaagtttatgatctcatgtttacttaaaatacaggttcaaaaggattggtactggttctcagaattctgagaatgttgtcccaaaggaagaaaccgcagagagagacttacgtccactgctgtttaaatttaacgaggtacatatacattttgcagcgttactatttctttccatcataattacaatcataattatggtcacatttgttaatgctaacttcctgaaagtagagtagttaagctacagagttagatttaagaataattgtaaaattactacttgcgtgcaatatctttgtatgtgaaacacaagaatattcttcgaagataaaagaggacaagatttcggtacaataagtgctgaaccattttattttttcttccactgcactttcatcttcttagtgaatttaatcaaggatactcaagtctgccagttatgtctttaatgaacaatatcctcattgactttctgttttctgaagttttttaataaagaaatgaacaattttgtttcaagtaactgcgaattcacatgtttgaaccctggcgtggaagataaggcctgattattttgaagcacagttaactctgactgacaatcttctgtgtataaattctctgttttcgtcatgcagggttttacaaatgcagtaaagaggccagttcgcattcgtgagtttctgctatgatgaatcgtggtttctgtaagcaacgtcgggaatcttagccacattttcttgcaaattctattcactacctttccctctaaatctatacataaatgtacttaatatgtatgtatttatactcaaaagtcaatatttttgtatcaataaatagccatgtaaagactgaagcagttttcatatgcaataaccataccaggtttcagttgcagcaaaggagcaatgagatggacaggcagcaaaggagagtaatttcaataaaatggtaacattgttttgcttgcctgcctccaaaccattataaaaaaattctgagaaaaaccttagattagaagcacataatttttcatcatgtcttagttcaattttcaattttctgaccttttgtttcttcattaatctgatgtttattgcatgaaagttcctctagagtattatgcctaaagttcaaaatcacattatacttcctacaaaataatacaaaaaaaaaaaaaattacattgcttgaaatcacaaaatttagaggacttaacactagtaaccacacaacaaacacaacagttctactgttacatttatcatgatacaaagtagaccacctaaaatcacatcaaaatagttttttcttttcccctagtctagttccattttatttgatcatatctgaacatttccaccagaagtagtagtagtatcatcaggaggatttatcgaaatcaacagcaaagaaacagtaatagagatcaacccagcccaaacaaacacaatcgtagggactcgtcctctcttcccatcaaccctttagcaaaagggtacatatgagccaaaacccaaaagctaaagaaagtcccacctaagagcttgttccattgaggtaacacactgtataaggtcctaaaacaactaatcaccacagcaactatgttgaccactatatagtcaacggcattataaacaaactggtccacttaacaacatataagtcagcaaacacatcttcctcatcctcaccacctgacttagaaagtcaactaaatg

SEQ ID NO: 196900 - DNA, 853 bp, Cannabis indica
taaggtacgtaactgcattactattaacccctttaattgtaaaaatcttgttataaccaaccactaacagcgatttaatagcaagtcattgaagattaaagaaagatcaacaatgaaacaaactcaatcacatagacaagactaaaatatttaaaatatgtcacataaacaagattaaaatattgaaaaccatgtcgtagagacaagactaaaatattgaaaaagatatcacagagacaaagttaatcgcagtagcaaatgacattagcaaaacacaaccttgaccaaggcgcacttaaccccatgaaaggccagttgacctggccagagaaaaaagataactttcaatagctataaatttaagaatgagaaattctaattttttttcttttaacctatatgcatatataattgcacatacataaaatggtgggttttaaaccaaaagaaaattttaacttggttggaaggatgcatattttattaattaaataaataatagattgaaggatgatttgttttaagagaaataaatggatgaatttctcaccaagagtatgcaaatatttctagttgttaaacaaaactgaaacattttttttttagtgtgctctgttagggtttttcctttaaccctctgaaggctcctttttatttctaccgaccacggctcgtcggctattattggccttgggtgtggctctggttgggaatgtttatgagtggcttgactttctcagagtggatctttccttttcctttggtggtgtttttggttttttgagtccttttctcgggttaacaggttgtggagttgggattggctggcattggtctgttatgggtggtggcc

SEQ ID NO: 196901 - DNA, 1272 bp, Cannabis indica
actttttaacatcaacaattaatagctattgatagccaataataattaattgatgatataattatcatattgtcaataattaatttgtgataattttaaaacaaattaactaaaaggttagaattaaaaaaaaaaattatgcactaatttggtatagattcaaaatttaacactattaatggtgtaaaatttggtgcacgccaatttggtggtgtataatttagtgtttccttagagtgaaaagtaaaatggtgtgaagatttttatactaatttagtggaataatgcaatattgaaatgctctttggacaatttaactaatataatgagctttagaatagaagcataactcaacaccactagtaataatatgtagagaagttgtacttttaattttttattacaattttttagtaaattttttttgcttgaaagcacatgttgaaatatttttttttaaaattttttatggcattattcgttatagttataacatcatctttgtaaatttttgaaaaattttaaaaaatttacagtgtcgaaaataagtttgaagttttttgaacatgcctgataaattggaatatcatgaacttatattttggcatcgtgaactctcaaaattttttaaaaattaacaggattgatgttgtaattatagcgaatatcactattaaaaaaattttaaaaaaaatattcacatataatttcagaggcgaaaattagctaataagactattagcatttatataagggaaagttgactaatgatgcatacatatggggtaaattgatacactaaatttaagattgttaatattgttagaatatgtcaactttttataatacacaaaattatttttcccattttgaaaatcaatccagtcaccagtggcagagctatccgtaaatgttagtgggggcaaaaagttttttttttttttgcaaaagtaatttattaagaaaaaaaattatttttgtaagaaagaaaaatataaacttttagggacataaataaatatgtgaatgaaaatgaaaataatttttttcttcaataaatattaaaatatgtgagataaaaaaattataaatttacaaaagtaaaaatgaaaatatatgatggcaaaatttttttaaaaatatttgtggggcgaaaatgaaaatatataaacaaaatatagcaaaaaataattacttgagagttgagtggggtcatgtggcatgaccccattcccctccgcctctgctagtcactcaatctctcctcctttc

SEQ ID NO: 196902 - DNA, 1822 bp, Cannabis indica
tttatttttaatttaatattaattggttttaaaacactacaatgtatataacaaattattttaaaataataaaaaaactaaattccattttaatcaagtcatgagaaaacatcatttaatttaaaattaaataaaaacttaaaatgaagaggacaaaaatcatcaatgaacatgagcattaaagaagggaaatttaattaattatgcttccatgtgcttaaaatttttcccttaaactcataatacccaatatttgtagcatatgtcaacatttgtattatgccaaaataccctctccatttacatcaccatcctctctcttcttctctctttccctcctactgccagagctcctctatcaccacaaagcaacacaattttctcttctcttcactttactacactacaagctacactacatattttctctcatttttggacggagcatcatacacgaagctcatgggtaaattatcttttttttgtgtaattttgttggttgttgttatatttagtttagaatattgttttgatgcttgatttgtgggttgttgctgttattttactgttttgtgtgttaaaattgttgctgtgtgtgaatactgcacttttcctggttctgtaattttttttgtctggtcctatagggtttgatgtggccccgatggtggtttgatactccactttgcgtaaggacagggatgaaagccataagggcccaatgaaggcccgataggtgtcagataggttattttggacttagattttgatgggcccaatacgggcccgatggggtgtccgataggtggctcgggatttagattttaatgggctagatatgggcccgatggggtgtccaataggtggcttgggatttagattttgatgagctcgatatgggcccgatggtttcccaatatggtattgcggactttatttttgatagggctgatatcggcccgattggtctcgatgggtgtccgatatttggttggggacttaggtttttaatgggcccgatatgagcccaatttttgtccgatgatgtggcccgattgtggcattggcataattttgtgatggacccgatgggtgtcgatattgtttcgatgttgtgctcgatggtttgcagatttatggtatttcaaggatttgtaattgtattttttttaatgtatgtggcaggttcaactgttaatgtgtttgttatgtttaatggtgtttgggagcttgagggtagagattggatttataaccgggccaaaaatttgacatttgacattgatacaaacgtaaggtactgaggtttggttgacatctgacatcaatagtaagaggtcttatgtatgctcttgcatacactagacgagacatctgctattgagtgtgagcttgagtaagtattagttcaaatctagaaaaaaagaacattggaagataattaaacatatcctaaaatagatgaagatgaactatatgttagtcgtaaggatggtgttttaaaacttttaggatacaccaaattagctttctagatttgcgttaatactagaaactctaattgagagatggtgattactctaggggtagagtaatatattttggagaacagtaaaaaccacttcgaaaccactaaatctactagtatgactgaataataaggttgccttaacagatttttggcataattctagacatggaatagttgctagtgtgactctgtgataacacaattgtaattttcaaatagtaaagaatcatgtaccctaagaggagtaaaacatatatgttaagaattcgcaaaattgtgaattttatgact

SEQ ID NO: 196903 - DNA, 729 bp, Cannabis indica
ttttagaaattaagttgttgaattttaacaatatgatttcaactaaataattcataatttttttttagattattcaatgtataatatgatatatgtaggtgtataatttaagtaatgtctatttttgcttaataagcggtcagcaaataaagtcgctcaactacttgttacctatgttgcaagagcgtctctattttatcctgattgtactttcagtatgaaaaatgttccaactgatttgttacctatgttgccatgtcagagtttgaaggttaataaaacttgattttccttttaaaaaaaaataaataactcaactacttgattgaaaaaagaaattctttcaaaaaaaatcttcttaaatatttaattgtctaacaaaaacaaacgaaattcaaagatcggactcaataataataaactaccgaaccttagaatattatcctttttagactactcaaatttctatatattccattcacttatttggcattaggatttttatcaatatattttaatttgaatttgggatatatattgattttttttggtatgatattgggaaaatattttttttgttattaatatttgaagaaattttaatcctttttttcaattgacaagtatattgtagttttttttttctttttttgtcaatggtgtatagttgttatagcaaacttttcactaacttttaatatattttttaataatttatgatgttaaaat

SEQ ID NO: 196904 - DNA, 2259 bp, Cannabis indica
tttaaatacttggcttccaaaatcctacaacacggagattgacttccagtaagtaagttccactcccacttagccaggaaggctggattcatctcttttgttttcctaaaaccaaggcctcctctagatttgggaagacaaagcttatcccaggctttcaagtgtaatccatggttccctttctcaaaaccccaccagaagtcacggaccataccatcaatcctggtaaccagtcgattagagagtttggtggtttgcatggcatacataggctacgagagacccacagacttaatcagagtcgcccggccagctttcgaaagcaattttgccttgcacccttgtaacttagaagttaggttgtccataataaaattgaaatcaacatccttttgctttgaacgaaaaagagggagccccaagtacttaacattaccatccgagctcccaattcccaaagcttccttaatctcctttctcacaccaaccagagtattattgccgaaaaagatagacgttttgagcttattgacctgttggcctgactcagcacaaaaattcacaaggcactgccaaaaatttttagcttctaccactgaggctctaccaaccaggatcaaatcatccgctaagaaaatgtgggttagaatggggcctcccctagatagactgatacctttaatgttaccgctcctcaaggcctcttctagcagtcttgacaaaatctctgcagcccaaataaaaaggtaggggataaagggtccccttgacgaaggccacaagacggggtgatcctcgcaacctgaccaccgttcagacacacactcagagaagtggtcgaaatacattgagaaatccagtttctaaacatgggaggcacatcaaaacaacaaagcacatgatcaatgaactgccatcttatcttatcataagctttcactaaatcaatcttgatggcgaaaaaacctccttttccttgtttccttttaaacgagtgaatgatctcttgcacaatgacattattatcttggatgttcctacccggcacgaaagcagactgtgtcggacagataattctaggcaaaataggcttgatcctattggcaataattttggagatcaccttataagacacattgcaaagggaaatcggtctaaagtgatttgtcctcttagggttctgaactttgggaatgagcactaagttagtagcgttcacccccttatgcataacacctgtggagaaaaaattagagacagcctcacaaaagtcatccccaaccgcctcgcagtagtgttttaagaaggtaaccgacattccatctggaccgggagctttgttagaacccatggcaaaaagagttcttcgaatttcatcataatcaggggccttgactaactcctccttctccataggggatagacaatcatttatcaagttagagcaattaagacccgacccagatccagtatcagtgaaaatatctttcaagaacctggtgaattcattgccaatagcggtacgcctagtaagccagacattattactatccaatatactctcaatagcgttgcgtctacctctaatagtagcggagagaaagaaaaaattggaacatttgtccccctctctaagccatgaaacacgggctctttgtttccaatagatttcccttctttctaaggcctcattgagggccttacgaacctcacactccaccttccagtctctagagccaacaggcagtctttgcagagtattaagcttatattccaagtttttaatagaagcatcaactttaccatactgagtcttatgccagtgaattaaagccacccgagtggccccgatctttttaaacattctagtcggggcccaattatgcaccacagagttccaagcttgagagaccaccagcttactcctttcatcacgggtccaaccctcttcaaatctaaaggttcttctaaatttttcaacatctcctccaaagaacaggcaaagaggtcgatgatctgaattacaagtctgtacagaacgcaggatagcctttgggaaaagtttgatctaatcaccattcacaattcccttatctaacgcggatttaatatggctcacacctgaccggtggttatcccaagttaattgatctccttgaatgggaaaattaatgagaccctttgaattcaccaaattcgagatgaatgggataaactgatccctccctttcgaaccttttctttcagattcttttagaa

SEQ ID NO: 196905 - DNA, 663 bp, Cannabis indica
ttcataatgaattgataatgagatgtgtcttttctcctatgcttttaggataagctaatcatcaagagtcttataatacgtttacattaataaatagaaaacgttggaggtaacaattcttatgcttatcatcatatatatcctaagtaaataagaaatgcaataaaacacctgcactatctcatatacctattagtttaattaagaaatcaaactatcaatgttatttttacaagtacattgttgcactggtaaaaatttaatattgcttttaatgtattggcaaataaacgttgatattagaatctttactagttttaaaaaaaaatgctggcaaaaatgatttttccctaacacaaaaatgtattggtaaaagttaaatttttaccactacaaatgtgtactggtaaaaatttaacatttttaccagtgtagtttgcgagatgcgttggtaaaagttactttatttagcagcgcaataacaaactaagccggcaaaaataacattttttgtagtgtataagagtaattgaatgtagataatattagttttaggatcatatatatatttatagaaatgaattcagaccttatctagtattgttaggatgtaacagtgtagataaaatacaatgagctgattttcaacaaaaaaaaaatata

SEQ ID NO: 196906 - DNA, 1125 bp, Cannabis indica
aagagtagtagttgttacttgttatcgagtctcaaacgttgtactccaaaagaactactactagaatactccttacatttatcaagatcactctcaactttctcgatctgtttttggagcagtgactttttctggcgcaattcattaggaatttcactttcaagtctacttggaattcgagagacaaaatcacgcttaattttctcaagttgttcgtacacaaacataattctaagacccatacgcctcacaaacttaagataaccataccattctctaataacctcttcactaatatctctcttccttgttctttgcatgtcataaatgacacgacatagaaaatgtaaggcaagactcttcatatccacacttagtttcgattcttcatcgataacatcttcatgcttttcaagcaaattctttaaaacattacgtagataccaagcaaccttgtaattcttaaccgtaacaactttcacatccaaaccattagtgtctagtttcaaccttctaaagttacagtatgtgtcaaacttgtaaacttgcttatctaaatcctcaggtgactgtgggacaatgtatttttctggtagtctgattccatggctttctccatcagtgttatgatcgaaaatcacattgttggtagtgttccaataaaagtgttcttcgaaggtttctttgtcttggtcggttaagtttttaatgaggtcgtttaaggtcatgttatcatttttgtcaacctggtcatctgtgtcgttgattccattacttgttgtactcacgattataaggtctctatcttcaacacttgcttttagtgcacttgtaatctgacagagaaacaccccataaaaacagaggacaaaaagaaaaaaaaaaaaaaagaaaaaaagaaggcatatacagaggggaaaaaaaaaattaaatggataggacctacctacacaaacttttcagaattatgtagtaatttttaaataatttaatattaaatattattcagtaataagtaataactatattgaattgataaaagattttaataaaaaaaggactaatttttttagaagtttaaatatcattttgtactctgtattttataaaaattactaattggac

SEQ ID NO: 196907 - DNA, 917 bp, Cannabis indica
tcaagtggttatcgaggaaatcaaaaatgcacaaatttttcaaccaacaattttagcacaattagttgaacaatcgacaacgattaccatagttcttaaaaaggaaacaacgttacatcatcgtagtgggaggattgtgagacaaccaatatgttatgaacatgaagcccatgttcttatctctaacacagacaaggatgatccattactttacaatgaagtaatggaacaccctaactctgacaagtggaacaatgccatggatcaagaaatagattccatgcgcaccaataaagtctgggaatatgagactatacttgagggaaggtaaagagctttaaatctaggcttgtatccaaaggctacactgagcgagaagttgtcgactatgacaaaaccttctcttctgtggaaatgcttaaatccattcgcattcatctttctatagataccacttatgattatgtgataatgaaaatggatgtcaagaccacttttttaaatggggatcttgatgaaatcatttaaatggaacaaccagaagggtatgtgctacaagtggaagatcaaaatgtgtgcaagtttcttaaatcaatttaatgattgaagcaagcctctaaatcttggaatatcacctttaataagactattatagagtatgggttcgaacagaatgaagatgaagccttgtatataaatacaataaaggtaatctagtggttattcttagttctttatgttgatgatattctaatcattggaaacaatgtagagaacttatcagatgtaaagaagtggttagctgatagattccaaatgaaggatttgggagaatcaagctatgttctcaagaccaaaatctatagagatagaaagcaaagaatattaccactttttcaagcaacttatatcgataa

SEQ ID NO: 196908 - DNA, 645 bp, Cannabis indica
aaagaccaatttgggtggacagatgaagctaccacaacctttgaaatgttgcgcacagccatgaccacagtgccagttttggctcttcccgacttcaccaaaccgtttgtggtggagaccgatgctttggggtatggattgggggcggtgttgatgcaagaaggtcgaacgatagcttatttcagccaagttcttaagcctcgggcccgcctgaagtccatttatgaaaaagaactcatggccattgttcttgctgttctcaaatggcggccctacctccttggccggcgttttgttgtccggacagaccaacaaagcctcaaatttttgctggagcaacgactagtcaccccggaacatcagaaatggttggtgaaattattgggctatgatttcgaaattcagtatagggcagggcacactaatcgggcagcagatgccttatctcgcttccctcttgctgaatgttctttgttgacttctacggcttggcttgattgggatgtttgtcagcgggagattgacacggatgtcttcctatctagagtcaagagggatttagagcaagggaaatccgttacaggtttcacattacatcacgagcggttgttgtataaaggacggctggtgttgtcttccgcatcg

SEQ ID NO: 196909 - DNA, 1081 bp, Cannabis indica
gcaaactttagggtgtaatagagcgatatagttcggtgcagaacatatcgtacgtatgcagaaggctgttttatccttgggacgtcatgggtacccgaattttgtgcgcatgtgtgagaactcacacactagaccaccacacgcgcgcgtcgctgtttgaccgattcgagccgggttgggttagcgggcgagtgagatgtcacataattttttaaagaaaaattatttaattaaaataaagatttattttttatttattaattaaataattgtaacgttattagaagtagtaaaatgcgatcagttaatgattcgcttattactgcccatgatccaactcttcctccacgataatattaccgttttcttactagatcgacttccctatataagtcgtatcagaacaatggaaaaacatatcttttccaacttcaattttttttctttcttacgatttttctcatagcaaactttagggtgtaatagagcgatatagttcggtgcagaacatatcgtaggtatgcaaaggctgttttatccttgggacgtcgtggttgctacactgtcgtgcacacttagggcagagctgcgaaacgtcttaaagaaagcgacattgtccatgacttagccagaattttctatcgataattcgctctagtttcattgtttttaatttcggtctaacagtaattaataaactatgtttatgtttatgaccatatttaaatagagataattaatatagtataatctagcctttagttgaatgtggtcctatcctatttacatatttatatttacttattttttttctttaatattatatatggttttaataatataaaaatatataacatacgtttaagataatttaattaataaaaaattgtattatatattttaaatgaataaattgattgcgacataactctattagtgtgacatcgtaattaatctctaaaattcataattaagttttgttatcacttagtcctttctatctaattttgatagttaagtgtcaagttagttgtctatgtatatgtatggtattatccatattaacacaatgtacacatga

SEQ ID NO: 196910 - DNA, 1688 bp, Cannabis indica
agattcattttcactgaggtcgaactctctgaaaattgattaccacaaactaatttatgattttatttggttgaaaattaatctttgggagaataataaaaattcataaaaattaatgaaaacaatgagccataaagatatgaattaatcgttttaattactcaattattaatgctattatttattcttcagattaaagtataatctttaattaaagtattcttaatatttacttttcagattttatattaggattatgaatcatattaaaagtgattaatctagaacatgtattaaaacgaatataaacaaatcacgagaataaaaaaaaataacaaatcacattaccttttagaataaactcattcaacatcataatatttacgtatatgaataatcttcaattaaagcattcttaatatttatttttcagattttatattaggatcatgaatcatgttaaaattgatcaatctggaacatgtattaaaacgaatataaataaattacaagaatcaagaaaaaaaataacaaatcatattaacttttagaataaattcattcaatattcatcatatccctaaattggaaagttagttcataatttcaacattcagatctatgtttaaattaaagacaaaatttaacataaataaatttaaagaaagagaaagaaactagagaactcgatcgaatcgtcacgctcgctcgctccaagaatcttctttttttgcttctaaggttcttttctgacttcatgacataaaaattcgaggccccttcttataatgcagtttttcaacttaaaattgagaaaaatataaaaatatccttgtctcgtacggaggcaactgtatagaatcgaaaacattgattccgtacgtctagcacctccctgcgaccgtacagaaactctgtcacagcctcgcagcctccaaaggccctagccgcgactagccttcagaatttcaacacgattttttacctttttccttcttgttttgtcctttcggtagttaatgaattttgtattttaaaaccctggaaacccgaaacataggacgacaagcataaaattgtccaaaaagtaacaacaacaaagaaaattagctctaaaaagtgatccgaaaatagactaaaaatagcctaataatggtccatataaaaaaaatagttgtaatcttataaataacattgcaacacgcacggtctaaaatccatgactgacacttacttttggagattaaagttaatgtagttgaattaatttccttgggaagcctactagaagtaaggaataatttgatcgcttggcacacctctcctcctatgaatttccaatttaatttcctaaaaaaagtagctgataaaactatctggcaccagggctttgttaacaggaattataaaattggtagcttttacctcttcatccgtataatcctcttgtaatatcctgatatgaacatcgaatattagaggaccattccagacaactctcagtagaaattgtcatctattctccattgttgaacccaacaattcacataaaatctcaaaaaggctgatgtaacttgctcgggctcatgaactagtaccccctccatgtatttaatcgaataaattcaattcaagacctttctagctcggatacttgcatggaacattttggtatttttgtcaccatc

SEQ ID NO: 196911 - DNA, 643 bp, Cannabis indica
aataataataattttttttcttttctcatcttggtccacgaagaccaccaccctaagaaacccgcgaaaacccttctcttcatctacccctctcactcgatcccacctttatctctttgttcattgtctcacatgcatagctagacgaaaaatggccattctccgatcgacgctgattgaaacggaccacaccactgtgctcgcaatgcctagaaatcccatacctcgactcccccctcgcctcgcattacccagagctcatcttcttcgattttttcactcaccatcattgcaatgccatcattgtccatcttagagcctctctctcccctcctccacttgttctttctcctctggatctcgatgaatggtgatgaccctaaaaagcccaaacaaaataaaaatgccgaaaaataatcactaagaaatagatacgcgagatcctggctgtcaccactgatcgctagaggagatttgggcgctgacgagaacaagaaatggagactcacagtcacacctgctcatctagcctaccattgctatttctcacaaaatttcatttcatttttttcttctttcaatgttttgtaatgtacttgattgatggaattttcgattttcctatttcttcctctctctctct

SEQ ID NO: 196912 - DNA, 1395 bp, Cannabis indica
attaattatttgttttcttctttatctttttcttcattagaattttaattatctttccgtaatttgtcaccaaatagaacttagaaatttagtaagctagtaattcactatcattcttttaggatcgacctcactcttataagtctattacttgaaaataatatgtatacttgcgtgttgaaaaatccataacaatcataaacaacaagtttataagcaaccttcttcttaatgaggaaaaataatattttgtgtctctatcttttaaaatggctttccttaaaatgaaaaaaatttattaatatcaacaagacaaaattctcatcggtagtcatgaaatacaacgtcttaaaattattgaaaatagttatgacacaaaataaaaggaacgagtataccgaattaaagtatgggttgagtcacgaactaggtcactagatctttttaagacgttcgtggcactgaccaattgtgcaagcaacctatcagtctcgtcgtccccagaataaaacaacccaaatgtaatactttataggagctccattgtacgatagagaatcgtcaaaataccacatccaacactactgcttagaatatatttgtaatataatcgtataaaactatatatgattttttcttagagaaaaaggatgtctttcttctgttggttctgatacattatataggaacacacagaatgaagtaacaggaagaaagaaaaaataataatttaataaataaattttctctaaaaaatataaagtgacaccatacctaccagctcaattcgacacagtcggacagtgacgacgtgcatatgtggtggtctggtgtgtgagtcctcactcatgcgcatcacttctcatacaaagatcttgtaaaatttcactaaagttcaaacaattttctttattgtggcggatttaagatataaagtgaaggggagtgtaattttttttgggtaaagcaaggagcaaaagtaaatttaaaaagaaaaaaaagtgttattaataggatttcatcctttaacatatatgtaatctaacttacctatattacactataaatctactattatgtctataaacatcatcttctattacaaatatatattgtaactaactaaatatatatatatatatatataatttttgattttttttaggagagccgactgcacctctcgctacaatatgggtctgcctatctcattcagctagacttgttatctactgcttaaatcttagggttgttttatttttacacttccaaactagttttttttttttttttttttgttttgtatttttacgaaattctacatagaaccccctgttacaactaacggagcaatctaaatcgtaagtaaaaactgtatagcaacccatatagaaa

SEQ ID NO: 196913 - DNA, 1328 bp, Cannabis indica
ttattattattattacaatatatttggttttatttattctaaatggtatttgtccacaatcaataaaaaaaaaaaaaaaaaatagactaaaataaactaattttggactggacctcatgggcctacacataaacggtgaaaaagtaaaaaatagaaaaatgtaaccctactgaaaaaccctagccatcttcttcctttttcatcttcttccttgttctggtgttcattgctgctgaaaactcattgatgctgaaaactcattgctgctaaaaaaaatggctggaccaggtacttaagtatttagtttcttcatttaattttattgcattccctattctatagaatttcttccatattgataataaaattgtaaagaggatttgataacttcatttattttcttcatttattgctcaagaatttcttccatatttattgttaaattcaaaagtaaacaatggagctacactttttttttcttaaaatcattttgtgcatcattttgtagaaatgggaaacagagaagaagttgttgaagttgatagcttcaactcaccggtcgggaattatgttgcaacttatggggcattagcgttagcactaatcgcactgtccataagtgcactagtaagtatcccgggagggtactctaacaataacgctcgctttaaagaaatgccttctttcaaactatatcacattgcatcttttgtttgttttgcatcatcaaccgcatcgttgctcatattatttcttctaaaattcaacactcatgacggagctaagaaattcctaaaatttctatcaatttctttcattcacgtatcagttgtgtctttggtggtagtggcaacagcgattgaatttttaatcgatggaagctactcattcctgataggaattggccctgcatctggaatacttttaggtataattgtttaccatctttggaaccatctttggaactggcttgttaggatggtagtggggctgaaaaatgcaacagtttgggtttttcacatgttgaagaatgcaacaatttgtgtttattacagtttgaagaatgctactctttgggttttcaacaagttaaaaaatgcaactttttggatttggaacaataataataagtatttttgtgttaggatatatgtcaaactctaaaacaatctaactctatctaactaaactaaaataatttaataaataaaataaaataaaattcacttcttcttcttaaagttaaactttatgattacttattaaaaaaatatctcattttttacatgatgtaaaatatctcatttttttagatgatataaaatatc

SEQ ID NO: 196914 - DNA, 5394 bp, Cannabis indica
tataattaattatacatatatatggtggggtcttaagctgcagtgatgtagctataatttctggccaattattgtctttcactaacattttgttttaatcttgtcttgtgcagcaaatcccaaagacattttgggtgaaacattgtgggtctttatcaaatcaagtatttcttaaactaccatgtggatcaacatgggaggtaggactaacaaaaactagtgatggaaagatttggatagaaaatggttggaataaatttgcacaacattgttctttaagttatggaaatttcttagtttttcgatatgaaggagactctcagttccatgttatcatatttaatttaaccactacagagatagattatccttctaatcctaacaattgggggcaccataatgttgatattaatgatgatgatgagtctactgaagtcttggacagttttccaaggaattctaaaaccagtgacaagtctccattaccatgttctcagctccacaagaaaattagagcaagtgttccttgtaaaccacaaagccacaacctatctcttcttagaatatctacacccaaaggtacttaatctaaaccaaaatacattatttgtttagaaaacagaacaatagttttagtaactttatttctgcattgtcttttcatacatatgatgatttaccacctttgaagttatggaaaaagaaagcttatcaagtaaagtagacaaatctgccccgaaaagataccagaaaccgtcgtctgacattgagaagcataatgctgatgatactatagatggtatttcgattcaagccatggacaagtctccaataccatgttctgctaggccccacaagaaaatgaaaactagtcctgattgtggtactaaatctaaaggtactgtaaaactgatgaagcaatattttcatgttaactgttaacatttattgttttgtgtaatgtgttgaatatgttttcagtcatgaagtgggagttttctgataaagaatgtggagaatcttccctaccagagtggatgaaacctgaaatctttttaagtaggcagattttgagtgctaatgaaaaggctgaagctgtcaagagagttaaagattttcaatctaaagacccctttttcatggtttacatacaaccatcaggtgttggagctaactataatgtggtaaatggctacaagcttcttacaagtttatctatttgaaatataatgtttctcatattgacttaaatgtattcttcttcattttcaacttttgttgtcaagattataccttctatctttgcaagtcaatacctcctcaacaacatcaataagcatggagatgtgatacttaaggttgaggatggaaggacctggtctgttagatactgtttttcacggcggaaaagagcttctaaaaccaaattccagcgcggttggaaggcctttgctcaagaaaatgatttaaaagtaggtgatgtttgtgcctttgttttgagagagagcattgggataatgttatttgaagtacttattttttgtggaaatggagtacaaaattcaggtaaacaaaagaactctctattttttctatatataagaattttactctcttgatcgttcccaaagaatcactcttttgtattgttttattggttgcaaacttaagccatgccaaaatcttgcaacaacaccatgatgatcaatagaagaagtggcctaaaacaaactacagttcttgaaagaggaagctcttctcaatccgaaaggccatccttcacagttattatgcatgaaacttatgcaactggtcattgttattttgtaagtttctcagtttatagaacataaatttttcatgaaatttctctgctttactcaaaagctacactatctatttccattgtttcacaatatagaatgttgtattcttataattcatttcatttttggacaggtcttgccatacaagtttgtggagaaatacattaaaaagaaagaatgtgaggtaagactttggcttccagatggtagatgttggtttgtccaattgaaggtgaggcaggcaaatgcatgtccaagagctgaattgtgccgaggctggagagaattcgcgttggataatagtctgcaagccagtgatatctgcaagtttgaattaactattgacaatggcaatgaagtttcatttaaagtttccattgaaaaggaccatgatgatgatgatgcatataacatgaaaggttagaaatgctcataacaaatgtttataattgaatgcatttatggttttagttttaacttactcacaagtgtcattttcagttgcaaataagagaaaagcaatcacaccttccaagctagagagaaatccttatgtgaaagttgaatcttcttttgctcatcacaacatgaatataaagaaagaacaagtggaaattaaagttgaacctaatatttcaggtatatgattcgttcaataataatgtcaaacaaacaaatacttaagaaaagtcatcttaaatttttgtatataataaattgaatgcagacatgtctatgaaactgaaatctgacaatcaaggcagagcttctaaggtagccagcaaattcttctcaaacaatccttacttccatgtggttttgcgatcaaatcatgtgtatggatttaaattggtatgtttgaaaagttttgattctataaatatatggtttagttatgaattaagatcaatattttatgctagttatgattatcatttttgcagccttttccgagtaaatttgcaatccaatatttagagggaaaggctaaagttatgagtctatgggttggtgagaaatattgggatgtgaagttaatgcattttaaatcatcatatgagtttggtgctggatgggctgcatttgcagtagaaaactttctcatgccaaaagatgtgtgcatctttgagctaattaacaacaatcaagctgagatgaaagttcacatatttagagaaagcggtttggctttggctttggctcaagactagtaacttttggtttgttgtaattatgcaagtcacaagaatcattttgggagcaatgacttagattagtttagctgaaggtttttcttttgatgtgtattttagaggttattgtgaatttatgatactattgttaagtccccaagtgatgatttctctacatctcttggaaatacactttcccaccccttgtttttatataaatattttactagtgcaagcttgctttttccctcaacactataattaactctcttaattttttttgtttattgaaaattttaggaaaagaaaaatgaacaatctttaatttaaatttagtaaatgtgattttgaatttgatatttttgtaaatgtagggatgtaaatggggcggggtgggtgcgtggattgctctcccaccctcatactcgcttcttaaattcaccccatacccgctccaatacccgtttaaattaaagcgcgggtggggtggggattacccgacgggaaatgattcaaatcgtgtaaccattacatttatatttttgaaaaaaaaaaatgatgtctctaagagaattaaaaaataataatcataaaaccttagtgaaacgataaacttaagtggaatagtgtgtacagtaaaaaaaaaatatatataataaaaaacctaaagcatcaagttattttaattgtagtagttatgattttaaaatttaaatatatacatatatcatatcggggcgagtatctattcccccgccctcgccccgtttccgactcgggtataaatttttaaacccatacccaccccgcccccgaaagtcaaccaggggcgggtaaccgcgggtataattaccatccctatgtaaatgttaactatgaagcaaacatatgatcgaaaatatttataaataatttaaattgttaggatcttaatcctactccaatctcaagctacactcactagtgatggaaattaggtgggtaataaatgggtaatgcacctctcaacctcgtccctatttttcatatatgccccccattcctgtctttgccccgattaattctcaatgggttcggggtaggggaatcctagaaactcattaggggtatctattaaaattaaaacaataataataagaagaaaaaaaataatataatataattcaaaataaaaataagaaacaagatattaactttaaaataaacaaatattctacatattaaaaagtctttattacacagtaaattagagaagattaacagtcaactttgtaagtattaccaataattgtaatatgtagtaattagaaagctatatgaaaagttttaaaactatatatatggatcgaatttgggatgggtagtatcaccctcgaccccgccccgacccgcttcgggtatataaaattgcaccccatccccaccccattacccattaaggcgggtaattcgcgccccatttgggatgggtacccatcctcatgggtcaaatttttatcactacttgtggcacctatgaagtgttgtttctttctcgaaagtacctatattcttgtttttaatgaagacaaagaagatgaaaaattcgaatcgtccatctgatacttggaagatgcccaaattgataaattgtcaacctaggcgctggatgcccgggcactgagtgctccgggtgctcaaaaatgaacttactccgaatttgattttgatgtctcaaatatgccagtggtatgtgtagttgatatatcaatgcaaagtttgacccatttgcactaagacggtcccggaagctgaaacctagttgggaatatcaacttgggcgctgggtgaaaccctagatgcccaagatagcttacgggttgcatgttcgtgtaatttcagctcccgatacttggattaggttgctccatgttttcatggcacagaataatgaaagatagtgagtttgattcaagttattgaagtccgaaattccatcccagagcttctgaagtcaacctaggcacatggctagggtctcctcctaggttgactgctatgactagggtctacttagctctgtgatgtcatccttcttgtcacatatcaaacattgatgcccacattaccagggaatttttcgggttaacatttgccccccaagtcaactttatacttgtgtggatttgacttgatgatgtgaaccgagcccgtttcacttgaaactactagttgggcatcaattttgacaatcttaggcaattgtttctgttcttcaagtatttccaataaaattaggactttagattcccttgattagtccttggaaatttttcgaaaattaattatcaaagaaaaagagaaaaaaacttatttttttcacttatcttttatct

SEQ ID NO: 196915 - DNA, 1513 bp, Cannabis indica
tggaaatttagcaaagagtgcactccgtccccgtccccatccccatttaggattttaatgatcgtctccgcttattcctcatgaaatatgaacgggatgaaaatataaaaaaaaaatataaatatataaaatattaaactacataaaaattaaaatattacacattaattattattttaataaattaattagtttccaaaatataacttatggttcacaaaaagaatattaatatactaaaaaaatacaaatataaattataaaatataaaatattattagaaatataaaataaaatactaaacgagaacaaaagaaaattctcgtccccgccccgttcctcatatagacgggaaatccccactacactaggggtgagtccctacgagatcccattcccatggaaaaaatatccatccatactcttacccactactttctctttttggtcgggtcacaactcaattttttttggtacctacctactctggtttagattaggattgtttatcaaatcgcttaaatcgtccacaccgtaaaaaaaatacgatttgaaattctttgcagttagttcgcgatttgaatttttcataaaccgcgcagtgcggtgcggtttgcggttttgaattgttaatatgtggttcaaaccgtaccgcaccgcacattataaaaatactaaatttttatatttgtttaggtccaatatgtgaatgtctaatccaaaccccactaattattgtattatgaaaacaaaaattttttttttctatatttatttttaagtcttatggtgttttcgacaagtgttgtatttgtgatagtttaattattgatgatagtccaaacggtagaattcgcaaaaaccacactgcaccgcattattgtttgcggtgcgatttctgcagtttgggaaattgaaaaaactgcatgtacgaattggtttgaaaaaatagtcaaaaaccgcatcacccataccgcgaacatccctaatataaatacaaactgaagtgtatatatatatgctaagcacaaaatataaattattttgctatgaaattacatttagttttaatataattagaatatgtaatatagataaaaaaagttaaaataacttctaaaatatatatatatatatatatatatatatatatatattctcgggctgagtcaaactcgacccactcaggctcaaaaagcttaatggattgggtggggtgaaaagataacaggttgggttagtgttggattaatggcgctattataaaagcttgatagtcattgatatctaattctaaagaaatgtttaggttattgtaatagtaataaatagatctattatattttttatttcttcttttataacttttgtaatctattacaattcacaatggacaccaaaaaaacaactagatagaattaacttttataaatatgtaatcaatgtattgaaaattagtgaatggcatttttatttttatttttcctaacgagagatactaaaaagcaccagt

SEQ ID NO: 196916 - DNA, 1277 bp, Cannabis indica
atgaaaatataaagctttcaataatagtataatattaaaatcggatgcaggggacggacggagaaaggttttgattagaaggggccaaaatctaaaatattatttgggtgggccgaattcttattattttcaaaatatgaggactattttaagaaaacaacaagcaattacaatatctcaaggcaccacactgaatattgtttggaacacacccaaatttttatagtatgttttagagctcacgttaatagggagagtttgttttgattaatttgaaaataatgtaatatatttgtatattaaaaattttttgtttaaatttaatgtggtatattttaacaatggtatattaatgtggtatatttgaatttaattatttttatttttggtatgaagtaaaaataacaatggtggaaaaaaaaggcaaacaaatgaaatataataaaattatggacggaaagatatttaaattaaatggcattttttgaagagaattaaagcaaaggaaaccccaagttttgagtctagcccgaccgacctaatcagcccagttccactgctccacttgatagccacgccacgtggtcgctccttattggcgggcagccttggcatcagacgagccccacgcagacaggtcttgtcccccacttgccagtcagtcgccttccatggcctaacttggtccttgtgtctccgccacttgcccaacctgagagtgggcttcctccatgctaccacttttttttttttaaaattgacgttatattcactttagtattaatatttatttttggaaggtaaaagtacatatagggtagtattacattttaagggatatgattttgtctcttattgtactttcacggattgtaatccgtgatgtacggtagccatcagatgaaagagttagggttaaaaagtagaaacgtatcctgagacacatctaatgtaccacagaagaaagtacatcacaggacaaaatcatatccctacattttaaaatataatataataaaagagtatttttagttaatagatataagtatttttcaattcaatttatttttttttccttaaaaatctaatattttcttgttcctctcttcaacacacaccatgtgtacacttaattagggctgaaaatgggctatagacaaaaatatatttttgctactataaaagtaagggtttttttttttttttttttttttttttacttttttttactacttacttaaacttatttttttgtattttacagtattctatatagc

SEQ ID NO: 196917 - DNA, 1900 bp, Cannabis indica
gccaacacttcaacaattatccatcttggccatatatcaaaaacagtagcatcaaaaaatagttgttctggtcttgacattctaagcatgtgagaatgcttagttgtctgaacttagcttgtggaacatacgtagttaaaatgtctgtaggattctctttagttccaatcttcttgacttgaatttctttccttgtaatgacttctctaataaagtgtagcttgatatctatgtgttttgatctttcatggtacattggattcttcattaagtgtatggcactttgattatcacaatgcattgtgatatcctttgcttcgaatccaagttcctctgagaaaccttttaaccagatcgcctccttaatggcttcagttgcagccatgtattctgcctctgtggtagataaagctaccaccttttgcaaattcaacttccaacttatgcatccaccaaaagctgtgaatgcataccttgtaatggaccttctagtgcctatactcccagtataatctgaatcaacaaaccctgcaatttcagtgtcaaacattgcattgttcttgtacaataatcctacttttgttgtccctttgagataccttaaaatgcacttcaatgcatcccaatgcacctttcctggattagagataaatctgctaaccatgctcaatgcataggccagatctggcctagtgcagaccatacaatacattaagctcccaacacaggaaggatagggtacagagtccatgtacattatatcttcttcattatctggtgcttgattttgagtaagtttgaagtgtgaggcaagaggggtagtgattgtcttggcctcactcatgcaaaacttgtttattatcttctgaatgtacccttctcgtgacaagaaaacagagcttggtctttgtattttaatgtctatccccaatattcttttagcttcaccaagattcttcatttcaaattctgagcttagtttatcctttagcatgtttatggcctttctatcctttccattgattaaaatatcatccatatagagcaataaccatataggtgtgacattgtagtatacacaaggatcatactcactccttgagtacctatttgcaacatgaattcatggaaccttaagttccactatcttggtgcctgcttgagaccatacagtgatttttgaagcaaacacacctgttcagccccctttctcttgaatcgttcaggttctttcatgtagaaattttcttcaagttttataggccagaatgcagtctttacatccctctgatccatttcaagatcaaacatggctacttttgccatcatgattctaatagaagtttgtatcaccatatgggagaagatatcattgtagtcaataccctctctctaattgaaccccttagcaaccaatctttctttgtaccttacttcttcaccaggaagcccttctttgtgtttgaaaatttatttgcagcctatgatcctttgtcctctaggtctaggtactctaatccatgtattatttttctcaagtgaacccatgtcatcattaatggcaccaagccatattttgtttttcttagcaactgcttctacataagtagtaggctcaccattttcaatttcttcagctgcaacaagtgcaaatgcaatgcagtcagcataccctagtctctcaaggggtctcacatctctcctaactctgtctctgacaagttgatagtcctacaaccctgatggtatttgttcttatccttgtgcttcatctgaactagctcattgtgtgttgcaggtgtatccatctgatttgcaatttctacatcctctttgtttgtttgaatctcaacacattgtttcccatgaccagtattagtattggtagctttcattgcca

SEQ ID NO: 196918 - DNA, 2432 bp, Cannabis indica
ggggctcttgggatgtttgcaaaattttggcacggatcgcacctgaggacatagtctatacattctttcttcaaggtaggccaaaaatatccatgccttaatatttttttggagagacacgagcccccagtgtgatctccgcaaaatctttcatggacttcttgtataatccttctaacatcaggatctgacacacaccttaaatatggcatgttgagccctctccgataaagaataccattgatcatcaagtatcggtgagcctggtactatacctttctagacatagttctctctcgagacagttctcccattgttatgtacttgatgatagggtccatccagcttagtgatttctcattcattgctacttttgattttggtctaatgctaggctccgtgtgatactcaagtgccaccacccaaagcttttctaccttgctatctgatgctaacttagctagaaaatctgcatgaacgtttctttctcaggggatttgttcgatcttgtattcttgaattcttgcagcaattctctgacagctgagacataagcggccatcttttctccatgcgtttggtattctcccaacacctgattaacaacaagttgtgagtcgttgtatatctctactatattagctcctactgccttagccaactttattcttgctatcaaggcctcatattcagcctcatttttggaagccgaaaatgtgaaccttagggcagcttagagtctaagtccattaagagatatcatttctaccccagcccccgatccattttcgtttgatgcgccatcaacatacactttccatgtaggcacatctagatctggctcattggcattagcctctattttgttgcattcaacaataaaatctacgagcgcctggcctttgattgagatgcggggtatgtattgtatgtcgaattggcttagctcctttgcccacttgaggagccttcctaaggcttcaggttttcgtaagacctgttagagcgggtgatttgtgaacactttgatggagtgtgcctaaaaatatgacatcagcttccttgatgcaataagagaatagaaagctaacttttccatcatgggatactgaatttctacctatatcatgcgtttattgacatagtacaccgggtgctagatctttcgttcttcttggaccaacaatgcactaactgcattctcaaagacagcaagatataggtacatgtcttctccaggaacgggcttggacaacaccggtggctaggccatgtgttcttttaactttttaaatgcctcctcacagtctttggtccactcaaacttttggcactttttcaagatgttgaagaatgggatgcacttgttagtggattgggaagtgaagcgactcagggcagctaccttcttgatcaagctttgtacatccttatgtcttcttggggagggcttacttaataaggcctgtattttttgggtttgcttctattctgtgctggcttactataaaccctagaaatttccctaatttgacaccaaaagtacacttcttgggattgagcttcatcccatacttcttgactacttcaaagcattccatgagattgtctacatggcccatacttgttttagatttgaccaacatgtcatccgcgtacacctccacgtttcgccctagaaggcctttgaacattcggttggccatgcattgatatgttgctccttccttctttaatccaaagagcatgaccaggtaatagtatactcctttcttggttctaaatctggtacactcttggtccgcaacatgcattttgatttggttgtatcctgaatacgcgtcgacaaaggaaaataatttgaaacctaaggtagcatccaccatctggttaatcctaggcagttggaagcaagtaggcaagctttgttaaggtcggtagaaatctatacatatccaccacgtcccatttggcttgggcactaggacagggtttgccaaccacgtccgggtaatacacatcccggaataaaatgtttgacaactattttattcacctctttctctagggcgtcaaacttcactggatctagcggatgccttttttgttgtaccaaaggcatgtttgggttgacattcagaatatgagtaattacgtgggaacttatcccggtcatgtctccatgacaccatgcaaatacgtctgctgacaccttgatggtatcaataatcttgcttcgctctttcagatcgagaccctttcctaagcagatgaccttagttgggttctgatctcatattcctacctctttcaatatcctccactggttctaaatgtagtttcaaagccaatgcaaggatccaacatgtcttgtcttgatgaggatgccacctcaatcccttggattgcaaaaatgcatgggtgtactgcat

SEQ ID NO: 196919 - DNA, 609 bp, Cannabis indica
caagctattattttaattagtagctatcaataaaattgaataatttcttaaagaaacaaaaagaaaattaagtattaactttatttgggtaaataattattattataattactatgaaaattttgaagaaggatcgttaaaaatatttccatgtaccattttttatttataccatgtagagaaatttctgtatgtatatttatattagtgtattttttgattttagcaaacatctcaacagttttaaaaataaattaaataatttgtggtgttaaaaatattgggttcaaacaatcaattgcttacttatttatttacatttatacgtgtgaaattaattaattaaacgatctttttttaaaccctaaaatatttataaaaagaaattaaaaattggtgagatgtgctataagtacatgtatacacactatcataaattataactttttaagtgtaatataaatatatttttattttatatgagtaacttaaaggggaattacctcattaaattattttttttaatttttttttcaaattttacggtttgggtttctaaaatggttgcagcgctagttgctaatacgggtttctaatacgaactttttg

SEQ ID NO: 196920 - DNA, 1825 bp, Cannabis indica
gtacaaacatcaaaatttaggaaggtttatacacatttgtatttcaagcatagacacatttgtatcgaatggtccataagtattaatttagtgtaatgaaaggaacaagattcaatcttttcaaacaaaacacaaccactccaaattccttctcaccaatccagataccataatttcataagacaatatataattcacaattcgaaactatcaacattaacaagaatgtacctgttaccatcgtcgtctatctgagccaatgacacatactggctagaatcctccctcgacccataactcaaattcccaccactcccttcttccaccgaattagggcggctctgttgcctttgccggcggcgaaactcgacgcagacgcacaccacatgtagaatacactgaaaagcgtacccaataatccacaacctcaagggcacatccggggattcagtccggctaagaaccaaaaccgtggccgccacgactacgaacgcgaaattccaaataatatcgagtatcaccacgggtttcgagtacgcccaatcgctctgcctctcctccaattgctcggctgcggtctcacgcacgagcatcgatggctcacgcatcatcctccggctgctcgcctggcgaaggaaccgcgcagcctgtcgcaaactctgcctctgaacaaatcgacggccggaattgctctcatcggaagagccacccagaaacggcgtcgtatccacaatatcttcagatgatctgttaggagatcttaccgacgccatgatatgatttgacagccaaattgggaaattttatcaattgattcgaaccctaactcgctgagttgatacagtttagcccatcaaactcgggaatcgataaggtcaagcagaaaattggatatgaaaagttgaaatttttgttttctgaaagggagagatgataatgacgatgtattttatcaatttttttttttgaataattagttttataaatctttacataattttattttaaatgaatctttaaataattttttttttaaaaaaaaatttaaccattattattatctactatctattcccttaaaaaaaaaaaacatgccagttgcatctctctttttcgatttaattagacttttgtaataaaataattaaatattaataactcacatgcaacataagataaagataggagataagatatctaaaatttgtttctatggattgaaacttgttagaattttctttaatgaattataatatttttctttatttattgatttttttagactaaataactgagaataattttttataaattcttagataaagaaactcgttttggtcgtatttggtgatacagtataagttattacatttttttttgagagaaagttattacattttttattttatgtttttggagaaaacaattattgcatatatatcgagagagacataatatagagaacaatcagataagtgggtcccataattatttcttgattcatccgaattccgaactgaacgtgacctattaaattcagtaaaaagaaaaaaaaaaaaaatacctctaccttcctttgtactattttgctcaacatttttcattaatttctttttattacagaaacaacttcattaggcaactgctaaaaaagtcaaaaaaaaaaaaacttaaattaagtagatacgaccaccatacttgcacaacatctcaagaaagaactaatttagcgaatttatgagcaatatcattaacactatgtttgcaaaacataaacataaacaaagtactattagaattatttgtggactaatataatcatgag

SEQ ID NO: 196921 - DNA, 1743 bp, Cannabis indica
ttcaaatattcttaatgaactattaccgtacctgaaatatggaacttattccattaacatttgctaacaattttactctccaaattatgttaactatatatatcatattttgtctactaaaggtttcctattgtctagtcatgctcatctttttattaaaacaaataaatttcatgataactaatgtaattagttaactaatcgttgttaattaattattagttttcttctaagtttttgttactctgttttgtattgctttaatagaattcagttgaactgaattcttgcttcattgtaatttatggcctataaataaagctctagacctcttaatcaatgctaagttttctagcattattttaggctttctttctttttctttcttgctgcaattctttcatggtatcagagctcctctgactcacgttcatggcgtcctctagcgacaactcatcccctgtcactgatccttggcctcaagctccatacctccagtgcaacaatggaatcttttctcccattctctcacctgatcttctcttatcatcaagctcgatcgagctaattttctttcctaaaaattacaagtcgtgtctactgttgttggccacgatcttgatgttactccttctgataaactgatcattggcaaaagtaatcctttctttcttcaatggcgacgcaaagatcagcttatgttatcatggcaacccaagacttcttcaactcaaaggttagctcacaaatcttcataaaggctccttgactatctctgattatattgacaagatcaagtcgatttgtgattccttgaccattactggacataacatcacatatcataatatgatccttctcaatggctttgtccctatcacctctcggagtgatgtcttgtctcttgaagatgttcaaaccttgcttttggctcatgaaacaagactcaaaaggcaccattccatgcttgatatctccaccaaattgtcagccaatcttacctttggctctcgtaatggaccttatcgttcacctccttactatgttagaaacacaaatcctgaccaacaaactcaaaatctatcccataattcttctcgacctccaaacaataatcgtccactatgtcaagtttgcttgaaatttggacacacaactcctgtttgtcattatcattttaactgaaactgggtaactccaaagccaatttcctctcaacctcaagcacatcttcctgaataatagtttgattatgatccttaggttaatgtctcccaatctctccctgattttggggatgatgcaagttggttcgtggacacaggagctaccaatcatgtcacctgcaacatggacaatctttaatctacaaccacttactctggccatgaaaccgtggctgttggagatggtaagagacttgtaatctctcacattggtaaagctactctttctccaaattctttttctcacttgaattttgtcttgcaagtccctaccatgacaaaattaggcccttattatatgaataaatggtatttttaaaaatcattaaaaaatatatgtatgtttttaaaaagattttttttatttgggtccctaagatggatgggccctagttggggcctagcctgccttagcctagggcatgctcccatgtcgtggcctgtgacctgtttttaggataatccttttttctgatatcttggttgaataacaaattgtattttggtcataactctt

SEQ ID NO: 196922 - DNA, 1002 bp, Cannabis indica
ttatttatttatttttgatgaaatccaaatcttttggttgaaatggagattttatcatcaagttttgaggaccacacaacttcccatacttccacacatttcaaccaatcattgttcatagtttttcaaccaaaataaataataaataaaatccatagaattttattttcttttaagtttgaaaacattaccataaaataatgctgataataataattttttaaaatactcaaaaacgtgtatggttaattacattttggttattaatacattaagttcaatatatttatttatcttttttttagatgcaaatgcaatatatgtatttatttgtttaaagaaaaatataatttcttatcacttgtgttagttaaaagttcatttgaattagagaaactatataaaaataacaaatgaaccattaatatatttgtttggagaaaatttgtcaattttgtattgcatagttattagttttttttttcagaggagattattgaattaatattaataaatgtacaattcttttaaatgacattttcatgaatttagtgattaaaattggtattggactcaataaaagtaatttatccatgttaaatttcaagaataatgtgagccaaaaatatacaaacaagtaaatttaatataggtataaaaatatatttaaatctaatttacactatacttaaaatggattgaaaataaggtaagtagtgaattcataccatacacttaataagttatatttgtttttactaattaagggtttttaatattattttccttacttttctttagtagaagggaaacattaattttcatatttgagtttttactttacttttatttatttttagctaattaagaattttgcctactgaactttttaagtcattaaattttttctcgaattattgtgatttttgaatttaagaatttttcgtccaattttactaacaaatacttgacgtgaataaaagtttagaggacacgattttg

SEQ ID NO: 196923 - DNA, 1571 bp, Cannabis indica
tgttacacttttgaaagttctgtaagtacctccccattttttaacacgttaagtgtcaaatggcaagacacgtgataaaaaataatgcaacatcattttattaatagccaccatattattttattaatagccacgtaatgtctattttagttcacagttaatataaattaaactaacatataaatttaaaaataaaaattaaaacaattaatatacattaaaaatctgaattgtaaaacaaaaacaaagtaaatttaaaataaaataatagtgttagattttgagagcctaatttaaataaaaacacaatctcttcaattacatggagagagagaaaggcgactccatcttctctgacaacgaacaccgatcaaggttctatcttctccaaccacgggtatcattcgaaattacatcttctccaaccacgagcatcaatcaagggagcagactgagatttagcaacttttgcttagaaataaatggggtgatgggtatgtgattgtgaaccaccacaagaagtcgtgattcgcacctcaaagacagtgaagaacccatgtcgaagattcaagtgttgtcatagattcaatgtttgattttttttccttttttgtcttccttttctttctccgaccttttttgaatttagattgtgtatctttattattaatcttcttctttcacattaatggatatatgagtttggattcttgttaaaaaaaattcttccctccacagctaatgggactgatttgattatgtaattttttgaacatgattgtgatttttttgagtggatggaccctgagatatttcaccctatttgtggagttggatgttgtatttatggaagtttgagtgggcaagcctttagaccatctccaatgggagacataaaaattgtgctatatttagcacaaaaaataattttgtggtagatttacattaaattatagcattgtgctccaatgcacaattataaaactttgatgtaaaatttaaagtctaattaatgttttattaaaaaataaaactaaaaactttattatcaattttattattattttaatatgtaagacaataaaaataataatataaatgcttcataatttaatgatatagttaattatactaataaaataatacaaatgacataaatataaataaaaaagtagtgtatttattgtattgtaaattttacattatagcaaatgttgtgctaaatttggcacaaaatttattatatgtcaaatttacatcactttttggcataccattggaacacactttttgttaaatgaactatattttaattttcactacttatttacatctccattgaagatgctcttacgagtgggtgttgttcttggcagcaacacaaagatttactccattttgtagccatggtgataatcatggttgtccctctacaattgttaggagctaaatagctaatgtagcagtcatcaaaaagataacaattttgaagatgataatgaaaccacctaagtgattaaagaaaataaaggcagttgtgtgctttggtttttctgaacttttaattgtat

SEQ ID NO: 196924 - DNA, 1592 bp, Cannabis indica
tttttgatgaaaagggagttgtcggataaggatctgataaagcctgcagtggtgagggtggtactaagtttttcataccactgacaagaggcttgttttaatccatagatgcttttatgaagtgtgcaaaacgaatcgggtggtgccttgtaacctggaggtaatttcatatacacttcttcatgaaggtcaccatgtaggaatgcgttattgatatctagttggtgaacgttccagttattcatagctgcaagtgctaataagatcttgagtgtattgattttcgccacagtagcatatgtttgaaggtaatcaatgccttatttttggttgaaccctttggctatgagacgagctttgaatcgtatagctcaccttgttcattatacttaactttgtatacccatttgcatctaatggctttatggccaggggtaattttgtgacagtccaagtatgattgttttcgagagcctgagtttcattatccatagcgagtaatcaatgtttgaattgggaagcttcactataggatgtaggctcgatgtgggagtatgctgctaaaacagccgctcggaagtgaaggctaagttttgcataggagatgaactcttcaatggggtaagcagtggaatgagtatgacaaacataatccttgagatgggatggtttgtgtatcaggcgaccagctttagatttttgtgctggggctgggtgtgtaatatctggtgtgatgccagaattgctaccagtaatgggtaaggacttggtgtgggagtgacaccagtggcttcaatattggaaggaatggtggaggttgttttagtgattgtaggatcaacactagttgaattgttgtcgacgagtgtgttaggtgtgggaacaacaccagtggttgctgatgttgtgtgggtgttaacatcagcagtggagttatggtcaaagaatgttgctggtgtgggaaggacactagtatttttatgttgtgtggtagctgctagtgtgggaacaacaccagtagtttttataatggtttctggtgtgggaataacaccagtatttttatgttttgtagtattttctggtgtaggaacaacaccaacagaactggctgcatcagagttgggcattacagtgtaagaatcagcaggaagtgctgagtgtggacccgatgtagtggaaatgagctgtgttggtagtgggattggttctattaatagaagtgttagcaggtatgcaatgtggttggaagaacacatcaatttcattgttggaaccttgcccaaaaaagggaaacacattttcatggaaaatgacatctcttgaatggtaaatttgtgttgtttggatgtcaagaagggtgtaacccttcattccatgggggtagccaatgaacacggatgcacaacttcttggggaaaatttatgcctagtggaggtaagagtggaagcatatgctaggcatccaaaaactcgaagatgatcataattggggggtttggagtgaagtttttcgtatgaagtacttccatgaagtagagcagaaggagttctgttcattaagtatgttgcaatagcaatgagatatcccc

SEQ ID NO: 196925 - DNA, 1558 bp, Cannabis indica
gaatggggtttcttcagaaagtcatggaaaaatttaaatttccctatcgctttatcagccttgtgatgacatgcatctctacggttagcttctccttttccatcaaccagcagatattgggatcagttaagccttcccggggtatccgtcaaggggatccgctttccccttatctctttctgctttgttcagaaggtttgtatgccctcattgcccaacacactttgaactctcgctcccataaccaaggtcttggccgaaaaaatcactcgtaccgctccaatcatttctcatcttttctttgctgatgacaatcttcttttcagccaagcaactccttctgcggctgcaacaatcaaagaggtgttacatgattacagccttgcctctggccagatggtcaatttcgacaaatcctctctctatttctcacctaataccactgaagacatcaagcaccaaatcactacccttttgggcatccccattcgcgactccattgagaaatacctgggccttccccaatcctttggaagatcaaagaaagaggcttttaattaccttactgaccgtgtctggtcccatctgaacagatggaatgctaaacacttctctaaaggaggaaaagaagttctcttgaaatcggttgttcaggctattccttcctacgctatggcttgtttcaagatgcccttctcttttctttcaaaaattgaatctatgatggcctgtttttggtggggaggcactgaacatagtagaaaaattcattggaaaaaatggtccgctctttgcctttccaagtttcatggaggccttgggttccgctcaatgaaggctttcaaccaggccatgttggccataaaggcttggcgcttactttaggcacccgcatcccttatggaaacagtactaaaagcccgttactttccccgcaccaccttccttgatgctagcaaaggtcgtaggccttcgctggtatggatcagtatctcttggggtaaggagcttcttaagatggggattaggaaatcaataggagatggcaccacaacctctattttcaatgagaggtggatcccagatcacggtaaaattagttaccttgcacatctttcggatgggatttccagagtctctgatcttataacctcttctcaccaatgggatgtttcctacattgataccatttttccctctgacatcagccaagcccttcaatccatacccctcattcccattccctctcccgataccttttactggacgtttactcctcatggtaattatacagtaaatttcggctatcatctagcacataatctaaattataaacatgacccctcaccctccaacaccaccgacaatcaaacctggtggaaaaccttatggacacaaccgattccttcaaaaaccaaacacttcatttggcgagcttattatgacattttacccactagtctaaatctgcaaaaaaaggaaaaccatcaccacactctacctgctgtcgatgctcaaatcaaactgaatccttagagcatgctctcttcaggtgtgg

SEQ ID NO: 196926 - DNA, 1524 bp, Cannabis indica
ctcccccattcacatcccagaaaccgtggaacaagcattatcctcacctcaatggaaagctgcaatggatgatgaacggcttgccctcttgaaaaataagacatggaaagttgtaccacgacttccacatatgcatgtggttgacaacaagtggatattttgcatcaaatacaatgcagatggatcggtaaatcgtctcaaggattgccttgtagccaaaggttttcaacaacaaccgggtattgacttctttgaaacgtttagccctgtcgttaaaccatccaccattcgggttgtactctctctcgctgtatgccacaactgggacatccaacaaattgatgtcaacaacgccttcttaaatggcaatcttcaagaagaagtattcatggagcaaccggtcggttttgttgatcctcaaaatcccactgctgtttgcaaacttgagaaagccttgtatggattaaaacaagcgccacgtgcatggtttgacaaactcaaaacaactctacttgctctcggttttacaaactcagtagctgatacttccctattctttttcaacaaaaatgatgccatgttatttgttcttgtatatgttgacgacatcctcttgacaggtaacaatgctactcaagtccaacatatcattgcccaacttcgacagtcctttgccctcaagtctctcggatctgtaacatattttcttggttttgagatcagtagggggcaaaatggcattcacttatctcaaaccaagtacacccttgatcttctaaagaaaaccaacatgtctcatgccaaatcctgccctacaccaatgaatcaaagcaacaaactcagccaccaagatagtgcacccttcactcaccaaactttatacagaagtgtaattggcactcttcaatacctcactctcagtcgacccgatattgcctactctgtaaataagctgagccaattccttcaagcaccaactcaaaatcactggaatgcctgtaagaaaatacttcgctatcttgctggctcaattggcgatggaattcttttcactaaatcgcccaccttggacattgaaggcttttgcgattctgactgggcaagctctctggacgacagaaaatcctcaacaggatactgcatatattttggaaacaatctcgtcagctggtgctcgagaaaacaaaaacacgtggctcgctccagcacagaagcagagtacagggccctggctcaagcctgtaccgaagtagtctggctcaaatcgctcctcactgaagttggaattaattgcaaagaacctgcagtgatctggtgtgacaatgccggtgctcgacaactcgcctctaatcctgtcttccactcgagaaccaaacacatcgaaatcgatgtgcacttcatcagggacaaggtaccgaacaatgaagtagaagtgaggtatatcccaacagaggaataagttgctgatatactcaccaagtccctcaacatatcacaattccactatctcaaaaacaagcttcc

SEQ ID NO: 196927 - DNA, 1275 bp, Cannabis indica
gagaatgtaatagagtaaaatatatatatagactaaaataattctattgttttttttcaataaaattttcaaaagaaagggtaatacagaactttgacttttttttaaatattattttagttttgttatggattgtaattgcaatgaggattacattagttttggcatgtaatcatcattataaaactcaatgtaataaccattatattgaaattacaaaagtaaaaatagaaaaacaaacaatgcaatggacttatctattatggtgaaccaaacatcacctaaatgtaatacttacataacttactataaatttatatttatatatatgggtacactattaattaatattattcatgattggatagtattaggaaaattttaattcttatacttaatttttctagctatttagaaagtctttatttttttttacattttatgtgttgagattgtcagtccactgaaaaaaaaaaaaaaaacgttttacttaccaaaaaaaataaacttaaaaaaaaaaagttgaaatttgactaaaataatttgtatataaacatatcttttaatatagtataaaatagatattttttatattttgtaataaatagctaaattaagtatagaaatttaaatttttcttctattatttgccagtgaatcaaactcttatgatttaatattttttaaaattaatatttataaataaattgttttagaaattgtaccatggacaaatgttccttctatatatatacatatatgttaaacattacttttcattagtaataaataaagccttataaataaaagttaactagttttatttaataaatctatataaaacatcacgagtttttacgtagttttgtagtgaaaatttacatactccacgagtcattattattttttagtattttttaataatgtacttagattacaaaataataactatgcatattcactcaatttcatagggtttttccttcccaaaatgatcgatcccttttcccttagattttttccatatttatatgaattcaaggaataatagttattctcctttgataagtattcgttcatgaaacatgattaatttctatgtttcatgtttagaacatgtggataaataaaataagtgatgataattattaacgcagattttcgttaacgataataagcctatttcgtgataggatcagcaaaatattagttgaaatctaagaaagaatagtaaaacaaaaacaacactaagcttttacgtggttttccagttaa

SEQ ID NO: 196928 - DNA, 1218 bp, Cannabis indica
ttttttttttcttttcatcttttactgaccgtggtagaaattcgcttggatgtgttcgatgaacattaattatcttataattttgtgcttaatcacagttttcactcttcttctttttcgtgtatattttaggtcacatctaaaaatctgatgatggcccgttaatgttttcgattttattatacaggccatgaaaaagacacataaaatggtcaaattgttgttgcgacatgttatctctccttttataattttaatagaatgttatgttatatctaatttttattaaaacatatgatttgttttcaatattattatgtgatagaataatcccttataatggatatagttacaatgtttgtaagtacccccaatgatttttatcaaagcgcagctaccatttttatcaatggtatgatctatgttgtagactaccgttgtgattcttaggtctatgagattttttggacattgttgaattggtgaaaaatagagtaaaagagatgaataagaaagagaagaacattgagagatagatcaaagaaagagaacatgaagatcaaagaatggatgactttggttacactacacaaatgtagtttatataggtacaggaagataaaaaaagaattagttacaagagttagtttatgacaacaagaataacagactaatctagcaactttagctgtcttctcttccaatactccccctcaaacttgcaattggtccatcatcaattgtatgtttgtttttaaaagtgatgaatcgattgttggatactgcttttgtgaggccatcagctaactgatcagtttctgttacatgtttagcttggacaaaaccttggagtactttttctcgaacaaagtatagatcaagttttatatgttttgttcgagcatgaagaacatgattcatagtgagcattatggtgctgagatttccacaccagatagtaggaatccgagaaggggaaattcttagttcattgaatagggagtgcaaccaagttaagtcagcaactgtgttggccagactcctgtatttagcttcagtgctggatctagaaacagtggtctgtttcttgttgtactaggcaattaagttttgtccaagaaagatggcatgacctgaagtagagcatctgtcattgggatcaaaagcccaatatgcgtcacaaaatgcagttaagtcaaatgtggtggggggttttag

SEQ ID NO: 196929 - DNA, 1078 bp, Cannabis indica
cgtagcaaaccaatcttggactttgaaccccgagaattcaacacaagcaatgactgtaaagtctcttaagtccttagttgtgttgttgaagcttttagcccatttactcgtcattacattgtaatattctcctggaaagtacatctgaacccatctttcaaatctaatctcctcaagatataatgtaaccaaaacattcattgcttctatcttctttaattctctttgaaactctgttttcgaatacatataggcacaagtgtaaatatgactcgtgaatacataagttttgaacttgtggatgacgttcatagtaatgtggtggtagcatgcaccatggtgtgcatcaaggaacatgagctgcaaaacatgaataatgttttgatgcatgtccaacacaaagcctaagttctcaacatcaccatttgcttctttcaagttcctcatataataggtccaagaatcatgattttcactgtcaattaccgcgaaagctatcaaaaaaatatggttgcctgaatctaatgtcattgtagacaacatgtgcccaccatatttagtcttcaggaaaaatctatcaacgtacacaacaggtcgacaaaacctaaattcacacctacaaggacctagcaaaaaaaaaaacaacaatacttgaagcaaccatcctcaggcataaaatctataatgatacccagatttcttaattgtagcatgtgcaagtaagccagcaattttcaatactaagcttcaagtacaccccaaactaggtgtagtacctcctctttgcacctccaagtattttttcataactcattcggatgccataataattgtatatatatatttaaaatacatataaatgtgtagattgaattggatcggttacttttatatgtcaattaacattcaattcgcacaaatacaaattttaaactttctaatttaattcaatctgcatgagtacagataaatgtactttatgaattggattgatattttatgagcaaccatacatgagatgacatgattgttcatacaaattgcacttttaaggtaagatttgctttgagtatgtcgc

SEQ ID NO: 196930 - DNA, 501 bp, Cannabis indica
agaactaaataaaattagatctcgtggtcattacataataaattatctggtatggaggacgaattgaccataccagttacattactagcaaaagcttactaaaccacattatggaccgtaaaattacacagtcaaaaaattaatgaaaaattacaactaatcaaaagatttctgtgcttaattttactatatatttaattaaaaaaatctcttcttttttacacaatatcaaaaatatatttatatttaatattgtttttatctttttcgctaaactcacatataatgcaaagctaaactcttttttatatctctcttagtccgatagaacaacttcaaccatataatgcaaaattaagggaattttttttgaattagatagcacaattaaacataaaatcttaaatttttctaataatgctcattcataggtaatacatattaaaagtacactcataaacagtattttgataagataataagtatactaaactttttttt

SEQ ID NO: 196931 - DNA, 502 bp, Cannabis indica
ttgggtagcgaccgagaaattgtacctttagcgggtgaagctgctgcatgcgagcttgcctgtgcagtggagaaaggcaaagaatttctgttttttaagaactcaacccatagacgggaaattactaattatgttagtaactgtaagaatattgctatagagatgtgcttgggtgtaatttttccaaagttttcgcaacattgcttgtttggcaaaaactatggatttggatgaatttgtagaggtttcatccctctcagattcggcatttcctactgttttgattaatcgatgttttctttttcaaaaaaaaaataaataaaaaaactaccaaaattgtggctttggtgcattgattttagatagtcctattctacaaggtattcatagtgctagagagcgtttttttaacaaacaattttactgttcaaaattgattactcatcttttcatttttttactaagtaaaggtttggaatttatcctctatagcttttttttt

SEQ ID NO: 196932 - DNA, 3340 bp, Cannabis indica
ttttttttaaaaaaaaaaggcaaattattaacaagaaagtcggtattattaatattaaaatactaaacggtatttccgtaaatattttgagaaaaatcatgtgttgtgtaagtaaggttaattttctcaagatctaaactcattttcctctttctattaaaatcccttacttgatagttcatacacacagagccttcgtttctcctctcttatcttcccagccaagccaagccaagccaagccaacgccatcgaagccgagccgtcgaatcaccgccgagcgataacggacggtcgaatcaccaccgcgcggctgtagcccatcgattctcagtccctttaactggtcgaatctcttcaattcagatctctctatattcaggtaagtcaaatagtggacttaagggattagatcattgccctagattgattttctatggcaacatctgggttatgtgtttggctccataagaaaatagttgatcctctaatccaaatacttcgcagaggtgcagaacctaagcttttggccttctctgcagctttgggaattactttaggactattcccaatatgtggagtcactgtatttctatgtggacttgctattgcattgcttggttctcattgccatgctgccactgtaatgcttgctaattttgttgcaacaccaatagaattgagccttgtcgtacctttcttacgcttcggtgaatttatctctggtgggtctcattttccattgacatctgatgcttttaggaaagtcttaactgggaaagcttcaaatgaagtcttgctaagtattgctcatgccttgcttggttggcttatagcttcaccttttataatggggatcttgtacttgatatttttaccatgtttcaagattttggttcataagttcagtgttgctccttcaagtcccaacaagtctctgctttcacaatctgaagtgatgcttaaggttagggatgcctgagccaattcttgctttgcttgattcagtcatggaacagctttatgctcaattgtttactattatgtaacttgttcatgtttatttgtgatccaaacatgtctgttggcttttacaaaaattatggaattatagggtcattatatttacacatgtatgtatgaacaaaggcattgttctaatgaatataatagttcttgttggcttttaaaaggttatgaaattattaagctatcattacacaggcactagacaaagctggctagaatagaaatagagctagcttgaaacaggtcttctccttgtaaaaaacattgaaactcttgaattcttactcttgcaaagtaagagatttcaagtactaataccacctgcccttttatcccagcctgaaatagatgcagctcaaccttgttaagcccagcaacttcatcatctttgtggcagcatagcccttttcaagtatgagtttttcattcttggatcacttcgaaaacctgcacatttttgttggtcaattaggtgaaaggttttttctgatgctactgattgtttttcttttgtaggttttgggctcttcttcttcctgattctttgttttacaacccttttttaacacatgggaatgggaatgggatttaagcttattcacatcgtacaactgcaattgcttgaaaaatatatcaataaaaagaagaaaatcgtatcaaaattttcaaactaggcaaattaggtacaagcagaaaaatagccacaatacatggtataacaaaccattatataaggcaaaaaaagaaaagtcatcacaccgaagaaggcataacaaaccaagtgaatatttaaccaaaacaaaccaagtgaatatttattaagaaggcataaaactataattattattgtattagataaatcatcacaccgaagaagtaaaaatagaatagaaaaataaaaatttataccaaatataatacattagctataaaacattttaaaataattattttaattagttggccaactcaagaaagcattaaaaaagataatacttactaacgtttttaattataacattttagaaaacacaattatctagttacattactctatacaataaaataaaaaaacgatactcaatactaattatatgagaataaaaatcacatatggagataattaaaggttggaataaattaggaattaaatgctattaaagaaatttaaaatttaatgttaaatacacattaattgaaaaagagcaaattgtcaagaataaaaatgaaaataattagaatttaacgctattaacgagctattatctgtataataattaatggaaaactatatttataataaagatatgaatataacaaataaacctataataaatatgaattgcaatttgaataaaatgatgttattaagtcactgatcaattatgtgtgtcaagatgacacaatgaatcaatggaagagctttatgacttttaaagagggagttgagcacgactataccaatagcacatatgatctaagatcaaaatagacgcagctggatttgtggaacatgggtgtttttgcttttcttgtgttgttcgtgatgattcttcattgttgtctaggaccatttcgagttgtcacggtggtgttcttcaaacagatctcgccgaagcacttcggggtcaaggaagaaagctattagttggattaagaaaaacacacatggatctatttagacgggttgccttattgtggttcaagttgtttgtagtcaggtggttatgcaatatgactttggtcatggttgttggacctcgttctttcactttgtcgggccgctacctcaccttaatagagtaggtagaatacttatattcaagataactcttgcctattcttctaatgtgggacttaggttgataccccaacaatccatgaagcccatataaccaagggaactcgctgcctcaccatcacttttgttaggaagactttcgacacatgtcctaatattgatctcaatcttgtaccgtaatcatcaacgaaacacgtcacctaactacctcaatattagatagacttttgatacaaggtaccatatagatcttcaatcgcgaggtcatcacattgagtgtttctttccctgtaaagcctttaggagcccttgttgtaccaaaagccctttatatttgggctccttctcaaaaggtctcatactaatggagtaaataaaacacttatattcaagataactcttatctttcttccaatgtggaacttagattaataccccaacaatagtacatgagtgatgacatttgttgtctgagttgagtacttttgttagtgtttgttaagcttgttga

SEQ ID NO: 196933 - DNA, 1322 bp, Cannabis indica
aaccgtgtataaattgtgctaccgcacttcatatcacataattccatacaataatgtcactataattaatgtctatgtagcatagaccaacgtgttatgctcacatgtctcttttacatttaaggccttactatagtttttttcagttatcgtaaccgagtataaccttgttataccttacatgcataactctactcatacatccaattaacaaattattgcataattataacattacgcacttagggtaataatcctaggtcacgatttcacaataacattcgaatatcatataattgggcctctgtactataatgtatgtgatatgttcagcttttaatcttctgattgaagactgaaagcacattttatctactctgaagaattttgggtcattttttgttaaccgatctgcgaatcgagttgcatactttattttcagaaacatttgtttataacgtatattttttagagacttttacttctcttgaattgttatctattttagggagtgattacttcgtttaatgaagtttgcaaatttaaattaaaaaataaaaaattcaataataataatattaatatcatgcatcgccaatgaaaaaggcatgcttagtgtaaactattacaaactttcaaatcaatctaaatctataattgtaacctttttaggcattatggtcctaagttcttacaaaccctgtattttctttacaattaatggaattctttgaatgctttgattctagtgtactctatccgacgtctccaaatttgatatacaactgcaatagcaacaactgcatataccttcttaaatttttgatattttggctctctccatttcaacactaacaaatttgagttagcaaggatgctcactgctcttcagtttccccaaaagttcattaaattggttatgatttgcatttctacttttaaattctccgttctttttaatggttccatgaattgctatttgcttccaagagaggtcttcaacaaggagatcctatgtcacctcttctttgttataggattagaatacctttcaagattgttggcaaaggtttccaagcgactagattttagctatcacccttggtgcaaagatctgaaacttactcatctttgttttgttgatgatatcttacttttttttcaaaggtgatatatattcattctatcatgctcatgatgcgaacctttcagacattctcaaagactttggggttgcagactgggcctcagatccagatgataggcgatctacctaagggtactgcttatatcttggtcctaatcttgtatcttggtcctca

SEQ ID NO: 196934 - DNA, 1170 bp, Cannabis indica
aaaatatatatataaaatgaaataaaacaaatttattatgataaaaaaataaaattagaaaacatataaaagtttaggatattctaccatgcactctttcaaaatggaagtactgatgcactcttatttatttcgatatatgaaagaattttttagtctaatttttttcataatcctgtacgttgtaattatttaagatatcttgtaaaattttgagactcttagagaaatttaacacgccgaaaatagaattgaaacagtctgttgtaccagtgactcttttattttatacgcgtgtgaaatagaccgtttaaacactactttttatattgtaaattatttcaaatttcttaaaattttacacaatgtcttaaataactataacatacataattataaaaaaattaaaaaatattcgaatttaaaacaaataaaaaatgcatcggtatttttttaagagtgtccatcgctacgaaaataaatatacattataacaaagaaaataaaataaatataattgttgaaactaatataaaaaaaaaaaaatatgaaaagaaattgcaagtcaattttaaaaattaatttaagtcttatatatataatattgaatttgaattaagtgcatatataaatttttgtattgtaaatataatgtgtctttattatttattttatcgtcaataataaagtgggaaatcttattatagagaaaaaaattttggagactcatctattttaagaaaaaggtcaagtaaaaaaatattttaaaaaatatatagattacataaaaattataatcttacactatgataattaataattaaaagttattgtattaaactatatgtgacctgatgatatttaattagatcaataacgatattgacacgtaaaagaataataaacactactagtaccttttaatatttctcttgtagaattttcatctaaattgtatggtctgaatttttgtctcttaaaaattctacttaaactttttacaaagatgaaatatacttttgttaagttgtatgtcatgtgattaacaaatgttaatgtgaccaatgtgaaattttaaattttaaattttaaattatacatgtcacacttatataataatgacacattagtattttgctagatacattaaataaaacttaacaaaagttc

SEQ ID NO: 196935 - DNA, 548 bp, Cannabis indica
ttttcatgtaatatgtaatcttgtctttgaatcaactttttatatataggtcattttcatcaaacaacttctctggacctttgccaccagaactagggaatttatccaaattacaagaactgtaagttattgtaacaatattacatctcatgacaacatcatgaactatttgtcattcctttgtatttttttcttgtttacttggcagatacattattagttctggtgttagtggtgagataccttcaacatttgcaaatcttctaagtttgcaagtattgtaagtactttaacataattgtatttttctaccacatgatgattaaatagttttctcttattgctatataaaatctgtaacttgttgcaggtgggcatcagatactgaactcacaggaaagatacccgaattcataggaaattggtcgaatcttaataccttgtaagacaagttaatcattttttataacattgcaacctctttactttagctatttacatattaataataaatctatgtttgtatgtaggagaatgcaaggaaactc

SEQ ID NO: 196936 - DNA, 589 bp, Cannabis indica
tttttcacgtacgattaaaaatattaaaagtataaggttttcttttcttatttagaaagaaaataattttttaatgtacctgttaaacacgtattataggacaaagattagttttttatttgtaggataagaaagaaaattgcattatgttatcatgattacacattaatatttgaaataatttgaattatattcccatccagctacgtacagaccaacttaaactactaatcattaagaaaattcaactaaagattaaaaaatataaagaaatgattatttatttttatttttttgagaggaaaagaaatgaatattattaacataaaaaaattgaaaataaaataattcattattgatacaaattaaaatagtttagttcctcctaaagctctattaagtaacataaaaccattttattgtgtgtagccattaatatttagcatatacataaggtaattctaatgtacaacctttaatttgtaccttatagtatgggatagttattttggttaataagattaaagtgaaataaaaattatacggtatggtagtatgtacgtacacatgtgatatatatttttttttt

SEQ ID NO: 196937 - DNA, 786 bp, Cannabis indica
tttgaaaaataaaaatacgttatgtacctatgtttgtttttcaatttttaaaacaaaaaaataaaagtgtgtacagtaaagtctattttttatttttattttttgattttatttaagtctagtttatgtccggggtcggattcgagtttcgagttagaggtcgggttcagtgccaaggccgtgggagggatttgggtccaggtctggtcggagtttaaaatattgattaagaaaaaaactgtctaaaaaaaatattgaaagtgattttttttttttcaaaattttgattatcaattaaaaaataaaaagtgaaaacagttatataaaacatgtttttgaaataaaaatttactttcaagttttaaaaataaaaaattagattaaaaaatgttaccaaatgctacataaattagttacttttttgattatttattttagaaaaaggctttactatttttatgttactcatttatatacattacacagtaaaaatatttatttgccaaaaaaaattccaattttttttttttttgaaagaaaaaaattccaattttatacaaaatcttcttatttttttaagaagaatttctttttatttttgctggtataatgtactttttattgtaacttttcgaatatattaaataagattacattttttaattgaaaaaataaatatattaagaattattgagagcaatcataaatcactcttaaaaaaaagtaacactataagttaagtttgtttggagagaaaagtaatagaacattgtttacgaaaaaaaa

SEQ ID NO: 196938 - DNA, 1324 bp, Cannabis indica
ctttagcatttctcttttctaattgttcccgaacaactagaaagagattatttaatcaattcaattcagatgttactttttttttagtatatttactttttttttttcaagaaaaagtgtattacttaaatttcctctaattattttcgtaatatattcatattaacgcttcttcccccacccaaaaaaaaaaactgcttattaaatctataaaaaaaaaaacaaaaggttcaaaaatggtgtgtacctttgcaaccagtaggaagataaggattaccctggtaaccctctttacacatacacctgtactcactcccatcatcaccttcaccaaactcaaccacactattctctccctcacaaccacaaaacgaaccgttttgacacttaactctccaatcagccacaaccggcaaaaccctcttcgaaaaactcctccaaaaactccccagaaaacttcaaacccattcctctccacaacaaaagcataagtacaaggattaaaccccacaacccttctgtgttcatcaaagctacgaggatttatactcagatttctcagtctccgcttaggcaaatccatctcacaacacccgattcccgtacaacccccgtctcgatacgccacgtcacgccgatcgttgcagatcgacatacatcccatcgagtaattcgtggttcgattctcgaatccattgagaaaagcgtaggaatcgcaacccaggactacgaacttgttcttggcgctcgaaacggttagggtcgccgcgttgagagtgggtcggttttttcgtacccgatgacccgacccgttgtaacagtctcgggctacgaaccagttaacggttatttcgtggaggtgtacggagatgttggttacggttaggtttttgccgaagatgagagtagaggaattgcagttgaggaggaagtttttgttgagggaacagttttgtgtcagaccaaatgggtaggggatgtccacgtgtccgcatctggttgggcaaccgggtaaagttattttttgatgatgatcatctgcagccgttgatttggtgatgatgaatattgttaataaagctagtgattgtaataaggaggagtgcctagtaatagtagaatcctccattgttgttatgttgttctgtgttttgtttatacaaatatttatattgatatgacttgaatatattattatgactagaatatatttatattagagaattgtcaaatattattattggtataattaagtatccaattctatatatcactaattaattagtgttatctataaaaagtattaaatactactaatatttaa

SEQ ID NO: 196939 - DNA, 891 bp, Cannabis indica
tactctgaagcataaaatctccatttttttgcatcaatcaaccattttggtgagacgcgttgaccgatggaaattgagccttttgtatctcatatcacagattgatggttgggtgactgcatgtgtgatggttgtacatgttgtaatgagtcctaacattcacttttgtgaggaaactcaaatattcgaattttcaaaaaatgatttttcccttttctattttcttataaaagaatattaaagctttatgtaatcaattgatccattttcatactcaaaaatttctaacttttccctcagattcttcaaagaactcaatggaaagcctcgtacaataccatctgagcaaatcaagaaagctttgaatcagttagtaagtcatttatcccttgcttttagatgattgcaattgaatgtatgcattatttctggattctttgctatagactctttcttttccagaattgttcttggctaattgtaaaatatttattctagggtttggaattttaaccaatctttaattattatttttaattatctaatttcaccaagatttttatcttaagttatttattcccactcattcataatgttctactaaataccaggttccaactaaagttttgaacttctaggattgagaattccaatgctaggtgaaaccttttctttacattcttaatctggcttggtcggcatatgatatcttttttccatttgttacaggaccaactcttatcctcttttctcccaccttttgtagatgatcttgggatttctagggaggcaagcatcatatgctccgaattttatacaaagatcattcccgtctccatgccaacataactttctatagtgatgattattggaattccaactttgaagact

SEQ ID NO: 196940 - DNA, 1066 bp, Cannabis indica
acctcacttctatactatgtacaaattacaagaatgcaaatcacacttttacaatgtatcaaactacattttgtcactattagagactttctttggccatatacatgaaactctattcttagttacattttgcacaagttgaaaaatcaccctacagttattttctttaccttcccaaagtttgttgtttcggcagctccagatttggtaaatcaatgcagcaagagcagctgcgtgcacccctctcttgagcttgctcatcctagcttttccaagccacaacacgaccctttcaacagtttgcacactagtcttccatcccaaccagtttttaaccaaatcaaagcattctcgggagaaagaacaagcaaaaaagaggtgatcaacactctcttcttcattactgctgcataaatggcagcaactgtcaatctcaggtctgtacaccttcattcgattctttgtcttcaatctttgaagcatggagagccataaaataaaactatgcttgagacaattcaatctactccacaccacagatgtccactgttttttcacaccagcaagtttcaactttgtatagtcgagagatacattatactgagtacaacacttttgtctttcattttcatcaaaaagttccatgaccttacctttcaaagcaactaattttctccaataccagctatcatttgtgttagcactatattgccaccaatctgcccctttaatatacacacaatgaacccatttagtgggtatacacttctaaatagcttaatttttattatgctatactatcatttttgcagcacatatattaaatttcaaattgtaatattttacataaaatattttcaaaagttatatatatacataaagtgtggattgaattataaattggctactttaatattaaaagtgtattcaatccacaatttataaattagattaaatctgttaaattttaaacactctaataactagacccgttttatttttagttgctctcttatattatacatatcactatttcgtgttgatgttttaagttttttttttaata

SEQ ID NO: 196941 - DNA, 919 bp, Cannabis indica
gcaagtaacatattcgtatgaagatcattattctttccctaacttagttacaaaatcaacaaacagctatatgtaatcattactagaaagatgaggtaaatacctagtttaagctgatcaaaaggtgcattcctgaacaagaaggatattgcttctgccataaagtcttggacaaaatcttttggatagaacctcaatttccgggtaacccttcaaaaacattataaggaataaaaacataagcaccaaagatacagaagaaaattgtaacaatgatattaaatctgcgacaacatgcatctaaaatcatatatcaaattaacaactatgaacttcccaattaacttaaatacgattatctgtatagaaaccaaagattaaaagtatataattgaaataaaaattaaaacatctatataaatattacttacttgagtaccaggtcaaggttgtttatgagatatttctgtaaatacatcataatatatgaccaggatgtaaaaatctgctcaataatttctggctctgtatctgcaccgctttcaaggagagcatatagggactcagcaatatttggcaagaaactggcaaatccataaacacaaaagatgagtgattgaagcagagataatgaatgtaatgtaaacaacaatacaagaatcatcgaaacaaaatcgagagaaactcacggcaaaaactcctctagaagatccctagataaagcagcaattagcctgtaaaacaatccaaataagcatttaataagctaaataagttttttgtgatttaaaagtaagaagattataacacacctgagaataggttcaaccgaaagtctagcttttatatgtaaaactgataaaagctttaacataatagtgtctttgtgtaataacactagaggtagtgtttgcacaaa

SEQ ID NO: 196942 - DNA, 978 bp, Cannabis indica
tcaaacttgactcaacaatggaactttgagtttttgtgttttttttcttactgttgttgcttgggaattgttcttggatgatattacaggcgttcttgaaggtttggttgaatttaggggaaaattggttgagttttaaagtttttagagttatctgctatgaactgattaactggttctacagattaaacgcttctgttggtactgtagaaccagttaaccgtttcactaggcaggaccctaggaactggttatccatttggtaaatttggtttatcggtttggttagtttttaaagccttagtttcaatttttcctagatatttagggtatttctatgctatttatcgataaggaaacttttagtattgagtttaggtccccaaaaaggattttagcaagttatttacccttttatatcaatgtgacatagggcatccattcagcgcataattttctattcagatcgaccgacacacttaaatttgggaacgaagtaagactagcataaaatatatatatgtatatatgtatgtatgtaaattgaatgctgtgttggtgattcatatactaccaacactagtacggtagcgctagtgggggcattggtacaatatattatgttcaaagggtacgatctagtgttaccaacactactatggttaagtacatagtgcatgtggtacaacactctggggtacttggggacggttcagccctaccaacactagcatgttagcggtactttgtgcaagtgatacagaggtcgtacttttataagaacgttcttgatcatctagcaagccttgtagataggtgtatgggcgcctaaatacaaatcggtaatatattgtatgtatttgcttttctaactgagtttgttgactcacagatattgtttttatgtgtaggtaaagagaaggacaaagctgaatataagtgagtccaaagcttcgggatgattgtacatatcaagat

SEQ ID NO: 196943 - DNA, 825 bp, Cannabis indica
gatcttctagacgaagattagtaccattatagtactgatcaattgcataatcattagagttcaataatctagtaaaagggtcactgttgttgtaatgataactcatatcaaacgacaagcttggattgaagggaaatagatgagcctttagaagaagaagaagaagaagagctaggctgaccataaatccaaggcatttgatgctgttgctgtagtagcatttgaggattgttatcattgtaataaggaagctgttgatggttgtggtgaaagtattgaacactactactactactcatgaatggatcttgcataccaaaattgttataatggttgagaggaatcaaatgcctcattctctcattcacttgttcaatttttttatccagatcagaaacaaattcaacaagttggttattaccattgagctcaacaatgagattttcttctaagatagccttttcttgattagttggtgttgttgttgatgttgaaggagtattagtagtggaagtagtcatggttttagtttgatctaatttctcaatctctgtgttgactttcttgattttttcctttatgaaatctgttatggtatggagtctttttgagtttggcttttgagccatagcagttttgtaatcattgatgagagactttacctcatgaggattcctaggccacgtggctataggatctgatgattggttcataacatcattgactattaagcaaactttgacatcgcaaagtgtgcttaactcataagctttcttgattagaaaactttttctcttcaaaaatgtaattcttacttgcattgtc

SEQ ID NO: 196944 - DNA, 1311 bp, Cannabis indica
tggacgtgttaatgaagaaaattataatcccaacccatcagctaatgttcatgatgtggaagagtctcctgatacttatgttgcacctggtaatgttgctggtcaaaggaataaggaggagctctctggtcgtgttagtggagaaaattttagtcgcaatccatcagccaatgtcacttttggcgaggatggttctcctgctcctgccagtgccaaaagtgttatttctaaagcaccccgcagtgttgttgtaggtatagaacacctccatatgaattctataggccctaacagcgcaagtggttcgcgccccaccggccaatcttctgatgtcgcttcagtcatggatgaaacagatacagatacagttccccctacaacgagatatccagtgtctgatccatatttaaatgacaatgaggatactattatggttgacttggttcaacatccactcattctatcaggagccagggaaccccctttcacttacttatctagtttgtcagccaagttggctgcaatgacagaaagggttcattctgttaagggtatgattaaggtatgcatagtttttaatggggtataatgtggtgaagtagagatcatttgttatgtacttgtctaaatgtggattcatattgcagtgctttttaaccggtgtaaaaggattccagtacagggagaaagccacctatgatcttcgggtgtttgttgatgatggtagtttaatcaaagagattcgaatacatcataatgtaagtgcacatttgactttcacttctgatgacaggagcttgatgcaataaatgctgagtttattaatcttgtgttctctccagcttgtacagaaattgataggccattctccacgggaggtaatggcagctcttgcttctccagacacaggaatagttaacaacatcaaggaaactctgcgtaatttccaaaacttcttagctagttttgaggtaatgaacactatgtttggtgcctgtgcttgttttagtaggggcctgtatttttatctcatcatgttgtaattctttttttaggggaaaatgcttatagagatgcatgatcaccatgaacatccagttgctgtagagatgaatgtgggctgtcctgaatctgatgcattgttacttttgagaagagtgaagtcctcattttcatctcctcaaacaaggtctcttcctgtggatcccattgatctatccccttaattgtctcaaactgctttgtcatggaagatacataaggccaaggaattggaaagacatgaaaaagttgcagatggatgaagcaatg

SEQ ID NO: 196945 - DNA, 1674 bp, Cannabis indica
ttgagagaatccttcaatattatttaaaattaaacacttgtcgttgttaacaaaagatgatagacataatcaaacttacaccctagtacactattcacgatctaataccaataaaaacacacgcacatgcacacacaacaacgacagcaatgctggtgccaaattatgaaaatgacaaatcattaagcagcatggtaaaaggaaacgttttcttagcactgaaatatagccagcccatgcctttctctttcccaaataaaatagcacatgcattttcttccatatctttgaagaatctgctattatctataaagatagcaaaggttcccacattccacagaatccttcttcccaaaacaactccattcctactaaaactctccacttgttgcagaataccttggcaatgttctagccatactcaatcaactcacatttgttgtagaagtaggaagtttgcacaaacaaccccagtatttggggttgtgatgctacatttgaataatatatcagtgtttatatgctattgtttgaataatgccttagtgtttatatactacatgagcctcttaattagatttcattaaacatagtctatgtagatagtcgctatatttgaagctctttgaggaagaaattgtaagaaaacggcttgcatcaccataaattctcatttgtcttcaacttattcaatgttgtcatttgtcaactacacaaaaatcttccttatcagagccaaagatttccgtacgaatgagtttgaatgaaaagtgttggatctaggggtagcaattcatgtttatgggtcgtgtttatgctgagtcgagacttaggtattacaagcaaatgcccaactcatttattaatcatgtcgaaaaataaaacccaaatccaacctctttataaaagagttgacccgacccgacccgtttaacacgtttatataaaagatcgtgcttaattttggtcaacttatcaacacattaacatatttataacaagtaatttttgcaccattttacgcatatttatgagtcatttaacatgtttatatcctatttaactagcttaatacaatttacatgaaataaatataataaatataagagtgtatacttttaaataggtcgttgtcttgccatttttagttaggcatgtcaaccccaaaatgatcaagttagtcatgttgactcaaaaatgacccaaatctatttaagggaaacccacacccatttattttgtgcgagttttgagtcgtgttatcatgtttgacccattttgccacactagttagatcccaataatgtgtacaacttcttacgcacagagtcacaaaaaccaacttcgcctcatttatcttacacatcctccaatcaaacaatgaagtgcaacatctaattattatgaaactagcactcaggcatttaagtttctaattaattttagattttaatttgcctccaatacgtttcatgtatactaggcaacagaagaattagggtggaaatacttaagtattttgtatagggcattaatcctttgtccctggttggttttgtagccagcaaggtgaggtgtagtggcagttttgcattgagattattaaggaaaacatattctgctcttacttgtgtggtgaggtaggcatttggtgtcatgattttaaggaagctt

SEQ ID NO: 196946 - DNA, 1660 bp, Cannabis indica
aaagtgcattcttgtctcaaagattgattattaacaatgttcttgtggcattttgtagctattacattctcttaagaataggaaacgtggttcaaaaggttatgcggcaattaaattggatatgagcaaggccttttaaccgtgtagaattgcactatgtggctcaagtaatgttgaagatgggatttagaacagctattgtacagcttatactctgttgtttacagttagtttcttattcttttcttttaaatggaggtgtacatggagatttggttccaaccaagggtacacggtaaggcgatccactctcgcctttttcttttcctcatttatgctgaaggtttctcaaggctattgcagtatgaagaaagcatcggttctttacagggattaaaagtctctagatcagctccatctgtgtcacatctatttttttgccgatgatagtgtgcttttctgtcgtgcaaatcatcaatcaacaaggtcaattaaaaaagttttggatatctacagcaaagcatctggccaagaaattaatcctgacaagtgtgtactctccttttcacctaatacaagacatcgagatcaggatttttttcaacatcttctcaatatgccaatacaaccttgtcatgaacaatatcttggattaccatcttttgctggacgtgataaaatgaaacttcggtggaatcacggataagatatggaacctccttaatagttggaaggagcaattattttctgttggtggaaaggaagtcatgttgaaagcagtggtacaagccattcctgtatatgcaatgagttgcttcagattccttattacattgtgtaaccaaattgaaagtacgatggctaattttttatggggctctacatcatctagcaactgaatccattgaaaaaattagaatttcctttgtaaagcaaaaatacatggtgggttaggctttcataatttcataccttttaaccaagcactcttggccaaacaagcttggtggttgttagaatttcctaactcccttctcagtcgcatttcgcatcatagatattttttgaatgaccaatttcttatagcagacttgggagcttgtccatctttgacataaagaagcatagtttggggaaaagaacttttaatcaaaggactacgatggagggtgggcacatgtgattcaattaattgtaaagaagactcatggcttcctgaccatacttgtttcactccctattactttaaaggttcaaatccagctctgcaaattattgatctaattgaccagcatagacaatgggattaaacagctttatctgctaactttggccatactgacatcaacagaatctttcacattcctctaagtattttccccacaaaagatatcatggtttggaacggcactacttcaggagattacacagtaaaattagggtatcaattttttttttgattaaggttacaacgagaataaaaaaaaaggccataagccaaacaaaacaggccaaacaaatccaggaacaacgactacaacataagtaacaaaaaacagtcatattaaaaccgaacgactacaacacaaaacagaggaaaggaaatagattaagtggagacatgaccatttgcagtaatcacctgcaggaaatcatcaaa

SEQ ID NO: 196947 - DNA, 571 bp, Cannabis indica
cattgaaactaatatgttatgtcaattattaaagctaagtcttaagcagaaatatactagccactataatttgcaccatgcataatatttgaaaaattaatcaaatttaataaattaaattctaattaaaattgattatttttaaaagaggtaacgaaactcaattagctaacagataaataataataaataagaaaaagaaaattcctttaaaattattaaaatataattaaaaataagatttagaagaggtaacgaaactcaattagcatgatgtgactctttgaggttgcctccatgcgcaaacgagtcaacaacatattagccaaataatatgacacaaatagtcaaataaaatagctcaaactagcccaaaaaaaaattatggtataaactagctaaaaaatgatacaaactagccaaatatacataaatacatatatagaacacaaataatcaaaatatttgactatataaaataaaacgactaaattaatacctattaatataaataagctatcaaaaacgtaagaatgcaatttgaagtaaataataataatcaaaatatata

SEQ ID NO: 196948 - DNA, 1769 bp, Cannabis indica
cctggtgtgtatgacatccactcaccaaggatcccatctgcagaagaaatcgctgaccggatcaataagatgcttgctgtcttggagactaacattctgtgggtcaaccctgattgcggactcaagactcgcaaatatactgaagtgaagcctgcccttagcaacatggttgctgctgccaagcttctccgctcccagctggccagtgctaagtgagctcgttttctgccattgtctggtaatgataagtaatatttgggtagcctttttccttgagaaagggaatttttctactcatgctcgaataatccatcaaccattttaaatttggttgatgtttttctcttgcagtaaatgtagaagtttttgaaatgctcaatggagagccttgatgttgcattttatcatatatcctcttgtatctgttttttccttacatgtttctacatggaagaattgattggaaagaagtgaagaatgaaaagaatattaatactcaattcaaagttttcaaactatgaattcatcatccaacatattgaaaaatgaaaactaaattaattaaacactagtacaaaaaactaacaagttctcccaacaacaaagaagaacctcattttgtaagaatcctaaaattgatcaacacaagaccatggacgagtcgaattgtttcttagttattcacttgatttgaagattcacatactattttgcacatattagagagaggatgaaggtggttttgaaaaaaaaaaagaagaagaagaaggttttcgtatttatattgaatctttgagacaaattcattacgagcaatttggctcctcatactactaaactaaaatatttatttagcgtattttaaccaaaaaatatcaaagtctctcaaaactaaaaagtgttatccaataagcacatgagtgagatacgaacacgtgatttagagtattttcaaagggagacaatatttattaattgtcaaaatatacatattattttaaaatattttttttttatttttttttctcattcacataagatttgttactttttttaaaaaaaaaaatacttaaatagttgacaactttaaaattgatcacaatagtcccacgtcatattaaattaatgaatttttagataaaacataattttttctaataaaaaaattaaaaaaaaatgtcatgtgaccattgtttatattaagtaacaatacacataaatttaatcttaaaaattggactagtagcaagaagaatagtatttttttagctggttgctatttatctaactccaaattgtcccactatcagtagggcagcataggaattagttaggcataataaatagagaattagtatagtttgatgagattctttcttttgttgaaatttttaaagtttgtatatcattataattttttttcatcaataaagttcattgttaaaaaaattaactccaagttgtagctatcgtatgatttattattgtaacttgtaaaagaattatctttttttttttgaaaatattatcttaaattatttaattttaaattttatataacagaaaaataaaataaaacaaaagaagtttccatattcaaacggtcaggacgtaatttttaagcagattaggcgtcaaaataacgccgtgacaaaccataaaaaaaccttctcgaaattcgaagtttccatagctcacgaaccttgtagtagtttctctcactcttttcttttgcttcttcaaagcgtaaccatattctacttgcattt

SEQ ID NO: 196949 - DNA, 1076 bp, Cannabis indica
agaaaccactaagatggatggagctgttcagactgtttatcccagaaagaattggtcttctatggttttgtacaattgttctcatcctaagaacaagattctcactcctgaactcgttaatacagagactggtgctttcctccataggtttcagtggcttgaagatgatgaaattggatctgttccttttgtttggaactttctagaagggcataataaggtggtcgaaggtgattccaatacttatccgaaagctgtacattatactcgtggaggaccatggtttgaggcatggaagcattgtgagtttgctgatctttggttgaatgaaatggaagattacttgaataagaagaacaaggatgagaaggaggaggagaaggagaaggagcctacccaaaccaaagtctagatttttatttatctatttattattaaagtggattcatttaattttcaatcttgtgtgaattgattgtgtttatatggagtggagtgtagttcttactagggtaggagtagcaccattttcatatatatcattgtttactgtttttaattatgctatacaagcactatcactgttgttgtcttgtatagttatagtaattatgttatgttgatctgaattatgaaattaaattatataaaaaagaaaaggggcatcatagtttgatccccattagaatgattctttgcttgttttggttatatttggtaattgacatgaatctactctgtttcctctttattcattgtttttaattgagctaaagttgttggtgttaaatgagtttcaggttctttagatgatgatgatgagatcattatgcaaagtaaatccaagctgatcgatcaccttcactgaagatcgagttacaatgatgtaatgaatgttttttccattcatagtcattacatggaatctatcattgtttactgtttttaattatgctacacagcacaagcactatcgctgttgctgtcttgcataggtagttatagtagttatgtttatctgcattttgatccccattagagaatatcatggtctatgaatctttgcttcttttggt

SEQ ID NO: 196950 - DNA, 867 bp, Cannabis indica
aaagtatatcacaagacaaaatcatatccatatatataacaatttatattataataattatagtaggcatccgtatattttgaaaaaaattatagttagttgaacacatatagaatatagcaaccacgggtgaaactgaaactcacaattggaatcatatttttggcactttaaattagttagatttttttaaaaaatagacatgatatctactataattataatatatactataacgagaattttttttataggacctcctaaaaagatattatcggtagaggtgtcttggagttaatattagggtaacacctcattaagtgaaagtaagttttaaaaaggtgtgaaacactggaacataatcttttctccccattataatcttttctccccattctaaaaaaaactcaatttcttttttccccagagctgacacaaatatatacagttgtgaatatctataacaaaaaaaaaatacagttaataaattttaattcacatccggcattcaattgaccgtggatcctcacgtccctttattctctctcgtttttctcaaatttagcttctattgactaataagatgtacgatttcttgaacgaaccagatctcgttcaacatcgtcaacgaacaagatctcatttcaattttttttctcaaactaatggaactataatcgtgatttagttgttttttgttctatagaggattatcaatgctcatctcttggctgtagtttcatttttctttttctcacaatcttaaaaataaataaataaactagaacgaaaaattacaccccagaacttctaacccagaaatcgaacggtgctctcatttttgttgtagctcttttttttttaatg

SEQ ID NO: 196951 - DNA, 939 bp, Cannabis indica
gccattgttggttagcaagtaccttgtctattttggaataaactttgtcattgccttgttgcttgttcctccaagtgaagtaacttccactatatttgacatcctcaagttggcacatctcaatacattctataaattcaactgctggtttgtagttaactctcttcccagttctctcttctttcatcaacatctcattaaagtcacccaacactatccacgcttccttggttcgaattccttgtagatcctgccacagaattttccttccctctatgtcattaaaagcatacacaaaggtagtgaaaaatttctgcttcccatctaccgttgacaccaataagtgcacaagttggctcgtacacttaagaatgtttattgtaaaacttaatgggttccatgccacaattattcgcccccatcatgccatgcaaggtttgatgtgaaacaccaaccattgaacatatttacatacatagccctaagcttttgggcttttactctcgtctcgaggagaccaacaagacctattttctgttgatgaatcagttgcctgaccccattttgtttttgcttgtcgttaatccctcagacattccaacttagcactctatccattttgaagaggaggtactccccctcctcttgtattatctattgcattatccacttctgaattgtccagcttgctggttttttcaacattcgagtagctagcagcctttgcattgtacttccctcttcagtttctgatatctgattcagcgcctgaaaggcattgcttgattgggtttcctccactttttgttttcctttttccttcgtccccttactaacttgttgaaagccatcaacatcaattactggttcttttgttgtggctgctgcatcttttctcccatctgccttgactacccattgctggtttgtttcccgctt

SEQ ID NO: 196952 - DNA, 888 bp, Cannabis indica
aacacaaacagagttgttggaacttagtaagtatatattccaatattagaaagatatcctcttcttttcttttccctccttaatccttatcattgttttcttctatgtggaattacttcagtggttacatgtctccagagtatgcaattaaaggcattgtatcagtaaaaacagatgtattcagctttggaatcatactactagagattattagtggaaagaagaacaacagtcggtaccattcagaggaacccctcaatcttattggatatgtaagtaaagcttctccttgttaattaacactagtgatgtccaatactataaaaatgaaattattggtttcaggcgtggcagttgtggagtgaaggtagatgtgttgagttagtagattcaggactagtagaatataagttgagtgaagtattgaatggtattcatattgggttgttgtgtgtacaagagcgccctgaagataggccaacaatgccagatgttgtttcgatgttatctagtgataccactctactaccttcaccaaaacagccggcgtttttcataagtgatgttcttattgaagatgtcgaagttggtataaagaaagcacagaattgtagcttaaacgatgtaactatgtcagttatggaagcgaggtagatagtactgtaaaaaaaagtacatctcaaattattgagtttctttgtaaatgttgagaatcatgggtttccatctggaaactaattggcaatgcgtgaagtaatccatgttgttatatggctcaatatggctcttatactatgttgagaatcatgagatttcatctcaaaaccaattggcaatgagtagggtagccaatgttcttatataaggttcaattctctactatttatt

SEQ ID NO: 196953 - DNA, 969 bp, Cannabis indica
tataaagttcttttaacaattaatttttttgcattcaaattatatattaaaaatcttatctttctccattacttcattttttttttaatcttaatgcatagacccaacctcactaaagaacttctttttcttcttaaatacctagatccaatcccaagatatttctcctcaattccgagacccaacccttaagatggctcctatcgttcacgaccttggacaaactggtatagttattgtttcagttctaaagaaataaaattcatattgtgaatggtggtgaaccggttgtcagagaaacttcaggagttgaaggctacaaccttagcgtcctaaactttagcgcgacaaatagatgggtaaattaggttatggttgatagacatatagtcaacagaggaatgtgcacccaccactcaacacgataaattaatttaccatcttattctcagattttcaaagttatcttattttgacataaatctattgatgttgttgtactcttgaaattgtagattttaaacattacattttcttctatattattatttggtttaagattggaacttatttttaatgttcatattgattaatgtgttttggtattttttttagtgtttttgcaattagatagtgtaactatgttaaattacttttgactaaataatattttaatttgtgttgtatctttttttttcttcttgtaaagaatttgtctaatgctcatgttgattgatgagttgttttttctctctttgttttaatttgtctagtgtgccggtaaaagtcttttcacctaccattcttaccacgcgagaaattttctccttttttctggtaacttttgtcggcgcaccaacaaaaattttccctccaaaattgttcacatgcgtcggcaaaagtctatggaacgatggaaactgtttgcacctcttaacggttcatattctgggttttaccggcacaatt

SEQ ID NO: 196954 - DNA, 1155 bp, Cannabis indica
atggtttcaggcgtggcagttgtggagtgaaggtagatgtgttgagttagtagattcagcactagtagaatataagttgagtgaagtattgaatggcattcatattgggttgttgtgtgtacaagagcgccctgaagataggccaacaatgccagatgttgtttcgatgttatctagtgataccactctactaccttcaccaaaacagccggcgtttttcataagtgatgttcctattgaagatgtcgaagttggtataaaaaaagcacagaattgtagcttaaacgatgtaactatgtctgttatggaagcgaggtagatagtactgtaaaaaaactacatctcaaataattgagtatcttgtaaatacatatgtatactttgtagaatacatgatttactgagttaggggtgcccaaaccacttgtatctttgtaactttttatgtatttaggtataaaaataacacatttttactattttcaatgtcttttaatttcatatgtagaattattgttgttaaacaatggtgtcaacacattgtggttgatgttccaatttaaaaaaccaaacctgttcatataagaaaattagacacccaccttagtttaaccatatgggatttgtactcttctagacttaattagtttagtgtttaaagttgttggtgaaaacaggggactttctaaagcagtttttaactaaaaagtcaatagtaagagacatatgtggggatattaaatatctaggttagttattcaatttaatatgtatagaagtgactgatagttactagtattacattatattaaattatattagacttgataattaattatgagtatagttttgcgattaattaacgatgatactccattaaaattattacattaaattatataagattacaccagcaacatattacaacttgaaaagtacctattataaatcaaaaactgtatttttatatatttttataaaaaaacacagtgcagaatataaaaaaaaacctaatttgtagctagaaaaaatgaaagtcaaattttttaaatttagaaaacttttcataaaaaaatcaattctcttatataacaagtttactttaaagaaaatatacaactattaaccaaatttacctaaacgaaaaagataacc

SEQ ID NO: 196955 - DNA, 1315 bp, Cannabis indica
tcaaagtcctttcttctccatgagaaaaccagaataacgttgtttcatcctattagtgacactaaagctgaaattattcaagcactttagatatttccctattatacatagagaattttcaagtatagtgatgactataattataaaaatgaaaactgttgagttccaaatttcaatatacaagtatagtgatgagtaatgtataattataaaaatgaaaactgttgagttctaaatttcaatatacaagtatagtgatgagtaatgtataattataaaaatgtacataattgaagtttgcaacccacataccaacatcagagattaggccatgaaatacagtatattctaaaatttcctaccaattctttagtaagagatatattttaaaaccaaaaacaaaaaaacaataaagagtacagttttgaacatcaaacaaaagaaaattttacactaaacaagtctctttcaatagtctatacaaatgaaattagattactgtactatagattagcaaatgaaaccgattttaccatcattttaaccaatctactaatagaaacaaaagcataaaagctgaaagcctcgaaaaagaaattacagtataaagcaaaaataataagttccataaattgatcaaaagaaattgtggacaattaaaatttacctcatatagacttctccaaaggtaccacccaaagacatttctgaaaaagcccatctgcacaatgatgaccctcccacaattcaagcccactagtcagaatccccggcacaaacaccacagggactccttccttcttcaatttaataccaggcgggtccggcaaaggaccggttatggcctctttcacgtactggggaaatgaagctggcatggcattgtacaagaaccacaaaacccaccaaactgtacaaatgcacccaatgaaccaatgccaactatccacacaatccaacaaagcaaataaatacattaaatacaaaatacaatgataaatatataaatactgtctaagtaaagaaagaaatgcttactttttgaacattatttgtaggtgatgtgaagaagagactaatggaagaagatctttaaacgaaaacaagtcaatacctaattcatatatgataaaactattacataccaaaatatttttagtgttttaattgattagatctaagggggatcgaaacgaacagaaatccaacacagcaactgggaggaagttgttggactcgttcaatcaaataaaaagaagtgaggagtgaaagtcgggcattaccagaagattatccattgaggaggttagtcgga

SEQ ID NO: 196956 - DNA, 1461 bp, Cannabis indica
aactatcatgaatgtttgaagttttgaagtttcatttattgccgaatcggtacaaattagtttattgtttggcaaccaataatacttatatttggataaattaaccgagagtgtgaattcgaaaggagagttaattggttcaataatgtaatcccacatattactaatcattaataaaatttcatttctcatatgcactagtggtcaatccgcggcttcaaaaaaaaaaaaaaaagcttattacattgcattatcattaattttaaaaaatatatattcttattttttctgatttttgaatgtaaacatgtgactacaaatatataatacgtgtatgtatgtgtagaggaagttaatttatagagggcggaagagagaaagagtaaataaaagctagttaatatatatgtatatatatataaatatatattgcataagaagcacaaccaaactattttatacgttcttaattactaaataaaattgtatagacaaatagactatccaatggtttatagccaatgtagctttcgttactagctagacgtgttacgctaatattataaagttatagatcaaattctaacatctgagaaacactgaacttactctagctaggtatagcctatagatagtatatagataaagttgagctaagatcaaaggttccttgttataactttggccaactgtatgtatctatgagaaaatagcttcaaagttttgacttattttgcgagcacatccatgttgttatttgacacagtttaaattacccaacatcatataaatgaaatactttatatgagtcctattagtttagcagttttcaatattaattattaaaattaaaatatatgggttcctatcaaattgtgtgttggacacatactgatgctctagcaatacactctaacttattcaaatatatatatttattcatatatatcattattaataattaatttaagccccaattctaagaaatcttttatatatatatatatatatagcggttgatctgtagtaaactaatataattttctgctagttaattaacttctatatttgattaattaattaatttgtatatacagcagagagagataggtaaatataaatattaatcaatattcctttggagaaaaggaaagaatatatatatagctatttgatcgaaataaacaaccaaaagttattatttctggaaagcctgcataaacttaccacacagatcaaaagaggcacccaaagcccaattaataaccttgttaattgctcatgtcataaaaaacatgcatatatctacataggcgcctgcaagtgtatatataatatatgtattaattaatttataaatatattataaattcagtcaatatatatatattaataacatgtatgtgcaagaacaaaagttacaggtgatttatgtgtacatatgtatatatatgtgcaaag

SEQ ID NO: 196957 - DNA, 787 bp, Cannabis indica
aacttcaacctagtatatatatagtcttataagatggattgttattattatggttaatattgttatttgttggggttagcctataaatagcaatgtgttatacgtggcagttgcctacccaaattaaaaccctagctacaaaaatttgactttggttttgaaaatgaatatccatatataatataaacacaatacatgcatcatatacatgtaactactttcactatcatcattcatcaccctcttgtattattcctcattaatattctgggtgtacactgtacactacaacttattatcactacgtacgtagtgtcctttcaatagactccttttattattattattattattattattattattattattattattattagtttatgattaaataatactaataataatgtactcataaatataatttagtagttccacactttattaataataatataatttattttagttacagtttattatatactgatatcactactagaaaagaagtttgtatgtcgattaatgcatctgattaaacaattaatttgatcgacgcaaaagtcaattctaacaattgcttcaattgttaactgatgcaaataataattaatttgtgtcaattgcttcttcaacactaaaataaaaatcgacgctaattaaagatgaatttttttaaaaaaaaattgaattttagcatcggttgaacggatttttgtgtcaattatgtaccgatgtaaattttgcatcaattcacaatcgacgctaaattacttaaaaaaaa

SEQ ID NO: 196958 - DNA, 953 bp, Cannabis indica
atagagggtccaattagtaacttttgcaaaacacagggtccaaaatagtatttacccttaatgaatccttacttattcttgaaaaccatctccaagatataatgttagtgctaactcgaacaaaaaaaaaaaaaaattgtgttatatttgactcactatttacgtacaattaatctttgtttagttcagagccatagttgagatcccagatcaaggctgaagttggtggtccactgggggtacaaggtctcgagtttgagctagggttaggggctagagtcccaagtttgaatcgagactcatgatcgagatccatgttcaggccagggcttcagtcgagatcatgggtatggactagggtctcgaatcttaggtccaaggttcggaggtcgggtctcgaatttgagccaatgtaccaaagccaagggccgaggtcagggtcgcaagtcgactaggttaaggtcccatgtccaagttggggctgactttgtagtccaaaatattgatgaaaagaatacaaaatcgattataattaaaaaaaatgcttaaataaattttaaaagtaacttatttaaaaataataataataaataaaatagtttaatgaaaatatattaattcattgccttttataaaaagtacattaagaaaagttatagtgaagagaaaataaaagattttctctctctctttctagacttcatcactcttagtgaatactggcaccataataaagggggcaaggattaaagggaaaatcaatggatttggcaagaagaataagaaaaggggcctaaccttgttcgatcaagtgatgaaaaaacgagatctgtggcttttatactgggtgtggaagctattgatttctctgaaaaggacaacgatcttgaagagttcgaagaagaggagcaagcaaatatgggggatgttgggttttcttctctctctctctc

SEQ ID NO: 196959 - DNA, 2076 bp, Cannabis indica
caacagaaacttgtctgcagcatctcagtccattgaaaacaaccaatctactactgcacctgataacatcactcctatttctctacctgttgcagcatctaagtccattgcagcatctccgtccattgcaaacttgtctgcacctgctgataataatactcctacttctccacctattgtaaacaaccaacttgctactgctattgtccctgggactgatgctgctgctgttgtttcagcaccagttcatcctcctgctgctgttcacaggacacataccatggttactagatctcaacttggtatctacaaaccaaaggcctatattgccacaaaatataaactacctgaatctctccttccaagagaacctacctctgtcaaggctgctcttaatgaccttgcctggaatgcagcaatgaacagagaattcacagccctcaaaacaaacggaacatggacattggtgccttatcagtctcacatgcatctcattgacaataagtgggttcatcggattaaactaaactcagatggaagcattgatcggttcaaatcgagacttgtagctaaaggctatctacaagctcctggaatagattatgttgagacatttagtcccgtaatcaaagctgtctcagttcgaatggtgttaaccttggctgtaacttttaactgggacataaagcagctggatgtcacaaatgctttcttgaatggtgttcttcaagaaacagtttatatggtgcaaccaaaaggtttggaagaccctacaaaaccagaccatgtttgtcacttacataaagctatctatggtttaaaacaagctccccgagcttggaatgacaaacttaaaaccaatttacttgactagggtttcagtgcctccaaggctgattcttcactctttgtttttggctctggtcagaatttgcttatcctcatggtctatgtcgacgacattcttattacaggccccaacaactctctcatcaccaaactaattacagatcttaatcactcttttgagctgaaagatcttggtcctattcactatttccttggagttgaagttcatagaaccacagaaggtctctacttatctcaaagcaaatacataacagatttacttatgaaagttcatctcgagggagctaaaccatgttccaatcccaccagcactgctcacaagctttccctacatgaaggaaccccatttgatgataaaacattatacaggagtactttaggcgcattacaatatctcacccttactcgaccggacgttgcgtacattatcaacaaactatcccagtttattcatgctcccacaagtgttcactgggatgcctgcaagagacttctaagatatttgaaaggcactttgcatgaaggcttattaatgaagcttgtccctcagctctccttacaagtctattccgatgcagattgggcatcttgccttgatgatagacggtcaacaggtggatatgcagcttttctcgacccaaatctcatctcctggtcagctaaaaagcaacaagtggttgctcgctcttctactgaatctaaatttagagctctggccaatgcagcagctgaaatcaagtggattctctcactgctatctgaacttcactttcaactccaagacactccagttatttgggtagataaccaaggagcagctgctctcgctgctaatccaatttttcatgctcgctgcaaacatattgagataaacttacactttgtaagagaacaaattctgagaaatgaaatctcagttcgacatgtcccaatcattgatcaagttgctgacattcttacaaaacttctaccaaaagaacgttttcagtatctcaaaagcaaactcaaagtgacttctacaccttttcgtttgaggggggatgataaccaataaagattagttagctttgttagttaatactttctttgtgtcagaatgtaactaattctgttgtaacagaattctgttgtattttattcattctaaaaacactatacaataaaacgttccctactaagaatggtaagcaagcattcttagtctga

SEQ ID NO: 196960 - DNA, 2123 bp, Cannabis indica
atattaattataaaaatctaataaagataaaaacttcgataatttggacatcgaagatgatctcattattaaaatgatgagtgaggcacaatttgaatttcgtacgtcttcagaatcaataagtttgattctttgctgagcattatacttaatgacttatttgttattgaataataatatttaatatcatttaaaacatttcatactaaattgttgttatcatatttattttaattgtatgtattagcatcaattttttgctcaacacaaatggtgttgaaagcggtgttttaccaccgatgcaaatggtattattagcgccagtggtgaactgatgttattgacacgtggaatggagttgataagaataggtgtcagctagaaattttttttgcctaaaatctggcatgattaaatggataatgattttagcatgtagcacacagaattgtaaaggacattgttgttgggcgtagaaaatacactgggagccccaaaccctaagccagaaaggtcacttgtgcacagggtgagttgggcactatgcccagtgcccaattggcctgagggcatgctcaagagaacacataggtcttgttgagtttgtctctagtttccttcctcaacggttcagatgattgaatcataaagatatcgaaatgcatgatgaaccacagggatgttactgggacatcactaacatcacatagacgctcatatgagaatgctacacctgtttagctcaactcttgctacagtcctcaataattcaattagttatctccattgatgcaacatctcaaaaagagagctaaatataggccaacaccacttgggggcacctaggtgagcactcaatgcccaggtcaccacctgatgctctaggttcatttctctaatatttctaccttagaactaatcactagcatcaattttcaacccttcttcatagaatcactaagtgaaaactctatcaccaacttcactgcacccttcacctaggatgggcttgtgcatgagttggccacccaggtgagcatcatttgctcaaggggtctcctaggtgaacactttcaagggttttgtggttcccaaataattagtaccttcaattgaatgatagaaggagtaatcaactaagagactaggcatccaaatcacttagcaacaggcggtgcccaagtcaccctgtgcctatgaagtcctgcgctcaagagaacaccagggtgcatatgctcattttctttgcaagcgtgcaatgcaaaaacaaatactagaagtttagtttacaatacatggcacctaggtggactatgcactcaagtgcactctatgaagcacttgtcacccaaagaagcaatcttagcaagtaggtcaatgtcttcacctagctatctcaagacatagtcgaattttcgctatgtgcaaaataagactctaataccaaattaatagttctcattaaatctcaagatcagtagccatcgtttaattccaagatcaacagatctcacccgttcatcaataaataaggttgatagacatcattaagcctagaagatctacggtcacgttcaaacactatcgtttcaattcagcgatcaagatagagcatccaagcatattccatgaatattcccatttatacattgatttatgattattgtatatgcaaatagctaacttatctttctaataaataggtgggttagaaattcattattttcatattttattttcttaaagaacttgcgctttgaattttgtaactcttattgaattcagattgaacgctccaagttaatgcattgtaaacactttttaattttctcttggaaaactccctagattctggctttagggattttaagttcaaatacataataaaagttctaagtagacgtagtccaattattgctaaagggggggaagggggggactactataaattcttagtgttcaatatttatttttctccactctattttacagctttcacttattagaaaacattgtaaatggccattttatgagttaacagaaatgactctattttcattagctttaatttaagagagatgcttattcttttttttttttggaaccgtctaagttcagtatct

SEQ ID NO: 196961 - DNA, 1239 bp, Cannabis indica
taaccgggataaaaagtccccattttatgttagattttcaaaaatatttatcccactagtatatattccagtttttattttagcgaaatcgagataaaaagtcttaaaaactggaattaaaggcttttgtttagtaatagtgaaattaatgaaagaaactcaactaaagtattatttataatacataaataatacttgaaaattttttaacgatttggacttttagttgtatgtgtaaatattttcaaacaaataacaagatttgcataaaaataagaagaagaagaaatatgagataccacatggacttatcttatgcttcaaagtacaattgaatccctactatctttcccttatttctcaatcgtcgttctctcattaaatcgtgtaactcaatcgtcattctcactattttctttttgtcagaagcccctattctgaatgagcattgttattaggcaccaatggtgcctagtacttttttgacatgtcacgttgcgattggctagcgatactctttaaaatctattatattaaactacgtgggacccaatacttaattggaccaatagcaatactgacacataggaaggtgctaggcacactggtgccctttagcatttctcattctcaatactctgaaatttaatggattaattaaagtctgcatttatgttaagtcattctgtcgtttcatcaatgtcggctcttacacaaacttcaaacttcaacaatctctgtagtctctgtaatatcttgtaattatatatctactgaaaaactaaattttaaggcatttgtcaaagccgtgaaacccaaaacaaattacctgtctttattgtcttggtattattaaggttgttcaacctaaattcttcacttaactagtttttattttgtcttgaattatttattaaaattatgtttaaatgaatgaagataactagtttttagttgtatctataagttcatttactagtgccgatgtattgactagttttttttttcccttacactactgaattaagcttagatagcttatataacttgaatcataatctgaacaaaaactgctataagcagaattagcataatcactttgattttttttttttggtactttaatctataagaagaatttttagctcatatctgtgtcaattaataaagaaactaaaaagaagtttagtttcatatgaattaaccaatgaatgaatgagaaggatttttttttttttt

SEQ ID NO: 196962 - DNA, 1044 bp, Cannabis indica
agctcatcaagatggaaaggagctgatattttagtttttaacaccgcacattggtggtcccattacaaaactaaagctgggtaagtcttttattgttagacaacacttgtagtgttttgcacccacaaatcctgagatccaaggtcaagagttgggattctctgggaagtataggactatctattttcaaaaacttgcacatgatagctcaaataggttgccatgtagtttgctcccgaaagtttagaggttcgaattcgattaggtggtttgcttccacaaatgtgttgggattcaactcttgggctgagcatccacatagcaatatctcgtgttgtattttaacacttgtgaagctcatttcaggattaactactatcaagaagggggccaagtttatccacgcctagatgtttctacagcattcagaaaagctttaacaacatgggcatcatgggttgacacacacatcaacccaagaaaaacaagagttttctttcgaagctcagcaccttcccatttcaggttttcactttctttctggaaagctcacttcataaatgagagtttgaaccttttcatgttaaatgctgagtatattttattgtcaattattgagcagtggagggcagtggaattcaggtgggcactgtaataaagcaactaaaccacttactgaaatttcgagcacatttgtatctgacaaaaatgtagtagtagaagaggtgatcaaacagatgaaaactcctgttactgtgttgaacataaccggtttatcccaatataggatagatggtcatccctctgtttatggtacaagaagatcgaacagtcaagattgcagtcattggtgtcttcctggggttccagattcttggaatgagatactgtttgcttatttataccagtccaaacatgggttaacaggattttagccatgtaatctagtgatattctttctttcttttatttatttgtttgttcatatcttggttttgtttaatttggaatgaatcctgatgatttctttgtaaagagcaaaaa

SEQ ID NO: 196963 - DNA, 816 bp, Cannabis indica
ttttttttttcttttctgttttaataaagaataaagtctctcaaacatcctgactgagcgctctctcttgcgctgcttaaagcactttttttttctttctagttttttttttttcttctcaagtgggagtgcgaccttggacacgtgtgaatcgatttcccatttaagagatactagtaaacatcttgcccttcgtatgctttttcggtggacaaaaaatatgtttggttggagaaattctcacctcctctaatgactattgtattatgatttcattctaatataatagctttatctcaaaaaaaaaaaaacatctcgcctttcgccacatatgtttaaaatattttaaattatgtattttaattaatgataattattagtaaaaatatattaaaattttaacctaactaatttttaataggaaaatttgtagcataaatatttaaagtataaaatttgttgctaataaatacccgaaaaaaatagtagcataaatccttaaatttctaaacttaacagtgttattagtacccaatttaatagtgccacatgtcaaacaattatttgtccatattataattctttaaaagaataaaatataatttatttaaacaaaaaaaaattaaaaattaaataaacattaaatgcttatagtttgttcgacagcaataaaacaaaacttaaatagtaataattaaagggtttaaaaataaaataaaataaaataaatactcaaatttctcccaacaagttcccttcctcacctcaccctctcatcatcatgattcgtcaaccaacctacaccactgctcaaat

SEQ ID NO: 196964 - DNA, 546 bp, Cannabis indica
agatgtttttccttaataaaaatataaaaaaaatccaaaaatgttttctttcctatgtggtggtgtggttgcatatgtgtcccttagataaggaataaggggacaggtgtcagccaagtagtgaagcaagtggcaaattatttatgaggttgagcaactgttacaaacttttcttcccaaccaaaaaaacaacaattaataatattatagtgaatctcactcatttttaataatgtcaatattttgaggtgaaaaagcagttaaaaaaaatcaccactattgaaagactcgtgcttgattctaaagacctcaactttatcacttgtttatattttgcatttgaattttaacacaaaactattatattgttattattactaaaatgagtattgttaaatatttgaaggtgttacttttgtagatagactttctcaatttggtcggtggagtttaatactgcctatttggatgttctggaatagacatgagaaattagccaacaaaaacatcaaaatctcaatacatagtcataaccatattttcata

SEQ ID NO: 196965 - DNA, 2076 bp, Cannabis indica
ttggatctatgtcgtcggtatacacagttatttcaaaatttttgaagttctttaggagaaatgaaagaaatgtaaggaacacttacaaaacatcataaagataaagacatgcagaaagaactaatcctacccagacagcttaactcttccttagaaaattcataaataatgttactggtgttgtcatctcctaaaaaactatctgatgggagaaaccaacttgaagtaaggtagcaagaatggtccaagagagttagcattgaagaatcagaacccgtctgagacctccccaagaaattactgatattggaaaagtatcgctctttttccccataaccccatcgagagtgaggcattcgtattctaagtaatgtcctatcaaagccaattggtcgtgtgcgtgcataattcttgagagaagggacatagtgaaaggatagaggagacttagggatgcccgaggtagtagctctgggagtactagagttaggaaccaagaaagggaatgacagttttgaagctactaatttcttgtcagccttctactgcatcttttgatctgttgcactttgggcacgagctaatagatcatcctgctctttcctccttcggtagtttttgatacttggtctttgcctcttagataaactccatttggagcctcttctcagcctccctacttcgagcatttggacatgtcacttttgcaaaattagttccttaattggttggtggccttgaataagtccggtccttcggcagttggtagtcgtaaccaagttccccatgttaagctcctcctgggtaagagttgcaaaaagggcagcgtggtttgggaagagctcggtaagagtctagagcaatgaaatgatccgagtccacttggtaaagaggttaggacgcttaaaagctttcaaatcggaggagaagaagaactgatgacgatagtccttaacgttctttggggagctgagcagaataagagtctcattgacagggtgagcttggagggaataaataccatcattccacttgtcccctttctttgggacagaaagtagttcgtaaaagaataaaatttcagaaggactgggagcaggccaaccccttaaagcataaaaaataaacaagcatgacaacaggtgatatctctgaggtatcaactaatatggagcaagtcctacaaaaactagaaattttataaagtaatcttgaagcaagagcatcgtgcgggccataagatgtgcttggctgcatgtcgcataccctctgtagttatgataggggatttcagcctcccgagccaaaggatagaaaactccctagtcccagggcttgatcccattttcagttacgatagttcccaactggtggacacaacccatggatgagtgtaattcttcagcttcccaactggtggcacggtgtacatagttcatgatcaggactggaccctgcatgaccacaaaaaggggcaccactaggtaccgtggagccacgacctaagaagtagagggagttggagcttcaagattcgacattctagttgttaagtggagttctaagatttctctatcaaaaatgcgaaaaccgtatttatgaagatccctcaagatgtcgctcatctgaaaagacaagagttatcccaatagttagcccccatatcgaaccccaaataaaaaagggaatggggttcccctgaccactgagaagaggccccctccagatgcaagcatatccagaaataaagaaactttacatgctatgcatcaggtgaaaactgcaccatgatgaacaaaaaaggtgtagatgatgggaaagaaaggaaaagggcagaatctactagccctaacatggaaacgtcttgcctaaaaataacaactgaatacaatctgggaaaattcccccaaaattatagacacattaccaataacacagccatgccagcatatcaccaaataaagttacaaatataaaacaagggaaagaaaaagctcttaaagctagtaacttacaatagaagaaaatcgaatagttgcaaatgcttgtgcgaaatgctggtaaaatcaagcttgg

SEQ ID NO: 196966 - DNA, 1391 bp, Cannabis indica
aacttcttttttcagcaatcttcattttctctttctcctctattcttcaatttttcaatttttttcctttaataactgttctcgcccatatgttcctcaagccttcttgccctgttttttctccaccacagcccagcatttgttttctcttctatcccttgcttcttctttgccaagtttctaatataaccactcatgaatactttgaattctaccctttcctttattgatgaggagagttcaataatcgcacttcctaatttcctccttcgccattccacaatttgcccatgttatgttggcccgtgtcctttctaaaagaccagtttacaagcctagtttttatgaacaaatgtcgagtcattggaaggagcactttcccgttacaatcactaattataaggttaatttgttctacattgtttttggttgtgagggtgataaacgtcgagttcttaccaaagaaccatgacactttcaaaatcatcttattattttatacgcgctagatgttttgcaaatcgttacaaagaaagatatgatctacaccccattttgggtccaaatttaccgtttgcctttcgtaagcaagtccgccttggtcgaggcccttggtaacacaattgtcaaattcataaaagtctttgaagattctactaatgaaggttggagtcattttttgcgtgtctgagtcaaactctctgctcttaaaccacttccccaaggacaaatgattcacttaccaaaaacttgagatgaatcaagggttgaataccgctataaaggactcaccgagttttactcgttaaattctaaaactacttgttgggagcttgataatatgggtccatggtcccacactacttgacataatattatattgtagacttaattaattgtttatttaatcagctaggatttattttaaaaaaaaaaaaaaaaaaaaaaaaaaaaatcagctaggattctaaataatgattatgtcttatttatgagttttattaagcaagaacaattttaagaagaaaaataggttttaggatttatttattaattaagagactatgaaaaatctaattaataaataaattaaatgataattttatttgataattaattataattattaaattgacatttataaaaaagaaaaataagtttaattaaaatggtaaaattaaaattcatgggtccacataagtatttcgaccacaagagtttaaataaagttatttttatcttttttttattattccattttaaattctaaaccataccctaaagttataataccaacataattattatttaaaatatatacatatatattttttcttctaattgtatggtgtacggaagtaccttatctacccagaagagaaatttcaaat

SEQ ID NO: 196967 - DNA, 844 bp, Cannabis indica
ggggaaggagaagagtaataaaaaaggctaaaggtgaatccaagaatcacaacaccagaagagattgatctcaaaaatcgatctgaagaaaacaacttagtcttattgctaccatcattatgggagctcaaagaagaggaagatgagattaagcatcgagtttggttgaaaaatggcggagaatggagccgctgagttgttgtgatgacaactcggtggatggaaggtagagattttctgattgattcccaagaaaacattaagcaagatttctgatgtgttttgtttaacaatggaagataaaagaaaaaaaatacaatagtggagagaaattaacggatgccaattcagttttgtgctaattaaatggtggttcttgcttatgggattttattaactgaatccattttcataacggtattttaaaaaattagttattttcttcgattgggcggttatacgagttattcttttattattaaaaaaaaaaacacatgtggtctctttttgttcgcctaataatttgaattaagaagtaaggcatttctttttctcttttaaaactactaccagctactacgatacgaagttaagtagaacacattaagaaatattattaaactagtggcaaagcacattatgtgctgctgcttttttttttttttttttttaattatcatatcttttagtaaatttaaagttattacatgttatcatttttgttgaataaaaatatatacaaccattataataacaaaataaaaaataaataacatttaaccataataatatatcatataactattaaaaaatatatacataaaaattagacataattttaaaa

SEQ ID NO: 196968 - DNA, 1985 bp, Cannabis indica
gagataaatcttatacgtgatcaatggattgattatgtgaaagcagaggtggtgcgacaatggctattatgatgatcaattaatgtatatctcaatttatgtttatactttacattaattaattactttcatataattaacgatatgtatatttctttcttattcttacaatgtaacgacaaaaaaaaaacatcatcgctgaaaaataatattttaagaaacaaaaactgtatagcttacactataaatcattgcttatagtaaggtgatgatataaaattgtgccctatactccacagtatatgctacaattttacactgtcgggaaaggtttttgacgacgattttgaaccgtcgcctattccattcattttacgatacttgaataagcgatgattatagaaactaacaggaatattttactcaactatttaaaactgttgagaaaatctaattattgtttagtagtgtattttagtttgtttagtcttttcaatgtgcactctatgtctttagtggcattggtggcttttttttttttaagtttatattcatttttatgctcctgtgtcagctttgagttttttgcttatttatttatcggtatagttaggtgacagttaaaattattttttagtgaaattgtgtgatttttttcgcctgacgtatgacctttgtttaacaatattaaatcaagtttaacttttttttttcaaaaaaaaaaaaaaagactcctgaccgaaaaatcgagcttatattatatgatatctaccacaatttataaccttttttatttatttatttaagcgtttatatattacaaccatgttttacatggaactcgaactcagaacctccaacacacacccacctatgtccacttgaactagcctcaagtacaatttataaccttttaactattgtatttctaataattatcatcattatatttttctttcataaataagttctgtctgcatttaacattttcttttggtaaaaaattaaaaataaaattgtttgattgcgcgggaaaatcaagtacacgtggaagtaacgcaagcaatctaaatagttgttttggtttgattggactggaatggggagatggctgcgaaatcagaccgttgagttcaaattttgaacgacgataatcgctgtcagcaccaaactaagacaaaattagaaaaagatgacaattattactattccactactcttccatatttattattattgtgattgtgagagtgacttgagtcgagtttgcatttctctttttttggcgggaaccctacgcaaccaaccatacccatatccatatatgtaataataagattttattttaattttatactatattttaaacaaataaataatgtttaacaaaatagaaagaaaagccaagaggaggaagtagtttgtgcaggctagccggcagacagaccccaccactccattgtatgtgtctgtcaatgtctccaatgcctttacctttcttcaacgcgctacccatctcgtttaaacttcacattcttccttctttttttaaggtgcaaattaaaaataccataataagttgataaatacaatacatatttcaaaaataaaaaacaatacaatataataatgaaccttctttcctaatctctaaactcctcatttgtgcaatgaaaccaacaccgtagaaaataagtcataaaatttgtctattttgaaaaaacacatgaaagcatttcccgctattttgactaacggtgctgtcgttttcggcagatagggtaccaatagtcatttgtttttattggtatgtattaactatttaaaccaccaaaatccactaccaccatttattacaaatgaaatttaaaaatatatatatgtaattatatttaattgttttggcgggagtttttgttgatattattaaataggattgaggattggggttttgggtccgtagcagtggaaccatccaatgtttg

SEQ ID NO: 196969 - DNA, 1610 bp, Cannabis indica
agctcatctgcagtaacaaagctaatttataatattggcctacctaaaggcaagaaatccataatgacaaacaactagtacaaaccttcattcaaattgtgtaaggtttgcgatgtatccaccttaccatcagcattaagctttcttgtaacagagtgaccctgcataagcattcaactacctcatctcagttttcaattttatttatgtacaaattctttttgtttctttcatcgctattgctgtactttagatgagaaggattataccgctgcatatagaacattatttaacaacagttgtgacacaacacatgagcatggcaacataaagttggaaggagatgttaaggaaaatgcattgcgtttgcatagctcattgactagaaactaataatgcatcaaagatgagagttctacggttaatatatttctcatacttaactccatgaattggttgacagttaaatcctgaagtagctatatttcttgacaagtattatagttctatgactaagcactcaaataataaccaaacaatgtaaaccttgtcacgaattcctcttgagatcttatgtgctgcttgacgagttgttttgtctgcttctttggtctcctcaatgactacctggatcataatcacataagaaaggaaaaagtaaacaatagcaataataacataagaaacagtaaagtttttagtcccaacttctactcaccccgtcactgcctgccctcctagttcttgtagaggagtaatatgctccatctacaccaccgtaagtgactttgcaagtctgaacattgtacctatgaagctgaggctgtggcctttccatcttataaggctcattccgaagtatcacattgccttccctctcttctacaacaaccaaggaaaccatcgagggtttaataatacataattaaccttgtaaagttagaatgatccaaatattcgagcttgattaccattaaccatatcatctggatgttcaaccgatggttctctgcttgccttgccttgatttcgctcattttcattgttgtcctcagggcccttgtttccttgttcctcctcattatcagaggttaattcttctatggtaatacccttttctatgaagctgtcctgagcagcaccagaagcagcactaggaccgaacatactagagtcaaacaagcttccaagcgggcgagagaagaaggaatcatcaaatgggctcctcccgccaaaaagactaggaaacatacttctttcaaaaccagactccctgaaaaaatcgtttgaaccttctctttccctctgcatattgtgtgaactctcttcttgtggagaaaaaaaatgtcaaaccaaatgtaaggagtataaaaaataaatcaaaaacattttcaggcttttggggcttgcttgtcaacaatttttttccttttaactccgttattggaagatgtagttcttcaaactactacaaattcagaacatgttcataatttttattattatatttttttttgaacaagaacatgttcatcattcatttaacttttgaaacacaaattataaaaaatattggtcaggatatcctttgattgatactttaacataaa

SEQ ID NO: 196970 - DNA, 536 bp, Cannabis indica
caagcaggtgggaaagctactgatggtcgccaaagaattcttgatatcacaccatctgaggtaatgcctttatcttacttgaagagattagataacacaacaaagactttatgagactagataaaacaagacttatgagactaggtaacataacaaagactttgcaagcctaattttatttctagctataacactgatctttaattttttgggacaggtgcaccagcgcacgccaattttcattggaagcgcagaggaagtggagaaattagaaaagtatttggcttgagacttttttagtattgctttgtttttcaaattattgtagattgattgtagttgattcttttgcaagtatttatataacatcttttaatcctattattaagacatgctttcaaattcaattataaccttgcagacagaccttattcaattaataaagtcattagaaatgacaatcataactttgatgggcctaatcaagttaagtgatctttgtagctctcatttgttcattgttaaatgaataattt

SEQ ID NO: 196971 - DNA, 2033 bp, Cannabis indica
gtaaaattaattccaacacattgaatctgctactatttctgagccagagcttcaatttgttgcatcatcttcagatgttgatcatgctaactactgagatttggtggagaggttagataggatggaatctgaccagaagggtctttattattcttaagaatacttaacggaggcatatcagagtagccacctagaactaaagtttggccataacaatattatggagcagtttagatctatttgtgtgtattgcagaagaagccagtaacagatccatcagtagaggaacgacatgcatcacctcccatggtagaatatgttagtgtgtaccctgacgattatgatccttatgaagatgaggatccatgtactcccgtggatggcaccattattgccataggtgacaatcaggcatagggttatggccaataacagggtgacgtgttggccttagatggaccaccaatggggaacaatttggcaagagaaaaagaagccaacctacttagtttaaggactatattgagatgaataaaacatgtaagccttttgcatcatttgatccgcttagtctgccagattagaggttgttggatagtttttgtaagtgattgtgcgaggccatccccaaccatcatctttgggacgtcaagagatgcgattacggtcctacctagtttatgaggttgttgacacgaagggattggattcaagattatatacagcatgtagatacatgcgtccatatgcttaaaaggcgatgccacttctttttagacatgtttctccattaaagtatatcattctgtccacatatatggctaactaatactatgcatgttgttaggaaatcacacaagggtctgatgaccaactttaagtgtggggatgatatcctctagtattttatcgatggttttttatttgttttatttttgttgtcaatttggctcaatttgtcatattatttcaatgttttatttacacatgacaagttctatttggaaatttggggggggggggggggaacaacttcttgtattttattttctttaaaaatactcacattaggtggcttatgaggtcgacatcaagttgtgaaaaataatattgctatgattgtgattctaccatttgctctaaaaaggacttggataccatcataaagacttgggaaggactcttgccttctttgcaatatgttctggtaagttctcaatcaacaaccaaacactgccagtagatatatataaacgactgcaaccagcttttgaaaatgcattatagcaaagctagtcacaaacttatttcaaaggcaaaactcaggttaatatcttatatgtagcatcaaacttattatatcttatttatgctatacttattactcatattttggtttgatgcaatggtgattgtagtatttatactattgaatacgtaaagaatctgatgatgcaacgtcccatcaatgttgttgcgaatatgaacatgaagatgttccaagaaaagtggtgcatcgatctattctatcagaatcttagttaagatatcgatggttgtgtatatatttttgagacataattatggtgacacttgtatattttttttgagacatttagaatattttattgatactattagaaaagtgtcatctttttaacgggaaaatatttttacaatggtcaatataattgtaattgaaaattacattaaaatagtttcagcaatgtatcgttaaaccatcgagaacttgttgataaagtattgataattacattaaaaactattgagaatctattgataaagtattggtatattgttaataaattgctctggataaaaatcatgttgctaaaaaattttgtatagagaaccaatcgataaagtatcgatatattgtcaataattttataaggataaaaatcttgttactaagaaattttacgtcaaaaatctatcaacgaagtattgacatattattcataattttatcaggataaaaatgttgttgctaaacaatattgtatcaagaa

SEQ ID NO: 196972 - DNA, 774 bp, Cannabis indica
tgctgcatccatcatcctttggaaatacttcttaagactctccctcggttgttattttatattggtcaatgagctgacctccatgtcataattcctcgcgcgtatgagctattttttaaacatgatttatagatctttataattacaaatagagcaggaatacaatctcttccaccagtcttcgataaagttaatgaaaaatagaggcactttacatcaacactttccttcgctacttgcatcaaatggatgtatttacacaggcaggccatgtggtccatcctaccttcattcaactccatctaagacattctacaatgctccgacaagggtgactctattaatcttcatacgcacagttttagatgttcttcttctgaatcacatatagtcatacttttcttctgggcaagatgctttgtgaacttggtcaatttagctatttgatgttccaaatgctttgtattgtaatcctagaactcacgcccacaaactctaacattgatatgattcctaagattgtttctgtgaggtcttgtcttctcacctctagctattctttctttgcatttaaatgttccgaaatgtctgttgttgacaaactaccttttgaaattgggtgaacctcatttgcgatatcactgtgcttaatagattactagggcaatttatccttccatgaacattattcttttgtacttgagcaccatgcctatcgttcatgcaactctggctcgcggatcaattggggggtcttgtcctggagccttaacc

SEQ ID NO: 196973 - DNA, 1865 bp, Cannabis indica
ggcacaaaacccaacaatgagatcatcaaaaacttactcttcgtagtgctggtcttcttggtgcgacagttccccatctccaacgcttccctgtcccttacgacacccacctgagagctttttgggggagctggttctcgtcgtcattggcggcattctccctaccatctccaacaagtggtttgaccactgccttttgggttgcaaaccttgttgtatatgatgattatggtaaatctttcctcagctctcaagcaccaaaatatttactgagatttttgaaaattgattataaagaaaataagcttaagaaagaaataaattaaagaaagaaacaaggattttacatggttggatcgttaatgagccttagtccacgaatcaatattattgagttagaaaagcttcaaattattcttacagaagagtttttgccctagctaaggaactctaattcttagcccttgattgcagaaatgatttttcaaccctttgcaagggataatgttctatttataggctagaattgggtttgggtgaacccggacctagtaggatttaaaggtgtctactaggcccatagatggggtaaaatacaatatatattaactttggccaatttggtgaggcccaattaacgagataacagtcgtccgtacgagtggagtcatttggtgattccaggtgtcatgcgcagttatatgttggtactgataatgttagaaaatatggcattggagaggtggtttccttttgttggttcacgcactccctgggtctaacataggggataaacctctaacatggtgggactccgtgtttggggacgccacataggatgataattggagacttctagacatctcttcaattgcatgtatttggattaatctggatagaccttttgtcttttaggccaaacaacattccccggaccaaagtggtccaactttgtagcatttgtaagctgaactaacatccgtatccaaagtcgtagcataactccgctcatgggttgatttattaacttaatagggtctaagaatgggcctggtttggctgatattgggctttggaagtgcatacatcactggtctagaaatgtggataatacggcaaaactctcttaacatttataattgttaaacatatcaccctaataaaaaaaagtggtggcaaaagtaagttatcttacaattttgttgcagatgtatcattttagtagttgagtgccaactaaaaaatacgtggcgacatattatttaacaacatattaaataattattatttattctattttttttttattaaaaatatacaaatttgaatagaaagactaaattagtttttctttaatcaaataaataaaagttttttcagagaaaaaatgaaagtttttttgtttaatatgtggttcaataatatgtcgctacatgtttctgagttaactcttaacgagtttagttggcacttaaaagctaaaaaggtatgacttgcaataaaatcgtaagataaagtacttttgctgccattttttattaggaacatatgtgtaacaattacaaatgttaagaggatgttgccgcaaatatcccttaaaataattaaacgataattatgccatcaaataaataaataaaaaatatttttttatgaaggataacttagtcatgttaaaacattccaattatctttactagttacataaacaagataaaataattttaattctatttttaattagaaaacaacatcatgattcagattgtttgatctttttattattttttatcatttattaattacgattccaattacaaattaataatggaattattttatcaatacacaaaaataacaaaaaa

SEQ ID NO: 196974 - DNA, 1139 bp, Cannabis indica
ctaaactcaaaaagaaaaagaaaaaaaaattaaaaaaataaaattgtaacaataaaattccatgaaaaaaaataatgtaatattacaaatatataacattgtcaaaactaagtaaaaaaatatcgtaaatacaataacatattaagatattattttacttattgcaattgggttaatattttgttatttttctgttgctttgtaattatatttttgttgttatatagttgttttagtattgctttttagttatttttgagtttttttttttactgaaacactatttttataattttgaaactttacacattattttcgtaaagttagtacagtaaaaatttaaaaaattctgtatgacaatactttgtaaattttccctattttatagtatttttataagttttcctgtaagttgaaaattacctatatttattacatattaaccaaatataattttaaaataattttaatcgataaataccctcttttataattaaaatactaaatataatttcatcatgacttatcataattagagtttgtaatgggtataatggaaatataatataacctttaaaattgggtataaaataaagaataataaaataaaagtaaaaaaaaaaggtataaagtgtagtttcctctattttccccaatattttttttttttgagcccaacctaacgtaagcccgaatcagcagcccaataagttaaactagggctaagcttaatctttcagatacggccaatctccctcgaactctctctattgcgctctccatcactttgctacgctctttccctctctctctctctttccaaggcacaatactcactcaaggtatgcagctttgcatcatgtttcttcttcttcatatatgtatagattgaaaggtatatttgatctagtttataggaaagtattttctgttatttcattttcaccactgttttcggaatggttgagttggaacacacatggtatgtgaaatcttattcttgatttgatcttgcgctctcttaatttcattgcatttagactcctccatcttcaatttcaattttatttttttatttatttattttttttttttgtggttagtcagtctaagacagttgattttttgccttttttttt

SEQ ID NO: 196975 - DNA, 1138 bp, Cannabis indica
tatcctcttcaacttttctggcaatacgagagccttcatacaaagacataaacatatcaatgtatataccaattaataatatgaacattaaataaaacaacaaaacaatatagtcatacctcaactgtgtaaacacctaggattacaatattccaggagcaattgagattcataagaaaattcagcaaaagggtgaaccagaatgtgttatagttctcactggatgaagtaattacaatttttccattcaacaaattgcacgactctgtcgatattgtacaatttatgtgacctaaataactaaagtattctaatcttggagctgattcaactgtaatgtttctcactatcccaacattatagccaacatattcacaatcagtaaaactgaaacatttcaagtgttgacctgagattttaagatggtccaaatctgaagtgcagcttttcaatgtcaaattctcaagaagaggattactagaaataagatcttctaatattggccggtcagattccgaacagtcaactaacgagagatttctaattttcttgcaagaggtgaaattataattgtccaatgaaactctatgtagtaacaaagtttcaagatttatggcttcaaatttgacaacaaacaaacatgctgaaatttcaagttcaaaaaacttaaggcttaaacttcgcagggagggatgactttcaacacctaagaagcaatagttaagtaacatcaatttctcaagagaaggggaacccaacaagaactgaaataccacatcaacctcagcattatccgaacgtcgaacgtgtcccaatgacaaagttttcagagatggaaaactaaatgaataagaactagtgtcaacctctaccccatccaacttcaaaatagtcaaatttcttgaattctctaatacaaacttaggcaagatatagtgaagggatggatacatgtatctacaggctgttgatctaagcaaaatgccgttcttaacctcattctcaactgcaaaagctaaccatttgtctagaacttcagccttgcttctctatgtaaaatccaatcatgtaaagcttaaaactagttatcgtaacatctttcttgagattcttcaaatagttatcgacatagttgtat

SEQ ID NO: 196976 - DNA, 954 bp, Cannabis indica
tttttctaaagaaaggaaattaaaaaaaaaaactatcaattaactatggaagattaaaagtgaaacagttacttatattcagataagataattaaagtgaaataaagtaatgtgtatagttttcttttgaaccagtaaaaccacaagagttactaatcaaacaaccaattaaacttcaaaatcaactgactctattcattacaaaattattatttaaagacaaattgtcaaacaattatgagccatgaatgaagacctgagagtagtatccatcagtacaataacatatcacacagttggatggaacagaagaaacaaaaggaatgcaaaagtgatacaatgatagacaaaatgtcttttttcctgatccaaatatgatacaaatagaatttcacaaccttcactaaatgataacagaatttcataaccttcactagatgataataaagtgtgcgcttgttaaaagcaactaaattatattcaccaaatgctaagtgtcttttgtagaattaatccaaagagcaaacccatttgagaaccacttaacattcacaaccagttgatctttgttgccgccctccgccagcaacgtcaattgtctcaggaaggtatctaacatcaccaacagaaagaaagaaagaaaaaaattaaggaagagttaaccccacaaactcacgacaaagttacaaacaaatgtcaagataagcttcaacaatgtaaactaccgtgaacatacgcagaggatgacataattaaacgaatatattcgacacaaatagaatctcgaagtaaattttcgataaaagtagttcctgattttattgggctggagtgaaattgcaagtagttaagcaaagaacgtttacttttatgactaattgtaatccataatcttatttctgatcttctcaaacataagttaactctctccgttactagatctgagctatcttt

SEQ ID NO: 196977 - DNA, 1744 bp, Cannabis indica
taaatttagcacaaaaaaatgaatttatgatatatttagctcactatttacaattatgtttcaatgcacaagatataaaataagtaaaagaaataattaattatattgatagtcatttattttttttttttaaaattacaaattttttttattgtttaaataatagtattatagtaaataaaaaatgtaaaatttaataaaagttaatgaatcataatttaacacaatgttatatcttgagttaaattttatttagcatactttttaaaatactattagaataatatttattattaagtgtgctaaaatatactaatacaccacttttttatgctctaaaatatagtcatagttgtatccaattgctaccgaacatgttgaggaatctattctccagtcaggtgagtcctttgtgtcctgtttgccatatggatgaggaatctattctccatgggcttgtaacttgtcctgaaggcaagtcagtcctgagaatatataggcttaaggcgaattagaatttgggaccttcagaaatatatataaaaaatattaaaaaagagtgttatgagatttgaactcatgacattgtataatatatcatacatctcaactaactaagctatgaatatttgttgtttagaatacatttaattttgctctaataaaagtctaatgatttttttttttaaattttgggctcccaaaaagtgtgggctctaagcacggacctagcccgcctatgcctagggcggccctacctgaagctcagttgtgttggaacaaagttggtataaggactcatttgatgtctagtaccaactttcttgattggtataccagtgttcaagactttagatatagagcatgtattttggtcactctttgttgggtcatttggggagcatagagtgatttggtttggaataagaaggttaagagggcgggtgatattgttgcatttgcagaaagataccttaatcaatggagatatgctcaagactctcaagtagagtaaccatggcctggtgcacatgcaggtgatgggtgaagcattggattttaccactaacaatagtatcaaggtcaatgttgatgctgctttgtttgacattgatcatagttttagtattggaatggtagctcgagatgcgaatggatttttaattgaaaagcctaccactcttttacaaggcaatatgaaattggaattggctgaagcaatgtaaattcgtgaggcattgaattggatcaaagataaacaatgacaacttatggtttttgaatctgattatctttgtgttagtgtaagctttgcaagctctttttttatgattgttttatttggacatattattaaaggttgtaaaatattatttgttcttttgaaaaatatttactatttttattattttttttgaataaatttttactatttttattaaatggtcagctaatataataattcacaattttactgagcttctatattatatatttaattgtaattttagtaaatgaaaatgaactttccatttaaactacagtcataattaatacatagtagaatttcatgtcaaataaattaatttcgttttctatcggataaaaaaaaacttctagcttgatatacaacatctggaggttgagaaacaggtgcttttgggaaaaagaaacaccaaaactaatgtgatgatcaaggaactcaaagctgaagtaacacaccggattgaattgttttggccaa

SEQ ID NO: 196978 - DNA, 2914 bp, Cannabis indica
gtatagttgtatatagattgaatgttctaaataataaacagattactagacaggagagagcctatttgaatagattacaatgtaattaatttgtttctttgtattgttttgagggcagtttttgtccttgtgaggcttgagggtgtatttgcttgttgattaatgaagtttcttctttgtgatcaaaaaaaaaaatctaatgccgacgccttggtaaaactggcctcgcagaacaaacttgataagtagaatttggtacctatagaagtgttaagagaaccatgtatatgtgaaaaagaagaagttgagatgattgatgcctcgcctacatggatgaagcccatagttaactatctactcaacgaagaactttcagcagataaaaacgaggcatgaaaattcttatattcagtgcctcgctacacgatagttgaaggcaaattgaataggaagggttatttaatgcctctactacggtgtgttctccccacaaaagcaagtgagataatcaaagagatcgacgatggattttgtcgagagcatgcaagttggcaaagcttgtcaaagaaaataattttacaaggatactactggccgataataaatgaagacacacgaatttgtcaaaaggtgaaataagttttaaagattttcacatatacctcgcgtaccaccaatagaactaaaaatgataacctttccatacccatttgcaacatgggggatttatttgattagggcactgcccacagggcgaggaggagaaaagtacacagtggtggccattgatttcttcacaaagtgaacagaggatgaacctctggtttccataaccagctagaaagttctcggcgttgtcgtcaagaacataatttgtagatttggaatgccaatttagatagtatctgataatggaacttagttttatggtgagttatatactgagttctgcgaaaggaataaaattattaagagcttattgtcagtctcaaggcctcaagcaaatggataagtagaatttgttaataaaccttgaaggatactattaaagagaagttggacgatgcaaagggtagatgggtagatgaactaccacaagtactttgggctcacataatgactgagaaaacagcagcagggcatactccattcttgcaggcatttggcaatgctgccagtagaagctaatattgcgacccacaaacgatatttctataatcacgaagaaaatgttgtaatctctctttctgatgtagtttttaaaatttcactattattgacaaagctaaagtatttttcatgtaattacaaagttttattctttaaaattacttaaggggcatatatatgtaaattgaaatttatctagaaatacataatatattacaaacctactccactttaaaatttctaaagtttttcaagtaattgattgaagttgtctacagacaatgtaaagtcataaatttaacctttcttgtgagaaaggaaaataaaaaagtggcatttgtaaatgatatttaactcataaaagcaacattaagctacatgcgaggttgaatatttaacggctcgcattttataggaatgtattaaacaaggtaccaaggtgccttgaaaaaatacttaaccttaaatatgaatagaaggagtaataattattcatacagggaatcaaaaatgtacaaagtaattcacaagatgaattatttaaagtatgtttaagtttggttaaagcaaaatataactgtttatgtgaagtagatttgataaactgctcgcgaatggaaaccaaagcaaatgacaactgctcgcatacatagtagattattaaccacttaatcaatattaaaggaaaaacgagaccaatggaaatgcgcacttaaagtatcttaattttgatcaaaatagaattgtttaagttgtgaataaaaatgcaaacaagaaaatatattaagttcaagaataaatatgtgaggcaataaataaaaagaaattaaagaaaagaaaagttggccatccaacaatgcaaatttgtctttacaaaaaagtgccacaaggggcaaaccattgtctcggccaaaagaccatttccttaaataaaaaaaaatataaaaatagttaaaaacaaatgctacatcgtattaaattttgacaggtcttcttcttctttctcttgtgcggcctcttcttcaactttcttggcctactcgtagtaggcaaggacttcatccatgccctcccccaagaaacttaaatccatttctgcattcggcatccaagctcgataaatggaatgcttggcaacaatgttgcatcgttccttactattggcctcggccccctcgagcttcaaggtggctgcatcaacttcttcttgaagtttcaggcacatctcgaacttgtccttagcctccttttgggctacctcaagtttagccttgtgggccctcttcacctcctcgacctctttgcgtagaagggtgatccccgattgagcttcattccactctttggcaacagcctcgcattgcccaatgcttctctaaagctcgctctcgaattatttcaccctgtcgagactccgacgttggatgaaaaaggaaaggaaggtttgttaaaaataaataataatgaaaattcataagtatttttgagggttcttgaaataaaatgcaaaacaaaaaggagaaggaacctaattgagagagcgaaggcgagactccttttaagaatctcgggttggactgccattattgaccaagtcccagtcgctgggtaaaaggatcggagatgacgccagcaggccgcagtatactgcaaagagtgttctaaaccaatgctcctagcctcgataggcaaagcttcagccacctgacttgaagaagcggttattgagtttttgtgccctaaa

SEQ ID NO: 196979 - DNA, 981 bp, Cannabis indica
gtcttacaatgaccatacatactattaaactagtaaaaagtacttaacaaaaaactaaaaacaaaataaacacaactacaaaaaaaaaaaaatcaacaaacatgataaatctaccaataaaaaaaaaaaaaaattatatcacagttgatatctaattttcaaaataaaatcaagaaaaaaaattaaaagtctagaaaaaaaaaaacccattcctcttctagggtgtgggtgggcagacacatagagtaagaacaaattgtgttgttcatctagcatatggtggtaaaccactaacgcctaaaagataaccggtattagaaaccaatgacgattatcttctcgatcgccttagatttgatcagcgacgagaaaataacgatcgatattaactcaacccccttcgaacttcaaaaattatcttctccctagcttcgttcaatgttgttgagtcccacgtcaagataatctcctcttccttggccaactatagattgtgattagttaatggttaaagtttttggatttgcaaaaagaaagaaaggggaaaagaagagaatgggtgaggaagaagaagtgtcggggttgagatttgggtttcaatatttatttatatattacttataataattatttttattttaaaattaattaataatttattagaaaaattataacatggaccagcatgtggcgtagatgtcaattgccatggacagaagtaacaaaagagtaactttttgaatttaatccgttaaaaaataatatatgttatttaaatgtatgaaatctttgtattttcagttttcaatttttaggattgtgttttttaaattgaaaacagaaaatagttttttgttattttaaatatttaattatgtttgacacaaattttataaaactatttttagatttcttttcatactaaaaaattaataattttacaacatacaatgatataaactcaagattcgggtttggttc

SEQ ID NO: 196980 - DNA, 2716 bp, Cannabis indica
gagagagagagggagagagaacaaatatgctatcttttcccttttctctcctttctttttatcattaaatttcaaaatcccttgttctaagagaaataggatttttaaattcctagttctacaagaagtctttgaagagcagaatataatttcgaagatggtcaaaattgaatcccacctagtagtttcgagagaaaagagcttagttcacgtcatcatgttaacctcatacatgtgttaagttttcttggggggcaaatgtttactcgagaattgaccttggtgatgaggacatcaatgtttgacacatgggaaaaaagaaaacgtcatgaagttgagtagtcccaagtcatagcagctgacctgggaggggtccttaaccctgcgcccaggttgactttgggaattctaggaactccggaatgggtatttggatccctccaaattgtttcaaactcaccaccttttagtattatgaatcatgaagataagaagaatcaagtccaaggcctggaacttgaaaagagacgaaacaacacccctgaattaaaccaagaagcctaggattttcaccatgttcccggttgacattgcaactagggtttcgattttcgagtccatcttagtaaaaatgactcaaaatttttactttggcttgaataagagttgtcacaaacatatttgagcaatcaaaattaaaatcagaacacttttattttttagcacctaaggcacaaggtacatagggcacccagggcccaggttgacatattgtcaacctagggcatttccaacaataacataggagcattattcccagaattttatttctctccatccaaaacgatgaaacaagtgcttttgggaaagaaactgatcgacctggaggcaaaaaaaaagggatccaacacttagggtaacactttgttagcctgggccatagccaacatcaattaagaagaagtcttctggtcttattctctgttttcatcaaaaattaagatttgggtgattttggggaacaaaaaaaatcatctatgaggcataacttgggcccaatgcccaggttgacatttttcaactgggttgtttccaatcagtttttctgagaagtctttcaagaatattttccatttttgtgaataattgagggacgagtatttccaagaatcaaactgtacaatctggtggcacaaagttggaccaacacccaggttgacattagtgctatgaccagcgcggaggttgacattttgtaaacctgggatatttctatttgttttccaaaatgtggtttgggaatctctttttgtttttagaaatgacgaagatacaagtgatcttggggagaaaatgagattttctaagggtcataacagggtgccaatgcccaggttgacatgggtgctgcaccctacgccatggttgacgtgcaacccgattcgcatgtttccacttctcaaaatcaaattttcctcaagcattcatcttattttggttaaatatggcatatgagatcttgttaaaaatccttaattccttagaagtatcaaaacgagcctagggaagcactcctcgcccaagttgacgtgtcacctagtgtgctgggttctgctgatcagaatttgattctgtctcgaccatcagactattttttcatagtaaacaagagatacgaattaaaataggtaaaaattcacactttgacatttcaccctttcaacaaggtgggataccagtaaaatcatgaagtttcgagtctacccgatttcacaaaaaagctacatctccgagaattggtgaacaacttcaaaagagcaaagaagctgattaaatgatgtcaacatatcatttaggtatcaaaaatacaagtttgggacattttcagtcttaccagcgtccatgttgacgtcaggattttaacctaggcgttggatgtcaatcttggcgttgggttatcaacctgagcattgggtgctgaaaaaccatcagtaaaatagccataactccctcaatattgattcgattgacgtgactcaccaaaatttgtgctcgggattgttgcatttttcccacaaattacccaaaaacaatatgacagacgagattcaaactctaaaaattgacgattttcaaccagagtaaattttcaccattagaacataagcaatctccaatattaagccaaagtgaatttttcatactttttgtattttttttaataatattttaataggacctccttccctattaaaggagagctctctagttcatttttcacattcttctaagtccccataaggttagagcatctctctctactttctctctcttgaaatttgaggtcttgccttaggcagttttcttgtaactctcttgagaaataaaaactcaaagtatacgtagcttcattactgacgcgtcacaaggagtgaactatgataaatttcttctgtctctttatttacttaaacacaattctcctcttcctaatctagtgaatgggtgttggcaagatttttgcgtcaacacacttatgcataaaattctcgtgtgacaacaaaagtgtgagagtggtaaggggcaatcaaaagagtgcaaaaaaccattacaatgtcttagctagagcaatcttcatggtctgataagaagtcgaagaagttcatagagcactcatccaacctaaacaggattaacttgggaggaagatgaatta

SEQ ID NO: 196981 - DNA, 1258 bp, Cannabis indica
atattaaaataaatgtaaaacatgatttcatatatgctaaatttatagtataagattttaattaatttaagttcggcccatttaatattataagaataatatcttaattacaatccttttgtttaaaggacacaccttttgatttcaatttacgataatattaaataattgaaataatttagggaagatttggggtgagtttggaattgttgttgaattcagtaaaattaattaactgagctgcctacataccttctttatgaaggatcaagtcatttgtagttcaaaatgaggtattttataatttgaattaaagaatttcggtagatgaccactttctgaaaatttttgcaaaaaattcataggtgaatgaccttttatggaattttaagatttgtgtgttatactaattttcagtattgacgattgcacttagtcttagcaactaagttgcctacgtatcccttttttaagaatcaagtcaaacgtagttcaggtgtgttaaaagattttgtatctttgagaactttgtggagaattaactcgctttgatattttgaggtagatgacctcacttgggatttttgaagtgaatgatctcatttgggatttgacgaggtaaatgacctcatttgagattttgagaatttgtgattatacttaattttaacaatgaagttgcctacatacccaatgagatcaaattgaacatagttcatatggttggtgatcatgtattctttagagacataaagttattttagaaggaaacttatttttaagtcacttgaattacaattcaatttgatgagaattgtaaataattcaaatttaattacttaaagaccttgtgtctttatgaaagtaattttgaatcagtagggttttaatatccttgaccaaattaaactttggcttttacaaagaagcaatacaatattgtaataccaacactgtcaaatatatgttacatatttattactattcccatattaccatctaattaggtcttataaaaggtatttaattaaattttgactaataggtatataccaatactttatgtcaaatatcaccctgatcatattcagataataaaatgtgatgaataaaaataatgatatatatatatatagtatgggactttggttcctattttgtctgtttttgtagctgtgtggtgggaaagaaacaaaaaagtttagaagattaggaggaagcaacagcagggcgttgggaggagtacaaggttttgggt

SEQ ID NO: 196982 - DNA, 891 bp, Cannabis indica
tatattttattttcttcatataattttagtaatttcgaatcaaataaaagagtactattccccattttcgactagataataataataataattgatggaatgtgtaaaatccattacctcctctagagtatgttatattaattatatcatttatatatagagttttcaaacgtgtaataattaattaaaataatattttgacgaatatgtcattaaattcaacttttcaaagttttacattaattaaattcagttggtcaaaaagaaaaaaataataatgtatgatgatcatattattgtatatattaattgatatatataagcataatatattagtaatgtataagcatcactattagaatctttaaagaaaaagaaaaatgaataaaatcttggcttaattataaatatctcattctcaaccttactttttatattggagtattctagtttcagctcactatagactatagtgaaaatatataataaataaatattagatattttctttagcaagataataagagaatatatatagataggcttttataattttagccaaaattaacacaataaataataaataataatatgcaagaatatattatagaaaatttgtgtagttgaccctcttaaaaagaacgttcggataaattttttatttattttggtatgagaagtgttaattacaattttttcattataatttcttagttaatctctacgttcgaaattacatgccagaatattttttctttcaatttttttcatagcagtactcgttataattacagtatcattccggtaaatttttgaaaagtttacaatgccgaaaacagagttattgatattcaagtttatcactctcgttcaaaaaccttcaaacatatt

SEQ ID NO: 196983 - DNA, 960 bp, Cannabis indica
aattcaatcataaatgttaatttaaactaataattaataacatatatattcttatgggttatacataattattttgaaaggactgaataatttcattaacgcaacggtttaccaaagtcaaaatccactcaaatgcgaacagggagtccaggccactaagaagctatttgtctatgttttcaatttttagaatcatgttttcaaaagtgtgaatagaatacagtttttttcattttataaagtttatggtgtttggctcaacatgtttttaaaaactatttttagattttttcatactaaaaaaattcaatattctacaccatatcatgacatgaacccatcctaccctagacccaacctaaacctggaccccagcccgaacatcagaccccagacccagactcgaatccaaaccccagacctgaacccaaaccccgaacccagagccgaatcccaattttggggctagttccgagatccttggccgggtctgggttcggggttcgagtctgggtctatggtctggcgttcgggatccgggttagggtcgaggtccgaggtctggggtacggggttcaggtctaggtccgaactcagggtccgggtccaggtcctggtacgggtttggggtttggggttcggggtcgaggtgtgggttcgggtctgggatttagaccggggcttgggggtccaggtcagggtctggggtccaaggtctgggtcaaggtcggagcccgagtccaaggtttgggtctgggtctgagtttggggtttgagtctggggttcaggactcaggatccgggtttgggtccaaggtccaggtcagggttcgggatccaagtctgagtttgggtcggggtttgggatctgggtccgagtcttgggtctagggttcaggtctgggtctggttttgaggtctgggtctaggtccgagtatatgtgagcaaaaatgtaaaat

SEQ ID NO: 196984 - DNA, 1909 bp, Cannabis indica
aacaaaatccaattggtgaacaaacaagcatcattttaaacaaaagcattagtagaattcaccatgaaaacaaatacaagcatacacacagaacaaaaaaacacagtcaaacaaaagggatacaaaatccaaaacataagatttgtgtgatatctgcaaaatgaaacaacataagaaacaaactactaaaataaagagggtattaaacaacacaagaaactacagtctcaccgatgaaagttcgtgcaagggatccaaaagacaagaattgaaagccaagaaagcactcctcgattcgaaaaccgaaatctgcaaaaaaaacccatatgagttttgaaaacaaaaaagcagtattgagaaagcaaaattgaaaaagatggaaaaattaccagaaagcgatggactttggaatgtgaggttgaaaaggtgtttggtgagaggaaaaagaaagggattctcatagaaacaaacagattaaagattgaatgggaaaatgggaatgagttttggaaaacataattgctacattgatttaaacagaataaaacacactaaatttgaattgtttatctaaattggaaaacacatgttttggtcaaacattcttaagcttcttcatctttgaaggaggccattttcccttcttcctgagttttctcttccgaacaagacgttttctcctaagcctgattttcttagccaatttcatcttcagcttctgctccattctctcctgaagctttgactccaatggaagtttatcaactgaaacttgaacctctttgctttctgactcattactactttcagtttcaccacttccatcagtagtttcagaagaaactttcaccactacaaaaccccccctcttcatcaccataggcatttcattttgaactccaactcctccgtacatcatacattttgggtgcaaatcaatgggtttaatttgaagcctcgaaactgaaaaaacaaatcaaaattacattacgtctaactgtttgatgaaaagcctgagtgggcatttgttctctgataatttaaacattaataaaatcaatcaattgaaatgaaattgaacttacaagtgggaatggaggaggttaccgaagaggaatatgaggaggaagaaaggagaggtgaattgagagaagaagaggaaacgatgagagcagccattgttgctctgttaccttagccgaatggagtgaaatggaatttgtatggttttgttggttttcttacttttaggataagctcagttttgtaatattgttatgtggtccttcacttctgaatatttacctttttaagtttgtgtctctcatttttacccctatattttgatttcttgtcatttataccctctttttcagtttctaatatttctatgcctatttcatttcaccatctctaattttagtctaacccgagatttgccttcaatgatatcctttgtaggctttgcaaccatttctccactaaaattgataatatctgcacttcataatctactacttagagcactctcattaaacttgagttgtattacttattcttcaaaatataaagaaaatgtagtaaaaagtgactttctatcaaatgaactaaacttgagtcattatatttttttttagctcaatgaatagtacttatctacatgtatagtattaacaagtttaatcaaacaataatctttataataactgtcgagccttagtaacttgaaattacatattaatatcaatttacatctaatctaattctattttattttagtataaattttaacttaattattaattttatatttgattgtcattttttgagtttgtgaaatttgaaaataataaaaaaataactataagtctataagactatactttaaagggattttttcatttttaca

SEQ ID NO: 196985 - DNA, 2096 bp, Cannabis indica
gaaaaaataaaataaaaataaaaaaataatatataaatactttccaaaatatttcttttttactttcagaaactaaatttccaaaacaaattaaaactcaggggcatatataataactaaataaataataaaataaaaaactttgaaagttttaatacaaaactcaaatattaaattaaaggaaaaatattatattctatgatttatctaatagaaaaaccaatgattgtgttgttatatgaatattattttgccataaacaagctaagtcagttctgtaaggcttctacttctgatcagtggtatgcttgcaaatgggttctaagataccttgttggtacaactcattatggtatcaactttacaccaactcaaaatttagatgtccaaggatctatagatgttgattgggccaactctattgatgatcgtcgttcaacctcaggctactacatattttttagaagcaatttagttagcttgtcttcaaagaaacaataggttgtggctagattaagtacagagtttggataccattctttggctctaattttttcagaaatcttgtggtacttagtacttacagagtttaaatcctgttttctatgctcggatgaagcacatagagattgacctcgagtttgtgcgagaccaagtgtttgccaactctcgggacattagttatgtgccatccaacctccgaataacagacttacttaccaagcttcttgccatctctcaaactcaatgcaacttgtttgcttccaaattttgaggggaaatgttaatgatacacaagaggcttccccaagtagttaaaaattaacttgttagttttgtaaagctgtcattacatctgagtaactattcttgtaactgtttcgtctacttcattcatctcagtataaataaacaaagtcatcactgattatgtagagctaactattcattcaattcactgtgttattttcatttcatttcaccattgtttcttaaaagctcacttttctttgttgtgctctaacaatctacttatagaacttcatgatcataaagttgcaaacaaaacattcaaatcttatgccactgaatcctgcaccaattgccaatgctaataactctttcttgctgcgctcttttcctcctggattttgagtcatcataagcacatccccttgggagatgcatctatcaacagagctagtctccggtacagttggaagaatagcctccataactgtaacatttccgttgtcgggaatagctttgtaacaattctttaatagtttcaagcagtattcatcactccagtcatgaagtatcaactaaattatcaacattagtatacattagtcactgaagtactatcaagaaaaagtgtctgcaagttaattgggaaactcaaaactgaccttaattaaaatggcatccccagttggaacactttcaaacatatctccacccacatgttcaacccctgcaacatttacaagcttcttcatttttagtctacaccaaatgcttagtgaaaatatatgacatgactttcataaatagaaaaccatttatgtaaatacctggataagagggtgcatgttctacaacatgaggcaagtcaaaattaatacccttaatatgagggtatttggaagtgatttggtttagggtccctcctaaaccacccccaacatctactactttcccaaggttctcaaaaccattgtaagcctctaggatcttcttcataaccacagtagtcatgttgtgcattgctttgttaaagacctggttgaatttttggtccaatcttggatactcaaaagcatgcattccatggactctgttaaagggtattcccccttcaagaattgcacctttcagctgggacctgctcattcattaaaggcatacaagtttacactaaaattatgttgattaattgtttgtaaattaactcttaaactctttaagaatctaatttgtttttaaaggctttgggttcaatcaatcaaatacttgaactaaacaacataacaatatatcccaatgtagttaattataaaagatcaaataaataaagactgaccagctatcca

SEQ ID NO: 196986 - DNA, 1010 bp, Cannabis indica
gagttaggttttcatgcaaattctgaggttgggttgttgtacgaatcgaaagtgtttagaattattttctgaagttttttttttttataattaattgtgttgttttatgctggatttagtgactattgttgagaaagatcaacgtttcagcttttaagctcaaacttgtgtctttaatggtgaatttgtttttagacagttctagctcctgtttctggttggattatgtttatattgtcttgactaggtattatggagagtttggtagaatttggggtagatttgacctagttataaaaatttgatcttttctatagagaaaaacagttcaccgtttttacataaaatggtgaaaacggtgaaccagttttcctagtaggaccctttgaaatggtgaacctttttggagtttcgattaactagattttttagatatagactctagtttttttgcattttatcaatatttagtttatttccacgctatctatctataagaaatcttttagttttaagcttaaatctccgaaaagtgatttagcgtatcaattatcaattttatgtatgttgtgacttaaagatctgtaaattatcgagcaacagtttccactcaggttgaccgacacacttgaatttaaaattaaggtaagactagtataattattacatatgtgtttacatatttagcgtgcatgtttataaatgcctaatagataacatatcagtaagggtggtattagtgtacatagagttgcactgaataccgacaaatatatatttggtagggtacagattgacgctatcacatgatcagtacaattagagtaatgagtatatgctgattttatggtcaatcgtactgtcgtatgaaatttccaaactcagtacgcgtgggacgcgagataggattgtaattgggtatatggacgcctagttataatctagtttattttatgttacgattatgcttttcttacggagtttatcgactcacatatatgttggaaatt

SEQ ID NO: 196987 - DNA, 856 bp, Cannabis indica
ttaaaaaatgatgagttgatagtgaaacttccaagagctggcaaactaacagagaactcacgccactgtaatcatcaaataaggaataaagatttcattcaattcatgcggactgactcaaaagcaacatcaccgccagtgtttccatatctcatatacatgcactataatctcaaattacatttgacaacaaagaagcgaagtttctatataggccataaattcttgaaccctctctcataaagctctttgatgtgaataaattaataccaacagattaaaatagctatacaactctccaatactccatttccacaccacttaatacataccttcaatgccccaagataatcaattaaatcattctcaaaggcgcatcctctgcttggcttgttcggctctttccaggggaaatcttgcatccacaaaccttgtgatttgttattccaatcaacgtggattaagtttgctgtgtgtacaataattctcactcctctaggatacacaagaagcatggccttcgagtggtgtgttccaaatgaaataggtaagggtggtttgtgcagaatccaactagcaggcttgcttctctgagcacgataattaaattttaaaaataaatttgtaaaaagaaagtacaaatgaaatgagacgactataaactaggttgtaggctaaccttcatatgatccaatgtaccatcaccctcaccatgaactaccaaaacttgaggaacttttgcaagcaatggacatgctacaaagcatttttggaataaggggacattagggcaagttcttccagcagtgtactgtagaaaagaagttggaagtgaactaggagctctaaagagcag

SEQ ID NO: 196988 - DNA, 1186 bp, Cannabis indica
ggcatgatggagctttatgccaccgaatctagaaggcgcaacaatccaagactaatgtggcaaagattatctactacgaaggagtgaaggggtcatcttctgtgagcacagaggggttcagcgcttggagctgggcccatattctgagtagggcccacctccctttgaagacttactttacgaaattcattgcatgttttgggatagcccccttccaattgatacctcctccttacaagctcctagctagatggtacatcttctgccagatcgacaaacttgaggtgcctaccctagaggagaccttgtatttttatggcgtgaagcctcaacccatgggcaccaattacaagattgggttttataagctagagaggtactcagatgcacactaccctataagcttcaccttacactccccagatctccgagagtactggttcttttccactagttttacagtgaagagggcccctaccctcccattaagattttagatcctaagtaaacatctttattgttgtctttccttctttcaaagtcttttctactctaattgctacttgggcctttatacttctaatctctggcagagcctatgcctcagagtcccaaaactgaggaaatgaagaaaaagatagcccaatataagctcttcactgacacaaagttgaaagtcggaggcttgcttaccacaaagtttctctgtgaacataggctaatcgctagcttccaaagcattgatggcataagtggcaggggccaaatatagatttccaaagaggctaaggagaaaatagctcttaagctagccaaaatcataaccgaagctgctaaggaggataagctcctggaagcagattgggtgctccgccaccctaatccattaatgaaggaggaagagattttcaaaatcatgagagtgcctcgggagcagcaattttgaaagaggtaacagacccttctgtgtattctgtaccccaagtctccatcgtatgtaccagatggaccaatggggattcgatagctattttctagacttaaatcatcttaaagtatcccatgaaggactatatagacagggtagatgaaattattaggagtcctagtaacccatagtcaactctagatactgttatagtggatcattttgcgactatctttttccctaacttcagagagtatg

SEQ ID NO: 196989 - DNA, 2124 bp, Cannabis indica
agtttattttccaaggtttccaacataatgaaatacagtgtcccggtaggcgagagtcaaagataacattagttgaatagagttgtcagctcatctaaaattaaacattttagcaaccttttattcgatcaaaatgagaatccaacgttgtcccggtaggcgagagtcaaggttattctcattttatgagcttccaccattgtttcatgttttatgagtttatctctaagtagtcaccgtaggggagagtctaaatagagacgaaaactcacaaaacacttatcaaatgaaatcttacggtgttaaaagtgttcaacgaataaccatccatagggggacgaagtctagcgtctcgaggttatattgaaaaacatttaaaaaaccaacaaactaaaaagaacaaaagaaaaatacaaacaaaaagaaaaaaaagcatacgttcccatcgaaacctcaaggtttctttgaaagatatatttgttcgaacttgaagttttgcattgcaaatttcttcacctcacgaccaacaagatagaaatccttcacagtggcctgaaaaaatgggaagaaatcaaacatgttaaaaaaccagttataaattaacaatgagaaaaaggaaaccaattataaaaaatcaaagtacctcgggattgttaaaaacctcagaaacaagttctgaataacctcaagtgtttttcttgtatgcactctcccagtttagcaatcgaggatatgtattcgcaatcgtcttgtagtacttaggagaaaggcttggaagtatctcaaacaactaaataaggaaagaaaatggaaaaccattaaatttaaatgaataagacttatccttttcatctttggccttctcaatcttataaaagatattgtcgccttccttaaaagccaaattcatctagtgaaaagttctgtcccacaataattttccaaatgctatattccttaagtctgacagatccccatccacgaacgcaaacaattcattatcaactctcttcccattctcatatccatacaaataatgacttaacagaaacacaatccccatcttgacagcttcaacatcaccattaaaatccccagacaaaaaccttcccctaacctgctcttgaataactttaatagtcaagttaggaaacatcttcttcttgaacgaaatcttctgcttaaactcattcaaatcaaaagacccttccggacttactcaagtaattaaaatgaactcctccaaaccaaaccgtacaactctatcccaaatcagaaaccacttctcaaaatcctcccactcctaatgaacctccttcactaaagcaagatgaggcaaggcaatgttccacttaatattgcccatcttcagaaattgagaagaagacgtcgtcaaaaataacaccttttgagaagcagttaggtttccattaagctcgtcaataattcatgggttattccaaatctgaagtttacttgcaaaatggtgctcaggtttcattagtaaacatcctgtcaaaataaccagttataaaaaaagatttagacagtgaaaaaaacaacaaaaacatgatcaagaaataacttgtttcgtaaacaaaaaaatacacatgaaaataaaacaaaatatgtatatatatgtaaaaagaaaaacttaaagtacttaccacattagaaaaacttgtggatttcttaacgaattcttcaggaatcgaaggactagggccctctaaagccacacatttcaagccaatacgtgttacacgatgtactggctgcttcggaacatcataataagccacccagcctaaaaaaaaataggatacaaaaattaaatatatacataagaaaaaaacattcataaacagtaaaaaaaatataaaattataaacatctaaacacctttttctttcggctatgggttttcttaacagtgggctctttttttcttcaactggaatgttagaactggttccagatgcacgtgggtcaacgaaatcatcatccgttgcatcgacattaaccttgaaatacaaaaaagaaaccggttaaaaaaactataaaaacaaaactttgaaaaatcaaagcgagacaaacatctagtaatacaaacaaaaaaaatca

SEQ ID NO: 196990 - DNA, 1728 bp, Cannabis indica
ttaatagcatttagaattgaacgttagagtccctcaagagtcattacacgatcagtcaaggcatcaagggaagctcgaacaccagagagttccgcagagatatatgttgaagcggttggagtaggagcttctgcaggaagatcatctgaagcaaacaccagagattgaggcttggatttctttgatgatgaggcttcaacagtatcaggaatttatgcagatgccttgtaagatgcagcggtggaaagagccaccaaatcttcgtccatttaaacttcttattacctcaaaggatgttgaagaaaggaacacacttgtctgttgactttaaaagaatctactgagtgcggctatccgactattgcacttccttcacctttgttggcgacttcatatccaagagggcttcaaccttctctggaatagcttctattcctcgagcattaaatataaatcaatgaaacttacccgagctaaccccgaaggaacacttttagggattgagtttcatggtgtattttttaaggattttgacgcattcgtccaaatcctctacgtgccctccaaccttactggatttgacgagcatgtcatccacatatacttccatattgtgtctgatctagtctttgaacatcgtattaagtaacctttgcaggtagctccagcattcttgagaccaaacgacatgactttgtagcagtatagaccaatgtctattcaaaaactagtgtgctcttggttaggtagatgaattcttatctaattatacccttaattggtgtccatcaaacttaggatttcatgctccactattgcatccatgagctgatcgattcttagaagtagaaaatagtcttttagacacaccttattgagtttggtgaagtcgatacacactcgccatttaatgtttggctagggtaatagtacgttattagccacctaggatggatagaaagcttcaataatgaacttatttatgcggagcctttcttcctctttttttagtgcttgtgctcgttctttgtccatcaatccccttttgtgttagatgggacaaaagtttggatcaatgttgtgggcatgagacatgatagctggatcaatcccgactatgtcctcatgccaccaggcaaaaatgttgagattttatcttagaaattttattaaagctaattttattccaagtaacaaacccttgcacgtcttgagtttcttggtcaggatggtgggataaatctatacttcttctagttcttctattggcccaacatttctgtttgttttcccaagtcagcgatccatatcttcatccctgccttgggcaaattcttattgggcgatgctttttcccttctctgaactttggccagaggtatcctccttttttgccttagatagggtaagattgtagtattttggtgcagctctttgatttcccatcagacagcccactccactctgtgttggaaatttaatgcacaagtgaaagactgatgtgatggatcttaagtgatataaggctggtcagcataacatgacattgaaagcttaaagaacgttgatcactaagaattgtgtcattactgttttgctcgtcgaagcttgtcctactgagagtggtaagtagatttgttcaagtggtggtacactttggctagagaattcgtagtctagctgagtgcaaggaaccaaatccttaagttgaagccccatattttcata

SEQ ID NO: 196991 - DNA, 1909 bp, Cannabis indica
tggaatcaataatcatcaaacattagatacataataaggttattaaacactctaattttgttatcatattaaacatgagttacaataaaaattttgaacaaaaataaaaacatactaaccatcttttatcaattaatttcactcattaaactgatgacatcattgaatttccaatcaaccaagtaaccaggccttgacacttcagtgttcacctgatcagtactgtttcctgaaagcaatgccacaacttcagacatcgatgggcgagctgtaggcgatgtgcgagtgcacaaaaaagccacttgtatgattcttctcgcttcttcattaatgaattctgatagttttgaatcaatcagttccatttcacggtcctcttcatatagattccaagcctagtgagaacataaacaaaataatattaacgttctatttgttagggaacaaggtagcatggtaaaaaaaaattgtctttcaactattgtaagctaagtctttggtgaaaaaagcaatctagttttagtacccattcaagaagatatgacttttcttcacctaagctcgggtcagaattcggtctgccagtaagaatctctaatgccacaactccaaaagcatagacatctgttttctcagtaaggtgaccaagcatggcatattcaggtgcaagataaccactacaacatcaatgaagcaatagtgaatattttgttattaataatcaaaatgagaagtgtgaaacaaatttaagtatgatcaatcacagataatcttacatagttcctgcaactcttgaacttatatgagtcaatttatcatcatatagtttggccaaaccaaaatctgaaattttaggaatgagatcagagtcaagaagaatgttgctacatttgacatctctgtgcacaattcgaattcgtgactcctcgtgaaggtaagctagaccttttgctattcccaagcaaatgttaaaccgtgttgatcaatttaaattcaagctttgggtacctgagaatgcaaccaaccacatttaactatgtttaaaataacctttggttcttatactattatttgtgtaaaagcagcaatgaaattttgttataccaaataacgcttgatcaagactatggttctccatatactcataaacaataagttttgtgactccttcaatacaacatccatataatttaaccaagttacgatgttgcactgcagatattgtggcgatttcagccacaaattggctttttccttggtgagaagtcacagacaattgcttcactgcaataactcttccatcttcaagagttccctaacagttgtgacaaaagtaaaatggacaatcatttaggctaaattttgctgggaatcagttgattaatgcaaaaacataccttgtagacaggtccaaatcctccctctcccaacttattagaagaattgaaatcatttgttgccatccttagttcagcatagccaaaagttaatggtttgacatccatccccaagaattctgcaaatcattagctaacaatcattaattcattatgctttcatgtttaatttatctttcagggaacaaccaatttgcaacgacaacaaaaagaggtgcttaccttcatcatctttcatttgagacttctttttcttctgaaaaaaatagaaggccactaaaacacacaaaaggatgaaagagagtggcccaaaaatgatccccatagtcaaaccggtttgattcttctcatcgctgaaatttggaggaatgttgctgacagtaggtttgaaatctgtattcctctcattgctggaattttgaggaatgttgctgacagtaggtttgaaatctgtattaaaataaaaatattaaagtacttaaactaaccttttgatgtaatcattcttacat

SEQ ID NO: 196992 - DNA, 1148 bp, Cannabis indica
aatcatgtctcctgaatttttaacaccgttaaaatttctcctgaattattaagaatgttggatttaagtacttttgtccaattttagtaaagaaagtctaatatgaatcaaagttcaaagtgtattatttggtacatattaaagtttaagaaacataatttactagatatcaaaatcaattaccaaattaataaaattaaataaaattagataaaaaaatttaaattaaataatatcaataatttaagaatttttaacgcaaaaataattcaaaaaacataattaattacatgtgagagttgaaacacaacagatcttaatatgacattgcaaaaagttgaaagcatcaagtatcacgtgacttataaagttttggagacgtcattttctttatgaatatgataggagaaggcagacattatttatgactagtttatttgtagtctgactcagagttggcagcgcgtgatgccacctgcctttgcaaataataatttcaatctttttaatttttggcatatcattattattagataagagattacttgtaatttgaaaacaaacaaaattcaactactcttcttccaaatattaaatatcattaatgtaattcttacgacacgtaaattaatatatttttatggattataccatttatttaatatatattttttaataaccacattaatcaagcaccgaagcctaagaatattaattattttatatcctatttacttttgatgaggtggtcggtcgttttttttattgtatacataattttttttgttatattttatttatttattacaagtgaggctaacaataataaatgatgtttataaaaaaaaaaataaataataatcaatgaagggtatctaaatttaagacgaagtacattttgaaagaggtgagattatttattgctatatcgactagtgaaacattattattgttccatcaaataattttagctttattgattttttttttagagaaggatgcccttaaaggaagagaagatctttaagattgtaagggttattctcaatccaaaatagaagcttcttataaccccaaaaccaattttaccaatttgttaataaaaatattaacggattacttaagataagtgatggagacattaggaa

SEQ ID NO: 196993 - DNA, 1721 bp, Cannabis indica
  modified_base (70)..(70): a, c, t, g, unknown or other
cgtttttgcatttgattttgccttaaaaatactcatacaatctcttttgcataattttacctctaaaaanctttagatatatcattttgcatcgtttttgctttaaaaatctcatgaaaccatcgcagactatcatcaaacattgatttgcaatgatttacttgcgtaaaatatcaaacgacaccatcacttaaacatcttttttttattcatatattttttaattttcatttttatttttttcctttctcatcattgctaaaggatctttatacattcttttctgccttaaaaataaagattcatagaattatgacaaaagagtaatgatatagtacacataaatcacacacaatatatttacttttgatgggtggaactcatcttaatgaatatgattgcttgaaattacatgctacataagtatatggagtttgtatttgatttgtgtgtgcatatatcattcttcagtataaaatatcatttacaaaattggatagtgttaaaggagagagatattaaataaagacaaatttatcgaaaaaacatacctataattgtcaaacatggcataaagcctaaaataaccatagttccccgcggttaccttcatggagggagggtaaagttggttttttatttaaaaaaaaaaattgtttagtaaaataggaaggaatgaaagaagtataattctttactattttagaataaataacaatattaagaaaattagtcataattattttaaaaaataaattctcaaattttttcattaatccacccatatactggatagtcatgtttggtgggcacaagaaaatgacaatccatactaaattcaaaaatttacataatacatttaaaaataaatttttcttttacaactttacgattttttctttttatttttagacctctcttttttatttacatttttacaaattttcactttttctcaacgaaaaataaattcatgttacttccctatactaacacctaaacaacattattctaaaacaacaacaaaaaattctgtataattgtaaacataaaccacgttactttcctataacaacaacaactttaaaaacaaaacaaaaaaaaaaaacaacactatatttttgtaaaaaaaatataataaaatccacaaaaaaaaaaataataataataatagtaaatccgtaaaataatttttctttttatcatttttgtatatttatccctaataatcttcatattccacaccctttaatccatccttcccccaatccactataccaaataggactctgtctagacttcaaggaaaaaaaaaaaaactgtctagtgttgctataagaaatttaataggacaaaaggaaaatgaaaagagtgctctggtaaatttagataagataaaccagtccattcataaataaaagaaagttgtttctaagttggtttcttcaactcgaaaattcgggttggactccaaacaatcgtgtctttaaaaatatattgaacgtaaaaaatgtgggttctggcactattggccttgtggtgaggtgtggtttgtgaagaactaagattgaaggttccaactgaaagaaagactagaagggataatgtgtcttccttctcacgttgccaacgctgtcgttttacaaatggggcacaagtttttgtgcgtcaaccattgttttatgcaatggctatggaaatcgtggccgcattcaagtgtt

SEQ ID NO: 196994 - DNA, 1274 bp, Cannabis indica
aaaagtattggcccaaacgaaaataaaggcccagtccaatattgaaaccctagccctcactcagctctctccttaacttctctctctcctctcaaactcattcattttcatcagaacggacggagagaagagtgtagccgccgtgacagtttcactgctctgaaactccatttcctctcccgcacgccggctctctcaggtaattttttctcaacttcgtggctagatttcgctgctgaaattctacatgtgaaagtactgatgacataagtaatgatctggaaggtttcaagctatatctgtatctagtgaatcgaatcaatatatgtatttgttcacttactatgaagcaaacaatgattttgattttatttctgggagagttcattttgtatagctgaaattgtacctttgaatgtttatacattgtccaaaagagagagacattgtgttgaggtggtttttgtttgttatttgattgattgttttggtacagaagagaagaagtaaatatgagtcgaggaagtgcagcagctcccaaagggaagaaaaagggagcaacatttacaattgattgtgctaagccagtggaggataagatcatggacattgcatctcttgaaaagtttcttcaggagaggattaaggtcggtggcaaggctggtgctctcggtgactcagtcactgttacccgcgagaagagcaagattactgttatatctgacagtaatttctccaagaggtactaacggagctttggatttgtgtgtttttgatgatgatgataatgctgatgttctttcttttgtttaggtatttgaaatacttgactaagaagtatttgaaaaagcacaatgttcgtgattggcttcgcgtgatctcatcgaacaaggatcgcaacgtttatgaacttaggtactttaacattgctgagaacgagggtgaggaggaagattaaatttaatttgtcagaacaagttaattttcttgttgcctgaatttccttttagtttttccaatccaattgtgatggtgttttttattgaaactagttatgtatgccttacaattttgtttgttatagctagagatttttaaacatttcttctgtttgatgagaatatattagcatgtttggaattttagatctcagatttctgattatatattttttctcttgttatgcttcaatcatgttaataatttttattacaatttcccttgttaatgcttcaatagatgaggctattggggtttgtgtattgttaagagaa

SEQ ID NO: 196995 - DNA, 586 bp, Cannabis indica
aataataacaataagagaaatttcccgtattaatttttttttataattttatttattgtattttaatgtctataaaaagagtattacagaattgtagttttataattatttagtaattttttataatacttattaaaataaataaagtagaattaaatatttaattatatgaatagaaatatcacatcttataaaagtattaattagttctttagcatttttcgtatacaaaagttgaaggtaataatacttaaaggttcgtttggaacgttatattaagtcgtattgtattaattttatgtggacaataataataacaataagagaaatttggcatattaattttttttttacaattttatttattgtgttttaatgtctataaaatgagtagtattatgagccacacatgagatttaatattagagaattatggttctataattagttagtaatttttttataatatttattaataaaataaaaataaaaacaattcttttttctcttctttctttctcagtcaaattagatttctcaacacttactgaaaaaatccaatgggtgaacctttacacaaatagtt

SEQ ID NO: 196996 - DNA, 7205 bp, Cannabis indica
gagatcccattggctcttttctaaggcaacatgtagtttcttcaaggcgattttcatcgttttgattgttatcagccattgaatatagatgatttctgtttatatggagggatttttctgagttttatcattgaggctctcaatgaaagaaccaaaccattaacgcagattttcattaaccaaaactaaatagccttttagtaataaatattttacaaaaattaataagtaataaaagatataataactctagatatttttacgtggttttgtagttaaaatctacatactccacgaatccttcttcttagggatattttctgaatttagggtataacaacagtcattcccattggagttttagcaatctttgaactttcaagtccaaacttttttaccaaattcataatatatatgctttgagaaacaaatatattatcatctaactgcttgacttgtaaacccaaaaatagttcaactctctcaccatactcatctcaaattcctctttcatcagtttcacaaaaacctgtacctcattgttagaagtataactaaaaacaatatcatctacatatatctgagcaatgattatgttagatttattatttttgataaataaaatctactcctcccctcttgtaaccatcagaaactaggaactgagttattctctcataccaagcccgtggggcttgtttctctaatttgtaaacatgatcaggtgcatgaggatcctcaaatcctttcagttgttcaacatagactttctcattcaagattccatcgagaaatactgatttgacatccatttggaataacctaaaaccaatcaaacaatcaatagacaataataatctaattgattcaagtctagcaacaggtgtaaaagtttaatcaaagtttattccttccacttgtgtatacctttgtgccataagtcttactttattccgaataccatgccaaactcatcaattttgttcttataaatccatttgtaccaatatattgatatacaatggtctaggaataagaatccacactttgttctctaaaaaattgctctaactcttcctgcatagctttaatccaaaatgcattagttaaagcttctttcacattcttaggttcaaccaaggataaaaaaacaaacaaattgagaaacactactaaaccttcttcttgttaccatgtcatcttttggatttccaagaattatatctcctggatgattcaatttaactttacttgatggctctttttagactttatctgagatgatatttggaaacttcttttctgttttctcagtatctgtttcatcagattcatgatctgtttgaacagacacctgagttattgcaagaggagagttaatgacagtattattttttttttcagtaggtgtatcaataaacctatcaatattttcttaagaggaaaactcagataaatccctagaatcatcaatgacaatattagtagactccattacagtttgggttctcatgttgtacacacgataagccctacgttagtggagtatccaataaaaatacccttatcactcttggcatcaaacttaccaagatgttctctatctctcaaaatgaaacaagcacaaccaaaaacatgaaaataagccacgcttggtttcttacctttccaggcttcataagatgttttaaaaatacctggatgaagaaaaacaaaattaatgatatagcaagcagtattaattgcctcagtcaataatcatttggtaagtttcttgttatttagcatcactctagccatttcttgaagggtgcaattttttctttcaactacctcattctgttgaggagttttgggtgctgaaaactcatgagaaatacctgcagacttacaaaaatcatcatacacagagtttccaaattctttaccatgatcacttcttatgcgcacaatcttaccaatattgtaatccttttcaactttcaattttaaacaaagatatctgatttttctctcaagaaatctacccaggtaaatctagaaaaatcatccacataaacaaatatagacctttttctatttaaactctcaatttgaattggacccataagatccatatgaagcaattctaaaacttttgaagtatttatatcaaaaacacttttatgtgtgatcagattctttacctagtttaggtaaaccacgaacaatacctttatgtgacaactttttcaaagttctgaaattaatatgaccaagtttaacaagccacacatcactattgttattcacaatagattgacacataattgaaggcaacatggtatagcaattaattagatctaaaaccttcaagcatattctcaccatttttgttcaaaataaagcagttgtctttatcaaagttaacagtgtaaccttgatcacatatttgacttatgctaagcaaattagcttttaagtccttccacaagaagcaacattttgatcttaggtaacccttcaaagtcacgagtacctattccgagaacattaccttcaactctattttcaaaggttacggatccacaatgcatagatcttatgtttgtaagaatagacctatcacctatcatatgtctccagcacccactgtcaaataccaaaaatgtgaagcacttcctctatcatattcagaactaaaaccagccaaacatttattctttttaacccaagtttttagaacttttccctttttactctctttgattttttaaaatatttaaatctctcaaattttggcaaagttcttcagagtaaaacacttaggtcgaatatgacattttctgccacaaaaatggcaggttggaatgaatttttcaagcttaccattatttttacctgctaactgtaactaatctgttaacactacaaagacagttgatgcacaactttctaagaagttggaacagacatattagcatgcagacttccacgagaaacaaaaaaggttttctttgaaatttgagactttgacgctccaagtcccacatgattcctttgacctgaattctgtatctcctcaaaaatagaagaaccaggattaagcattctacatttttctcaattgcatttacatcttttgacaacttactaattttatcattttttgaaattatttctttttcaaattttcatttaatgcaaaaagttgcttgatttcaaataacaattctttattcttacttaccaaggtttggttttcagaacaaattttcaacaaagaatcatacatcttcttgtaagattctcttaaagattcatcattatctgaattttcttcatctttggagatattattcaaacacacaaaatttttacctttggatatagaattcgggataacaaaagttaaagtaacattacctttctcatcttcactactctcggagtcattatcactccaagaggcgattataccttttttatttctcttcaaggtatttgcacattctaactggatatgaccaaatctctcacactccatgcactcaatatttttcctgttagattgaaaatgtttaaaagaagaataaatacattttgaggtcttagcattagacttcttatttttaatttttttatgtgtttctgaaaattcactgcaagcaaagcctatcaatatcttcatcatttgatgcttcattttcagtacttttgaaagcaatagtcttttttttccttggaggtactcgatttctcctttgaaccaatattttaatttaattcaaaggtgcgaaaagaccccatcaattcttctactttcatagtactgaaatcctttgcctcttccatagccgtgattttaacattgaacctgtcagaagtatcgtactatctttctcaccaaaatagaatcatcaagtttctcaccaaaggcaaaatattcattagaaatgtcagataatctttcatggaattcagataatatctcagaattagtcattcttagatcatcaatcctagtttgtaacatgatgaatctagatcttttaacatttgcagttccttcaaactaagtttgaaggatagtctatgcatctttagcagaaatacaagcgaaaacaagtttgtttaaactttcaccaacactattaaagatagcatgaagagctttattgttataactagataacttctcttcttctgtattccataaaatttcaaattttacctttgtgctaccatccttattttcctccgagggaagagaccatccagacagaattattttccatgcttttttatcttgtgctttaatgaaggctctcatcctcactttctagtagagatagtttatgtcattgagtagcggaggacgagataccgaacttccttctacaaagaaagacatttcacacgaaaaaacaaattaaacaaaaattaaaaaaacaagatttcactaagagtttagtgaactactctaataccaattgaaattccatttttataattaccaaagtaaatttatcaaacaatttaaataatgtaaaattgtagtaaaattgtttagacaaaaattatctttgttctatgagacactaaatctgacagaacagacatatactgcagatagtaaaaaatgcaaaaaataaaatgacacaagatattttatatgtgctatcaacaactcttttgaattgtttctagtccacggggccatgtttaaagaatgaaatttattagatgaatctcaagtgattacaaaaccaaattgacttatacaaataaagactccctctttgaatttactgcaattgttgtaatctattcttctaatcaaatttctaaagtgccgagaccttgaactcccttcaaatcgtagcacttgcacactttatcccgaagcgtgactcacaagtaatcttcctaccgaagagtgtctaacttccaatcttcccctcgaagagtggctcacttacaatcttcctcccaaagagtgactaacttgcaatcttcctcccgaaaagtgattcactttcacttttcctctcaaaaagtgactcacgaacaagatttctctcgaagcttgatgaacaatatctaaagtgttcaacctgcataatttcaacaagaagcaatacagaatagcataataataaaatactaaatacttgttggactcaagttcttcacataacaaagaaaacactctctaactttaaagtaatttaagaaatgatacaccaagagagctaaccaataccaacaatataagagtgtatttatacactttagaaatcctctaggtcgtggtcaaacaatcaagaaataatcatgtcaataaataaaaatctactgaaataaaaaagtcaaaatctgtttaaacacacagtcagtccgttcaaacaggtacattgaacctggacagtttttcagcaaaatttccataaacaaataagacaactttgactacattaacacacatagttgtacacagtttcttggtcaagaaatcagataaaaatgaataaaatatgattaagaatttccttaaaaaacaaagataaaattaaatattctaaacaaggaaaactcatatttaattcacatcaagtacaaaagagaataaaatatgattttgaaagctttttcacaagaaaatagaaaacaaaatttacgaaaataataaataaaacaaataaaaataaatttcaaaaataccacaaatattgtttttggcttatattatcaaatatgtacaataaaaaattttacaatataatttttttaaaaaaaaaacaagaaacaatcatttaattttaaagatccaaatttagatagttttgcttatttcttgttggattggggatatgaaaattacttgtgaattatttgagtgggaattatgttatattatattgttataatatacgatagattaaaatattaaaatgagacatattatatattaataggagattaatgtatataatgtgattgagagttatatacatttaatattcacataaattgtaacataagaggtggagtaactcatattttgtaacttcgacatgatcactaattaagtgtgtaaagagtggttacacaacttaattttttgaaatttaaaactataattcaaatatagttgttggggattgaattttgtcatttataaagtgtataagtgatataaaataaagtgggaatggtttggagagttgtttgcaaaagctgaaaaatttggtaactagtaactagttactgtttttttcaactttaattgttgaacattttttgctataaggatgacttttaacaactctcgtaacctccaaatcacccatttacaccccattaagaaatggtaacaacccttgggtgtaggttatttgaatttcaaaatatgtgatcttaaaacaatataaatagaggtctttggttcatttgtgaagatacaatttttgagtttctatcaaagagagcactttgctagaaactataagcttgataattccagaaagctatttccatttctttcttccctaagtgcttgtggtagggggaaataagcttttggacaaaggtgtaaaaccttgttcaaattttgtgattctcctacttgacactttgtgttagtggtgttgagattgttctcgcatctatatatatatatatactactatttatattgtgttttataatcttctcttctatttttttttatacttatgtgtatattttgtctagagttgtaacattattttatcaatattattgtacttgtattttttattttgagttgtatctattgaagcacttataaatttccaacaaattaaacaaaataagagtaatgagatgaagaaggaagaaaaagagttgaccctcacgtagtgaaagtcttttttaactttcatcaaatgcccttcatacaaatgaagctgcatgattgtatttttttttatttatttatttttaatatataaggaaactgcatgtagatttaaataaataaataaaaaaaaatattggataactatagtatgagaagaaaatacatatggatgtatgttggaaattctgagtttgaatctcaaataaaataatggttgtaatatataaacccttaaaaaaaaaaataaccacaaaagacaaaaataggagagttgtgggtcgatataactgtttcacattataattattgaacatgaacatgt

SEQ ID NO: 196997 - DNA, 697 bp, Cannabis indica
aattgacatttatcgagataggtagtcggttaaaagtataagtgtcagtttaaaactagcatcaaaagtacaatttgtagtagtgatttgacatttatcgataagttatcgattgcatttactgataagttattgatgatatttattaataggttattcataatttttatctgtgttttgtcaatttggcatttatcggtatgttatcgatagcttatccatgatttttgtttgtgcacaaaatagaagtgtatatacaaatattatcgataaactatcaacaaaatatcgataatccattgataatcacattttggacgaaaaaaccatactcgtgaccatctaaggtctcaaacaacacaaattcaaaaaaaaaaaattacagaaatccaaaaaatatagtatcacaatacatacaatgatcaaattaaactaaatctaccaaataaattcttaactcacaatttttttttcaaaaaataacaaaaatctaacctttcgccgagggtggatcgacggtggaggaatggcagtggtcggggactctaggtcgtagaatggttgaatgatggagtgggtcgtcggtggtgtggaagggatcgttggaaatagagagagggaggcaaagggttggtcgggtccgatcaagcatgagagaattagagagaataatttttttgagatttttgaaaaaatt

SEQ ID NO: 196998 - DNA, 1005 bp, Cannabis indica
tatttttactttttaggtgaaaaaatatatgactattgtgtcaagcactacaatatatattaagtctattcttttttcctacaataaaataaataaaaatctaaatataagcttccattattactatagaaattaatactaatagcttggtttatatatgacacaatctaaatcatacataagtacatcacctaacgattaaattaattttttatattgtttattaaattaatatatatgacatccaaaatattaaattatgccaatagtaatattacacatgcattttatatataattttttgtttaaagatttgatttccaaaaacaaaattattgtatcatgtaattttgttatacatataaactaagaattgagtagaattagttcaatatataaaagatgaaagaaattgtgaagaaataaagtagaaattttgtgtaattaggaaactttttgagttaatagtttattgattagattattgaaatttgtttaagttaatagatgtggtcacaagaatcaatatatagggatatagataattagatatggatatttaatttatatatagttgatgagatgttttaattaaagtccaatcattagtcttaagtgtaaacattataaaatgtttatggttgttagctcaatgcattgctagctagctaataataataaaaataataatatgcatataggtaagtcctctatgcgtcgttttgttcataggtcaacacccacaatttggaaaaccataaaaggttgagaccatatctaacatatgggaccccattacttaaggaatgacaaaaatatttactattttttttttggttattaaaatattcactatttgtttttgtaaattcctaatttataggttgtgcttgtgacaatgatattcacatttactttgtagttagaagcttagctagttaatagtattaccctctagtagggatagaaacggggcgtgaaatgctcccctgtctctacctctat

SEQ ID NO: 196999 - DNA, 2072 bp, Cannabis indica
aggaaatatgagatatttaggttataataataaagataagaatcgtctcatatgctcaattaaattgacttgaccgaccctaaggcagcaatcaattgccaaagaattttatcgtgaaataacttaaatattattttatatatatattttttaaatgtatgtactcatgcatcacgtttatattaaattcaaaatgatatttatttagtcaagtatattaatatgttatctttatttattttagtcatgtctactatgccaaatccctttactgctttagcacttgaaaaattaaatggtaaaaaaattcttaaaatggaaatctaatcttcattttttgttggttagtaagaaccacaaatgttttctaactgaagagcgtcctaaagagctcgctgtcaatgccccaaaaaatattcggggacagaaatgatgcttggatttaatccaatgacaaggccaagtgctttatgcttgtcagtatggatgacgttatgcgtaagatgcatgaaatatggagaatacatctgaaataacgaattctctacaaaccatgttttggcaacagtttgataacactagacatgatgatactagtagctacatgaatagtaagatgaagaagagtgtccttataggagctcatgtcttacacatgattgagataatgcatgaggcaaagacacacgggaatatcattgacgagaagactcaagtaagcatcatccttgagtctctatctcctagcttcaaagtgttcaccacctaattatgtgataaacaatttatagttcaacatgactgaattgttgaatcagttgactgtatctgagaaccataacaagaataagtctaagaaaggtgaatagaacattgttgaagcaaaatctagctctccttcttatttagataagaaaaggaaatgggactgtacggacaacagtagtggcaagcccaagcaaaaaggcaagaaggcacctaaagcaaagaagaaaaaagccagtcataagtctaaggacaagaaggcaaaaggcaaatgtttccattgtggcgtgatgagacactggaagaaaaattttaacaattatctcttagagctgaaaaagaaaggtaaatatgatctacttattcttaaaactaatttagtaaaagatgataaatctttatggattgttaattttagagccactaatcatatttttttctatgtagatacttgattcgtcaagggagctaattgatgaagaggtgaccatgcgtgtgggtaatggaacacaagtgttagccaagtgtgttggcaaagtccgtttgaacttcaaaaataagtgtttggttttgaacaatatttattttattcctaattgtacaaggaatattaattctttatctctttcgcacgaacaatcctttaacattgcttttattaataataagattattatttcaaatcaattttaaataattaattatttagagtagttttgcctcaacaaaataagagacaaaaggtttctaaagatgatgagacatatctatggcatctgcgtttaggccacatcggcctagacagaataaattagttaacaaatgattgtccattgagagaactaaaagttggaactcttccggcatgtgaatcttgtcttgaaggaaagatggcaaaaaaacctcttactgcgaaaggaaacaaagccaaagaacaactcgagttagtacacattgatgtgtgtagaccaatcaatattcaagcttgaggtggttaagaatacttctttaattttatcaacgattattctagatatggtcatacttacctaatggccaagaagtatgaaactttcaaaaagttcaaagacttcaaagccttagctgaaaataaattaggtaaatcattgaagacacttcaattagatcgaggtggagagtatttagattatgaattcaaatactacctgctaaaatagggaattttatcccaattcaaaacacttggcacacctcagaagaacggtatttcaaaaagaaaaaagcaaaacttagtttggacatggtctaatcaatgttgagttact

SEQ ID NO: 197000 - DNA, 1110 bp, Cannabis indica
tccctacttaacaacaccataaatcaagcatcaaatgcaacaacataaaaaaaactcagtcaacactcgacctattccaagacgaatgggcaaaaggacaagacaccaagatatgacacaatgattcctcatccctatgacaaagatgcaattcaactccataggaacacgcttagaacacaattgagtatgagttggcaaacaaccagaaagtgccttccaagcaaaatggagaaattttagagggacattgactttccacaacttactctagatatcagatttcgtagcagcagcagactaggcccttttttgtatgtcctcttaactgtataaaaatcaaaattctcatgcctccaaaaccaattatcaacaacaactgaagaagtaagggaaagactaagaataagatcataatcccttggctcaaacatatcattgacaatctcctcatcccactccaaatagtccatggccaataattgatttaccttagcatcaacaagactaggatgtaaagatatgacataagggctattggatcaggcaaccaaggaaaattgagaataatcacactcaatcttgagccaatcctaacacaaaccgctgatttaataatatcttgtgtctcaaagatatttttccatataaaacttggattttgacctaacacagtagtgagaaaaagtttcagaggatagtatatggctttaaaaacctaactaacaagagaattctcaaaaagcataaatcacgaatcttgtttaccaacaatagtcaagttataatcacaaagacttttatgcttacacaaacgactccaactcatccaaatgacacctctagaacaatgggaattgccccattagtatttagacatcattttctcaaggtcactacaggtctataaaggaagaagaaatattgatatagcataacttgaaagagcatgagcaacaattttcaacaatacctcatggtctgccttagaaagaaacctaccctcccaactttgtatcttttttgcattttctcgttaaggaaacccaagattattgacttattgtgaccaatgatataagataaccaaagataaaaactattctcatc

SEQ ID NO: 197001 - DNA, 879 bp, Cannabis indica
gaaatattgatatagacataaacttggaaagagcatgagcaacaatttttcaacatacctcatggctgccttagaagaacctaccctcccaactttgtatcttttttgcattttctcgttaaggaaacccagattattgacttattgtgaccaatgatataagataaccaaagataaaaactattctcatcaccatgcccaatcttgtacaaagcctcacatgcaaattagtaggtgtattggaactaaaatagatggagcatttagagaaatttaccctttgcctagaggagatctgaaacagatggagaagtgtaagtatgttataagcctcttctagctccttatgaattgtaatatcaatgcaatttaatatggacttctaattattttactttaataataactatagaatatcgctacacatttatgtggcaccacctcatggtggtattaggcacaccatagtgcctaatagaaatcatcttaaaaaaataatcactcattttgaatataatttaaagaaaatatttatcttgatcattttctccaaaactcataacaaaaacagattataaactattttatttaaaaaaataaacattcattaatcttagatatattttaatagtttcacactttttcataaagacacttctgtaaaaagaaaaatcgcaagattgaaatatcactctgctaatataaaaaaaacttttattttgattaaatgtatcgccgaagaattacaacaataaattaaagagaataactcaagaatgcaacccaaaaaacaataattcactatagcagaacaactaactacttgattacattgtgatgagcccttgtatgcgtatgaacaaagagttttaacaaaat

SEQ ID NO: 197002 - DNA, 598 bp, Cannabis indica
atggtgtaaaaatccgtatgcatatgcagttaagggccaaggcccatgtttttgtcgaagcccataaatccagatctgctaaaagactacagaaggccgaaagttgtaaagcgtgagaatcaaaagaaagaagccaggaaaaaacagcctacacaaccaattttccgatgaccgaccggaccgcagcttcaccggagaccaattccgtggcgtctgacgatcaaacggtcgatcttgacctttcttccgatgttcttgatctaagcagcttccagctccacgatctcgactcgatcgagttacctccgagtctaaccgagttggacctcacggccaaccggttaacgagtctggaccctcgaatcgcaaacctctccaaccttaagaagctctctctacgccaaaacctcattgaagatgccgctgtcgagcccctctctagctggcacgccttgtcggatattgaggttatccaatcccttcctgttgttatgtagaattgtttcttgcttagggttttcatgtccttttcttttcactgtttgttgtttcctaggttaatctttattgcattgattatagcctctttttttttttt

SEQ ID NO: 197003 - DNA, 1230 bp, Cannabis indica
gtcactttcacttctagtgaagaggcatccagtgctatccaggctttggatggacaggtacattttctttttctttcattgtctcaaataacatagtttaataactttgtttagctttgttgagttagtagtctttatttgtaatttattgcttaaacttcttcagatttctttttaaactgtggctactaataaccactactgtcaattacgttctcttgttctttacaaaatgtgagatgctacaaaccaccacttttatctcgttaatcttaacatagtaaagttactgtcacattatgttagctgttgtgagacctatctttaaaactgcacatcattttcatctacaacaaataaagatcaaaataagggtggtgatccatctattatagtgttgatagttatgattgaaaatgcattcaaatatagaatccagtataagtttgaaccaaagatgtgttttggacttctgtatcacggtagatcatatatgtattcttctaatgcctgttttgggtggattttttttctcccaggatcttcatggtcgacgagtaagggtgaattatgccactgataggcgtgctggaggtggtggtggctacggtggcggcggctacggaggtggcggctacggtggtggtggctacggtggcggtggcggtggctacggaggtggtggtggctatggaggtggcagtggctactctggaggtggaggtggttatggtggtgctgctgctggggggagctatggaggcagcggtggtggtgatagcttcggaagtggaggaagttatggtgcaagtagtggtgccagttatggtggaaattcagttgactatggtaacaacactgggagttacaatgctgctgctggtgcccccagcacagataacttctctggcagttttggtggcagtggaaattttggtggtggatatgatgcaagtactggtagcagtggatatgctgggggggacgattctttcggagataacaaaccagatgctcctttggaaggaagttacagggacgacgatgatactaatgactttgccaaaagagcttgagaaaagaaattgatggtggggagtggtgcatattgctttctttcaatgttaagtagactgctcgttcttttcctcccctctcttataattcttttcttttttgttatagcttgttagtgtcttcgaccccctttgtgaccgaattgtttatttt

SEQ ID NO: 197004 - DNA, 945 bp, Cannabis indica
ttttttttttttttgaaatggaagtgagataaatttccacttaaactattgatctgagctaaagacaatcacaaggaaaaggccttgggtccatttatcatctaacacaactattacatattaaaatttcagttacaataaactgaaaaaaaggagaataatagaaattgttctaacagcttctaactaccacaacaagaaaagaaagactttcatatgcatatgtacatgttttcttcaaactcttagaataagttacagattactgcatggaagctccaagacatagtgagagaaaatagagagagaaactggtccaactagaagaagtctcatgggatgggatgatagttgccatccggaaggaagctcccggatggctatcatgtccactccgggtgtggacttcaagaaagtaagtcctcttcagacagagagttctggatggctagatgttcttcttggaaggaaatcccggatagtcaactcgagctaattctttcctatccggatgctccttcagtgagtatctttggtccatgttctcagaagcacatttacttatgctaacatggagatctcgctcaaaggagagttggttaagttggttattgtctaactaacttaacaacctctcttcttgtggccacttactttaggatattgattctaagcagagccggccctgaattgaaataggctataggcgaaaaaaaaaaattggacctttactataaagataaatagtattttcaaaaattattaaaaaaaataaataaatgtttttaaaatgcaattttttgattcaggcccctaaaatgagtgggccctaggtgtgggcctagcccgtcgttgcccagagtcggcccctgatcttaagcctataaatactaccaacacttatcattttgagagacaaaatttagattgagagagagagagaga

SEQ ID NO: 197005 - DNA, 1571 bp, Cannabis indica
tgttccattcaacaaattggatggctccaccattgttatactaaatttgatattgcccgtataacaaaatgattccaattttggtgctgattcaattgtaactgtcatttcatctgtaaacgggttattcaactcaaaatgtttcaattgcttactcgagattctaatgtgattcgtccctaatccataccaattgctcaaagttaaattgtcaaggagaggaaggtttgagataagatattctaatgatgacgactcttccggaccccaataacaatttattgaaagatttctaattgccttgcacactgagagatttattgtgccaaagtaaacaccaaatagttccaaagattcaagattcgccactctaatttgctccactatatccttagtaagttgaatttccaagaacttgaggctgaaactaattatgttgagctgatgatcagtactcaaactacagcaatctaaccgaaacttctcaagtgatggagaacctaacaacaacttatcaagcacatcattatcagcaaacaaaacaagatccattgacaacgatttcaaggatggaaaactaaatgagtaacgagaattcagctccaccttactcaactccaaaatagtcaaatgtattgcgtttactactagtgttttaggtatgcagtagtgctcgttatgatgatcaaacaccattgccctgcttaagcttatatttatttccttgactttgttctgaaccgcaaaagctaaccatttatctaggcgatcagctaagcattttaaatagctatacatctgaagcttaaaactagttatgacagaatcgcccataaaaaacatacctctcttacggtgttccaaactatggtccacataatcgcagaacctttcacagtaccatggcaatctattatattcagtatctaagaaagagagtgttgggactgaataccacatgagtttccaacgctttgaaagaagactagtcggaacgacatccttagtgggaagaaacgacagaatatgtagaatggtggcatcaggtagtttcgaaattctgtcctcgtcttcagcagccttattaatcaacgatgttgctttaactctttttctcgccggacgaagacggttttcttccacgccctttttagccatagaaagttgaaaacgataatgatttgttgactgtaactgcaaaaacaaaaaccctagagaaagagaaaccataaattagaaacctttgattcctattatacaaaatttaaaactttattaaagcatttgcatacggcgtatcatatcatccagaggaaatgaatttctaacatgtttaaatatatgtgtgtgtttttctgaatcgttcaaaacttacttgtaattgcagtagaggagttagggtttatggaggttaacaatggctaatttgaagaagaagaagaagaattgtggtggtctccaacaaaaaaggcagagctattttatgatcacgaaaatgagacaattcaaacccatgtataaaagatcaaaattaatgaatgattctacgtttaactatgactgtaaaaatc

SEQ ID NO: 197006 - DNA, 1574 bp, Cannabis indica
tataatgtatattctcaatttatgaggctaaaacatgaggtagttttcaataaattaacttccttgtaactttctctttgtacgtcgtacgtacgtacgtgcatgtacataaattgcttcaatttcctttttttgtttttttttatatgttttcaaataccaatatttgatttattcaacaaagaaaataccaatatttgatctttcggaaagaaaaaaaaaaaccaatatttgatctcattaaatttccaataattaatattttctcaaagaaataaaacaataatactaattaattttggttttattaaaaaagctaatttataatgaattttacgaaacaaattaatatttttctgtcattcccggaatattaggcttaatacaacagaattactaactattaatatcttctaaaaaatatatatggggacattataattaagaaatttacttttatgcttggaacaaataaaaatgtgaaacaaaataatccttcaatttcgaactgagattgctattttgaacttctctaaaataattaaactcaatcaataggccccactcacaaatcaatagggtggtttaacaataaacacaacacaagacaccaagctatagtagaaaaatgttaaaaaaacacccatagtccgtacagtacttagcatctttatgagggctcttgcctgtgtttttttttcttctaaatatataaaaaaaattaaaaaaaaaaaacttaattaagtagaagaaataagtatctaccttttctaaataaatatatataattacatttatatatcatattgtttttatattttatttcatctttctttgagtgaaatcctaagtccaccaatagagagtgtcactttataatgatgtcctgtaacaatactcaataatactgtataaaaaaacatacattctgtaaccacacgtacatatggcttatcattctttattagatggttaatgcccttcattaaatatgtatttcagtttgtttcccaacccaacaatactcaatattatgtatttttcttttttttttctaagaaaaaattatcttattaaaaatgttttgagtaaatttaatcaataactgttagagcacaacactctcatcaacttttgtactctattttccaaaatatattattaagactttatttttttctaatttttaatatatttattcatttcaaatatatatatatataaatataatattaatattaaaaaattaaaacctcaaacaattaataagatatattatgtgaacaattaataatattctataaatgtaatgtagagcaagaaatagtaaattataaaaaaaatttaaaataagaaaaaaaaaataagagtatatctcatataatgttttaatttagttcattaaatatttttaaaagaactttattttaaaacatatgatgtgaatgaccttagtctataaaaaaaatattaccaagaaagaataatacaaatggttaaatgggatatatagacaggccattaatcacaattatttcaaaaacaataaatgtacaacacaatgcaaattttaa

SEQ ID NO: 197007 - DNA, 1697 bp, Cannabis indica
caatactcaagaatgttcagtgttatagtaaaattaaacttggtgatggtatgtccagtgtacaatacaaatttttcatttcaatttttatatgcggaactattagatacatatatcaataatatttcaatccaaaaaaaattgaggtgagatttagttggaaataataaaataaataaaattaaaagaaaataatttttattagatttttttgtttagttgcattttaaagtattgaaatatctttttaaaggaatgctctttccactattttaatagagtaagtatttcattttaaaattgaatgaaaaatcattctaatataacatgagaaaaaatttaatgattttttatcaattttattatatattttaaattttattctattctattcattttctattcctattcctatatttcaaatattcctcccaaccaaacgtcatgacctgaatattaatcacacaatgatctttcaaaattttctttacatctcaagatttgtatatatcattccagttttaaagtctctaaagcatattatcataaggacaagttttaatgggggtgttattgaattggtatggggttaaggctgaaatgagatggaagagagggttaaaaattcctagttatgctgaccaacaatttttattttatttttattaaaagaaatatattaattggttactttcttttgggtcctctatagcactttattattttgcttccattgatgatgacctaatattccaccagtagcggtaattagtggggtattttgttttagtgtaaataacttcatgaagataaatatgcaaacgaagcagatccaacttatgtcttatttattagtaagtaatgggaatctatggtaaaatacgtaatcatttctttatatttgtttacttactttgttaaaattaagaaaatgagagcttgattaaataagaaataaaaaaaaagaaatattttgctcatgaatattttaaggaatgtcattatgcttattaataagtaataaaaaacaataataaagttgtcatatttttcttacatttatttatttactttattattattaggaaagtgagaatttaattaaataaaggataaaaaaaaagggaatacttctccaccaatttattaagggatgacattaagggtaatagatttttatttatttttattttaaaaaagaaaaatttagtcttttaaaatatgtcttacaaaattataactatcacatagtatagtttaactcaaaatgataaattaatcaatttaagcactctgattatatttcctgattatatatatattttatttatttattttatcaaattattatatatattgtacctttaaattttttgttttgtaaaaacaaaaatatagcatcaatgtaaattttaagaataacattctattatctccaatgatatagcatttatatattttgtcatctagcttttcacctcatcaaaaattctctaaaatattaccattggagatgctcttataatttataacaagacaattttacaccgcgtgagagattgaacaacccaacaagcaatcagtttttgtggttttaccctttgtggtttttccatctagcccaaccaccaagttacaagtgatttggtcaataaaaaaaagttacaaatgatttggtacatgattttaaaaaataa

SEQ ID NO: 197008 - DNA, 669 bp, Cannabis indica
gataagaacgtttagctgctcactaggtcctattataacatataaaaaccctagagatagcaagtgaccaatcgaaaaacttttcaaataagtccaaaatcatgatttggacttaaattcatgtcatataaagattatatgatttgctatatttataacaaaaccgaaaaaagtaactagcaaaagtgaaagtaaatttttctaaatttaagcaactttccataaagagaattctttctcttttatgacaagtttcctaaaaaaaatcacctctaaacataaattttttaaaagaaaaaaggcaaccagttccatgaaattaatataagaaaataccatataattcaaaaataaattaaataatattttaacaactaaattgctaaaaataacctaacaatttcatcgtcctcttcatcttcaatgcaaatatcattgtgttgtcggctattagaagtcattccttacaaatatgagagacaataaaacttaacgataaagttattagtttttatatcttttattaaaacattaaattttacaatggtacgttaaagcacaatgctaaaaattgatgcagtattacaaagtcattctttgtaccaaatacatcacaattttctaattatccagtaatttttttttggagggaaaatacaatattatcat

SEQ ID NO: 197009 - DNA, 1700 bp, Cannabis indica
tttaactcctctaagtaagagcatcttcaatagatatgcaaaattaaaatataatcacttagaaaaaaataagtagtgcaacaaaaaatatgatacaaatttgacacatacaaatattatgtcaaattttgcaaaatatttgctacgacgcaaaatttatattaccatatatgtactacaattgtaatcataatcattaataatatagtgaaattaaaatgagtaatactcaatatttaattataatatagcattataacttctcatattaatataggacaccattagtattctccaacatttttcttgagattctccaatttctcaaacactaagattctatgtaattaaagcacaatattaagtattgttttaatatttgaaatataatttatttttgttttttattttttgtttgattggtatattttgtaaaaatatgatttggaagaattttttaagagtaattacataaaccatcaatttttataaattttatatatttttacgttcaatataaaaaataatatacaaataacaaaaaatcaacataaaaatataccaaaaaaaatcatgttttatgtaaataaaactccatacataccacatttttataattttttaaaattatttttatatatttaatgtaaaattaaaattatgaaaatataatgtatttataaattttgggattacaaataaaactttcccaaatttataagatcaacaatgaaaagtaccaatacttgaggctagctcaagtggccaaaggaggtgcgtgtgtgttggaggtcctgggttcgagtcccaaattatgcatgatgtaatatataaacgcttgaataaaaaaaaaaatagaaaagtaccaaaatacccccaccattaaaatatatatataatatatagaaaaataagtcactatcactatctataaatatatggcaacatatccatctcaaattcatagtctccaattcactccaccactctttttttttttttttttctttatatattaaattaagtatataagttataacaccagaatctatattcgttaagaattaaaaacaaaaaaaaaacatttaatttacaaatctaaaatacaaagtcaatctaaaaagttccaaactatattaataatatattgttatttttaatatattacatatgtagtaaatataaaaggattcgattttaggttcttttatgtttaatatattatatatgtaaaaaaaaattaaaaaagtaaaaatttaattttgggccggttggtgggtgggttcgggtccaactcgaaactcgttgactataaaagatcaattggcaaacctgctcgaaagtgtactgagttggacccaacctgcccaaacagagcgggttttttaaaattttacgggctggccgagtctggtccaggcgagttggtcgggtccgggtcaaaccttgccaaaatgttcagtcctagttagcttcttgggcacccaaccatattttagaagggtgttttgttatggggatcaaggaggaaattagggcagccttgtctatattcttcagccccaaggtcttgcccagatcatggagacgaaccaaagagttgaagagggccaccaactaatgcattcaggctcactacttaagcccaatctgtctaaaccctcttttgggtcttttccactagcttgctccaacaatac

SEQ ID NO: 197010 - DNA, 900 bp, Cannabis indica
taacaccataaaagtaacttggaacattaacaaaattaaaaacaaaaaaaaaaatgtaacaaaaagtaccctaatactttttaaatatcataaaagtaacctagaacaattacaaatataacaaacataataataaaaagtaacctagtacttattttaacattattaaagtaacataaaacaattacatgcataacaaaaaaaataacaaatagtaacctggtactttcgaacgtcataaaatgtcacatgtagcagagtcaacatcgaaaattcgtaacctgatactttttaaaaatcacaaccattacacatataaactattggcaaaaaacaactcagtactttctaaagtaacctagaatatgaaatattgaatttggttgagtatgctatgtttactggttttaatatagaaaataatttgtttaaattgaaaactaaatttttatctatatttaaagctatcttgctttctaaagtaacatggtacatgaaatattgaattatggttgagtgtgctacattatgattagttttaatgtataatgtaacatgttcaaattcaaaaagtagcctattatttttgttttgcatttttatcctattttctatagtaacctagtaattggaattatgaatttagtagagtgtgcaacattttgactgattttaatgcaaaagtaacttgttttctatttttggtaactagaatactaaatttaattaatgtgcgttatttttttttatttattttttttttttggttttaatacaaaagtaacttgttcaaattgcaaagtaacatttttgcacaaaaataacgtgttactttgaaagaaaaaaaataacatagttgttgaattttagacactgtttttgtttcaaattgtaacctgg

SEQ ID NO: 197011 - DNA, 1210 bp, Cannabis indica
tggttgtatattaaagtgttgaaatgttattctaatagaaattatggaatgaccattgcatcattttggtggaatgacaatttcattttgaaatagaaggaaagactattccaataaagaaaaaatttaataacttttttatcatttattttttatgtattttaaattttattccattcctaatcctattctcattcccatttctatgtttttattcctcccaaccaaacgccaccttaaagttttcacgattgtttaattttagaatatgtatttcattatttttgaaaaaataacttgagaaagcaccaccaaaaatataagagctctatgaagctaagagaatatatattcattattatacacatagctttgaaatatatatgtaatttgtatttgtttttaaaatcattatttttgacatatactaatgtatcttctcaatttctatttatatcaaacttaaaattgaacaaaaaaattttaaattcaaccgttcgaaaatataattttacggcctaaaaatttagaaagcactttgcatatctaaattccaaaagaaaaaactctgattagccattcattttaatgcaaatagtgtaatagtgattatagtccacttgtaatccatattcatcatttaaaaaaggtgtaatagtgattacactgtgaaagtcttacaatattttgaaaataaaacggcaaaattgtaatggtaattccattatgattacgattacaccaaaccaaccataacaaatcacacaaaatatacaccaacaatttaattaattaagaatgattcatttaatagtttaaaaaaatatacaaatgaaacgaaaattaaaatcacacaagtacaaccgtattacatgccaattacattaacattcaaatgaatttgttaagtccatttaataaataaacaaataaatttgtaaagagcattgagagttaatcttgaactaataacattctccatttgtgggcattgacatataaatatttatatatatatatatattgtctattaatcctatactattttcttcatcattttattgaaaaagaagtagagtactctaaaaaagaaattacaatataaatttccattattcgataagatcgatcacctaattaaaagtggtgctattagctatagaattttttatgaaaataaaagaaaggggtttaaattaaataaccaaaa

SEQ ID NO: 197012 - DNA, 1130 bp, Cannabis indica
aataagattttttgtagtgtgtgaatcatcaattaatttgagcattttgaaagaaattttttttttgtatagatggttaattttttaataaatgaaaaattaattgatgtgtcaaacataaattggtttaatacagtatgacacacaatttttgaacgggagattttgattcttctattacacgtgtcaaatttttagtaaaaaatattgacgtaaaactacttgaactctatctgattagtaacacttaaccacataaattaagtttttggtggcaaagtgacacttaaccgcaaaaattatcaaaaaatccatttatgtagttaagtatgtcactgatcataattctggtatttttgctgtctatgtctctcactaaaaatttatcacgtgtacacattgatatgtctaccgtaacacataatagagccttttgaacggaatggataaatagttattagaaacaatgtttggagagttttacaatcaaaaaatccattaaaaaaagggaaaaaaaattaaagaaatttttcaatcccaaattaaattataaatttctacatactctaaaatcttttttttttcttcctaaacttacatactctaaaatcaaaatgctgaaaacagtgactttcttaccaagcaagattgcatagtgacccagccaatttttatatatttcacgcttatccataagtgggtcagcataatgaacatatacagattaagatgtggcctggcctggctacagggcacagatcatggatttccgagccgtcctttgattgctcttctcttcttgatcgtacctctctcagtaattatatataatagcaaccactcaagtaagttctttttctttaacgcatcaacctttttcaaattggcatccataggcatatttagacatttttcgaatgaaaatgtaactgttttcactgccaacgttccatgaccaaaaactgacttgactatcatggtgagagagagagagagagaatgaactttagagagctttggagagcttttctcttctgtactgcatattctttctactttattcgtccattaaggctaggcagctaacaccttggttcttgcaaaagtaaaaataaaatcccttgattcct

SEQ ID NO: 197013 - DNA, 528 bp, Cannabis indica
aaaagaagcagtattagctgatcattttctcacaatccaaaacgttaataatcaattagttataaataaataaataaaaatgcctagaccgtccatgatttaagatccaacgtacttttgagttttatcaatcaagattctccaaaacattctggttagaactattacataggcctttctactcaactcgattagaacaaatgatcaaacaagggaaggggaaagaggaaattagtgactggtggaggcacaaataataaaaattcccaggaattaaaaaggatgattaaatttaagaatacagaaataagaaaataaaatttacttaggtttaaaattatagaacgaaggcggagggttgaatctaggctggtttgaaatcgcaaaatgatgcacaggaacgaaattgctagtggtcggtgatgttggaacgaaggaaggaagggcgacgaagggggatggctgaaattgcagggtgcaaggggctcacgatgccaatcttgggtggaggaacgaaggtggtgagga

SEQ ID NO: 197014 - DNA, 889 bp, Cannabis indica
caattaaaatttcaaaattggagacatttgtaacgaactacaaataacctctatcaaactatatgtttcaaagccaccaccggcgtactagggtatgtctttaaccaactcaacacctctttgatgcccaatacttcagctacttttggaacgataaaatcacctcgcatgagctgccactaaacaacccaacacatcacgaacaacaaacccaaccccatatctcctttccccatcaaataaagttctatcaacgttaatcttaatgcatgaaatgttaattgatggagaatcaactcatgtatctatatagaggaaatacactgtatattcactttttatttcttattttaatttttacttttatttttactactctttaatttattacccagttttataggtcatatccctattatgtgcattaggactctaattttgataagttatgtaaggttatatttgacactttgattataaaagaaattatttatcaattaaaattattttacagttaaatttagttaacgtgtaattaacaaaatgcagttctcaacgtatcccatctatatactccctacagctagtaattttcataaatatctaaaatgctaattggagataattcccaagcaactgccttagggtcattcaagtttgattgttaattggagatagaacatgattttaaaaaatatttttatttttttaattaaaaaaatgaaaaaattaattaaaaaaagtattatcaaacacactcaatattcattacaagtatgtattattttctcctcaatctttctggtccgaaagagtagttttctctcgactattgatgctctagtccatgctctaatctcagtttcaatattttttaagaaaaaaataa

SEQ ID NO: 197015 - DNA, 978 bp, Cannabis indica
gcagactaaggctctttaactccccaaccacataaatttactctggtttcattgtttattatatttctttagctttatcatattttataggcttttgacaatctcagtataattttttgtactttcaatgagagttgaagaaagatgtgataccaaagaaggcgtatactgcaaccgtggtagccacctaaaccaccattaataaatcttgtattcgtgatggagaaaatcccatggacgatgtgaatcctaatactcacacaaaagcaagagtcgatggagacccgtggtttgtcagtagaggtgctctgggcacgtttagatgcaaagaaagaacgagctagcagtgagaaggaaaggcctcatggaaatgacctcaaaaatcatatcaacgataaagtttatgggcgtgagttctaggatgacaatataaaatgtctggaagatcaaatagccaaattgaccaagttcacggaacatctttcttggaagcaaagtggggtcatatctaatttaaaaaaagaagatatgaaactgtgtgtaagaagaataatagaggcccccatgcgagaatattttagaatacctcagatggagctgtacaaaggtaggatggacctcagggcctacttgtctgaatacacctgattgatgcaattagcaaaagcaagtgaggatgcaaaatgcctctatttattgttaactttatcgaagtctgccgaagattggtggaagatattatctcccagatccatcagtaactggaaagatttacaaacaatgttcaaaaaataattcatagccacgaaagattatgacatggaggtcagctcattgactaataaaaaacaacaactgggagagagtatcaagaagtatatccaaaggatgatggatgcaccagccaaaagaaaggtcaatgatgacatgaagttgttggcctaaactttacggatatctaccggatccttgttgtgg

SEQ ID NO: 197016 - DNA, 692 bp, Cannabis indica
attccatagaaatatgacctgccattaaagatgagcctactaatcttagaattcctgatagtgcttggtatagttttagacttccaacatagacaaaccaaggaggcatgcgtgggagatcataattcttatgggtatgttcctcttggtatgttatgggtttttcctgactagctgcagactctgaaattttaggagcagcagacattatagtcaggcgatcaccaatcaaattaattccacctttcagctgtgcaacagagtcaaggtatcctaccgaggatgtcctcacaagcttatcaagagaaccagcatatacagaattctgactcaaacaaacagaaaaaacttccaagaatcgagcagctgttacctgaatacgaccatcaagaactatgagcataaagaaaaaacaaggccatccatctaagttgcaactacatatacagttagtacatacaactatggtatggtgtggtctactagttattggaaggcataagactaaaattcacatcattacaaagagaatcacgtacaggagattggaggagccgatcgaccaaaaactggggaccagagtaatatattatcacgagcaattgttgtgcctgtaaaatcgctagagattcatcacttccaagcaccatttttggaagcctatcaatgagtctgatttgaaagaaaaaaaa

SEQ ID NO: 197017 - DNA, 1078 bp, Cannabis indica
aagtaatttagactctttggctcgggattgagattcaaaggagatgcaaaaacatttttcatcccattatactaattggtcaacaacaatgtttaagtgccaaactaactctttggctgtacaattataggaagaaaggctgtggttggaagttgcgtaggaggaatgaaggaaacacaagagatgattgattttgcagccaagcacaatataacaccagacattgaggttgttcccatgaattatgttaacactgctctacagcgtcttgctaaaggagatgttagatatcgctttgttattgatataggaaacacattgaactctaccatgtaagaccaagacaccatgttatcaaaaaatgactaagagaccatgcaatttccttcgttctttttccccctttattgtaacttcatacaataataataatcagttgattggtcctgaaaaatccactttctgagatgtttgaattagtatcattaatcatcttacatgacttgtcaagcaattgagttcacattgaaatagacccttttaaaacaactatgttgtgattcttatgaatatgtaaacgtgtatgatgtgcttgatttcttttgttaattttcgttcaccaaaaatagtcctaaaattttgaaagcatttatgaaagcaagaaaaagaaatgaaagaacaatgcagcacttggggatatgttgaggtataaattgataactatcagtaagtttaagctagaacctagaaatcaagactccccgtcttagaggaccctgaacaactaccagatgagccgtatgaagccccactcgaaccatcaattggggcttgattaagacattccaagaccaaaaatcttcgcttctgtaactttattgacagtgtagttgcctcaagaatcactggaacctgctcacaatatcgagtaaatggacaacaaatcagccctatagctacagtgaaatgaatatgtgtccatttgaccagattaataaaactaccatgttgataatcggtttgtaacaagaatatttgaagtgagatattaacaacaaactcaatgactttaaggtaa

SEQ ID NO: 197018 - DNA, 1334 bp, Cannabis indica
  modified_base (1330)..(1330): a, c, t, g, unknown or other
ttagacaaatcatcatttacaattacttcttaccaaagctcttattcaggtttgtaataatgattttttttttttttttttggtagttttcttgagaaaagaattgaactttagtgaaatttgaaggactttttgttaattgagaagttaattgcaattagggcttaattttatttttaacattagtgtatgattttgtaagtcttcaatatatagttatgtcatgtaatggaaattagcatttttagttatgaaattcaacaatgtagtttcaatgaatttagctatatggttatctggtctatacaattatatgacagactctctactggggcatcatattagaatattgtgaggaactgtgagaaaaatgattatgataatgaataacaatgatataggaaatgatttacttgttaagagaattataattgtttgtacccaatggcgaacgtgtcaaactattatgtgctttactttgttgttatttgataattctaaagtcagtgtatatataaatgggtatatgataatcattattaaaaattatacataaatgttggtatatataattatttagttttatcaatgtagactttgtgaagaaaaattttataggtaagcttttaatgttctaattttgattatagacccaatctatatgcagtattatgatattggtgtggaagaaaaatttctgagctattgaagatttttttagggaaatgttctgtgagttgtggtaaatcgtgtatgagttgtctatgatctgtatattgattataaatatacgttatagcggttaggttttgtatctttttcacatctttgtatttccctcatattttgtaaggaagagtctttgttgtgtggagagggtgttcgtcttttttttgtatttatgtattttgtattgtctcgagtctggaatcaagtctacgaaagaagaataacagtgctacctttgggagaaggttctacaaattttcgggagatagatttttaagtagcaatctctcttcaaggagatcgaagggggttcgagcacttgcattttcaataagattcagttaagtgaaatacaatcaagcttgcgacatataataagagggagtctatttatacataagtcaattactttgtatatttttaaaacttatctaatgaatcttataaaaactttgtgtacttttatcttttctgcactttttgttttatgttcttttctgcaattattaaattatgttttgtagctattaaataactgttttattcattttttttttcacgggagtattcgttatgcttacaacatcatctctgtaaattntata

SEQ ID NO: 197019 - DNA, 842 bp, Cannabis indica
aaaaaaaattaaaaattctcttaagtaccaaaacagataagtgatctactgaaacgactctatggcgtaaaatttccaatataaataataaaaattagcataaagtgtattaatttgttagttggtcatattataaaatgtaatatggtcaagctagacgacgaaattaaatcaaaagaatggaaaatgtgtcaatattaaaaaagacctaaagaacatgatattgacaatggaaagaaaatcatactaactagggtttttatttggaaaagatttttgtgggactttaaattgtctttattagtggcttgaaattggtatcaaaaacctaatttgccaccataacttttgataaagaaagcatcaacatagaaaagaaaataaaaataaattaaagttgagaaaattaatggagaataaagaaaaaagggctttcaactatttaattctactaaagaagccatgaaataatgtgatgttagtactaggaacgtactttttggaataataaaagttaataaatcatttatgaaataataattatcccatttatttgtacacacaattcttaaatttccatttcatgaagaaaaaaatatattagcatattcaatgattttgttggttagaattaaagtcaagggatttgttaaaaaaaaggaattagtcaaaggattagtgatgataatatataaaatcacaaaattattatttttactccaactgcaagtatgtgtaaccataatcggttaaaatagttaacataactaatatagggtttgtttggtacgccggattacaatacaaatagtgtttaattccaattaatttactattattag

SEQ ID NO: 197020 - DNA, 1005 bp, Cannabis indica
ctaatagaaatatgttctaataatgatagtaggaactgttcaacatatcctcacttcttttcagtttgtgattatgttacttcctcaactatttttgtaactatgtctttacttttcagctctcaaacagtatagttggttttacaactaaccgaaatttcattctgatctgtattattttcaagaacagaggaagagagcattaaaaaattgcttgacacacttgacaaaatctggtgcctaacacaagtagattcaatggcaccttccagtggaccaaggctttccgggatgcagaaacaagttctcagtctgtaccgggggtttctacgagcagcgcgttcaaaatcagctgaggatcgacacaaaatcgaatcttttgtgtctgcagagttccgcaacaatgcaaaggaagtagatcgcaaaaatttcatttacatcgagtacttacttcatcgcggtaagaagcagcttgatcagctaaagagccgtgatacggttggtttatcttcctttaatgtcaaaacacaacactaagctttgaaatgagaaaaaagaactgatacaaattcaccattttctttagtggattatatcaagggaagaaagtttttaatttgtgtattatttgtttacatgtatggacctggaccttattacctcttctgctaaatgtaaggaaagtacatccaataataatggaaatggtttactttgaaattaaatccaaatccaatcaacaatttgttgttcaattaatttagaataattttcaattaataattgatcaaactattttttaaacttgttcttttatctaactaatatctgagtttcatttcatcaataactataaaactttcatgtcactctaagattatagaaattgatttggagttcaagttttgcttaaataaaactaactcctacatgtaaataagaaacttaaagaatttttgttctaagtagtttaacccgttccttcttatatatatttatttattt

SEQ ID NO: 197021 - DNA, 1480 bp, Cannabis indica
ctttgaagtttgttcaacgaaaattggctcaagaaataaaggagagtgatcagaagtagaggtttcaagattaaaaaatttttgcaccttgaaaaaggagagaccaagcttcggtgaccattactctgtccaggcgaatttcaacccaaagtgttgtacctctgctcttctcccacgtgaaagggtaccccgtgaggtctaaatcaaacaaatgacaatcgacgagagatttttgaaagccttccagaagccatccagggtaaggttgtccacccttctttatcttcttgactgagaatgttgttgatatccccaatcacacaccatggaagagatgaagaagcggctatggtacgaaggagattccaagtctgttctctgcgatttctattcggctcaccatagaaaccagtgagtctccagcttgggtagcccactttgtcaatcctaatatcaatgtgattattagaaaagcccaataaaacaccctcttctttttctttccaatacaacactaagcctcctcccactccttgggcctcaacacaaaaagaaccttcaaagcccaattgttgacccacccattcagttctttttttattacacttggtttcacataagaaaataaaattaggtttcttttgagtaacaagctccttaaggaattgaaaagtccgttggttcccaagcccccggcaattccagctcaagacattcataatgcttggcgggtctggaaaccagaacccgccccaaacaagttttttgagctatcctccccttgaccgtccatagccacatcaccatcactcttttgattagtaccattatgttgtttttgtaaattgtctaaactaggttcatccaatttattaaggtccggcccaatatcaacataattacccagcccatcaaaagtccttctccttttagaatccaatatcaacaaagagtcaatcccactattctctccaataaaatcctcctccacgtgagcctttgacttcccatttgacacttccccaatcccatccgaattcattgtctccatctccattaacggctcattattacgtgtcggtactaatcttcctaaatcagtggagatatgatgcatctgcacattgacaccattgattgcaccattcaatgttgcctgagtattggccggagttccaggatcaggttgtttcataaccgcccctgatcttagccattgtgctcccatggtgtgctgtcgtcgtcttggggctgccttcaaggacaggtcttattccttgactatcaaatctggtggcgtatcaaagagcttcttacagaaacgttcagagtggccaagaacaccacaaatgaagcagaaggtagggaggccctcatacttaaaaaccagagaacaagattgaccactcttcttttcaagtttcatttttttctttaggggtttatcaatattcatcttcacccgaaccctcaaaaaatc

SEQ ID NO: 197022 - DNA, 1498 bp, Cannabis indica
gtatgatcaaaagtaaaacctagaacttaacatatgatttactttcttttttccattcaattttttttttttaaaaaaaaaaaaaagacatataaaaactattcagaagtgagagagatatgatcgtcatgatcccaaaacctgcaaatcccattcaatgcaaacgtaaggatcatgagtctacatcttgtggatgcagctttggaatagaactaggtgagaacacaggcaagcccggaaactgctgatgttctgtggccacaaaaggcggctggggtatcagatttgtggacgaatacaaagcattaaagttggggagtagatgattactgctttgttgatcttgatgatgatgatgatggtctaataataattgttgttgctgctgttgatgaataagttgcctttgttgatcagtacttcgctgttgtttgggaatgttaagcttttcgccttcgatttctcgatacttttcgaggtaaactttgagagggcctacatagttctcgaaacctagagttgtgatagcccagatgatatcgtctccattgattgtcttcctcttttctctctggcatttgtcggaggcttctccagtaacgaagcttatgaactcagagacacattcttgaacggtttcttttgcgtctttggagatttttccgtttccagggatcattttcttcatgattcgaccaacgttagctatggggaggaacctgtcttgttctttgttgtttgtattgatggggtgctgagttttggaagtattagtagtggggttgttctttaaacataatgggctttctgggcttcctccgtcaagcccacttggcccatctgagtaactttggtggtattgatgatgatgttgattatgatgaaggccatgatcatcattcattttactctcttactggtgatgttggaaaaatgaagagtgatgattaattgtgatgtgagatttgtatttggaattggggaataaatggaaagataaagctaaaaaataggcaagtgaagagggaaaacaaaaggaaaggctgaggttggtttttcaccatttaagtcccagggactcgttccatctgttgtacaaggttatttaattaactattgtgaagacctaatccttgctataagctaacttgttgcttaattaatttttttatttttaattctttcttaaataagtcaaaaggaaaaagactaaatcataccccatgtcccatgacggctgcaatcaccattttcgtaagttgcaatctgcttattgtaattttattatttattttgcataagttagaaaattacaagacaatatgatttctataatacacacgtaaaacacttataaaaaagtattatggaattgggctttaaaaataaagctaagtgatgaggcccattcaatcaaatcagatagtcatgactcatagcaaatcaactaaaaaggcttttcaacaacatgtacatcattttgcccaaattgaaaaga

SEQ ID NO: 197023 - DNA, 1677 bp, Cannabis indica
ttttgtagccacattataaaccacattgcaactaacaataggaatcaactactatattaggacaactacacttgggaatcaaagtgagagtaactaacctttgatggtataattcttggtgattgacgttcgtcaacttttaatgtcatgttgggtcgatcagccctatatgacttaagagttatcacctcactctttcacctatgcgttaagttcctaactaaaagtggtgtaggctgtcttaagggaaatcagaggactgcacgagaatgctacaacctcgctttatctaaggccaagaaggaagacacctccagttagagttcagagaaagaaaaaggcattgcccaatgggaatttgcccaaggcagggacaaagacatggatccccgacttgaggaaacaaatgtaaattttggactagtagaaaagctagaaaaagtggagattgatccagccatcccgacaacgaaactcaaaattagcaaagctctgttgcttgaaataaaattagctttaatgaaatttctaagagcgaacctaaacatttttttcctagtcacatgaggacatggtcagaattgatcccactgtcatgtctcatgccctaaatattaatctagacttttgtcccgtccagcaaaaatggagattgctagacaacgattatgcacatgcaccaaaagaagaggtagaaaggctttgcacaaacatatttatcattgaagttttctacctagcttgggtgtctaacctcgttctagtgcccatgacaaacaacaaatggcgagtatgtatcgacttcaccgacctcaataaggcatgtccaaaggactatttttcactcccaataatcgatcaactcgtggatacaacaatcgaacatgaaattttaagctttatggacacttattcagggtacaactagattagaatgcatccacctaaccaaaaacgcacaagcttccgaatatacattggtctgtactactatcaagtcatgtcgtttggtcttaagaatgctggagttacctactatattaaaatgttcagatctataaatattttttgactgtttaagtatattggtttaatagcttcacgcatgtgaaaatagatgtttgcatgaaatatcaaaataggttgctgaagtgtgttggtgtgtttgttattagttagtgagatgtatagttagtttgttagtttattacaactaattcttgtaactaatttgttgaaccgagtatatatatactcatcgtaaaagcatgactctctaatcagaaatacaatctctttatttcctctttcactatgttaatctctgtttactaaaatggtatcagagccaagaagatcttgagctcttcgtcttcctttttcctattttttatcttctttctttattcttctctttcttcttgctatggcgaagggaggagcagcttagactcgaagcaattcgaatttagatgacaattctaaaaatgcaaatcatttgctactgatccaaatccaagatttgatgatctctctcatggagatcatccaagtgtaatgcttgtaactaaaattctcactagatctgaaaaattacaagtcgtggaagatatcgatgcttgttgctttaatggcgagaacaaatcaagtttatagatggagattgccacaacctga

SEQ ID NO: 197024 - DNA, 613 bp, Cannabis indica
aaataaaaaaaaatgtattttaatttctatatttaaaaactttaagaataaattttattgaaggaacccttagttgaactaaaattaaataagttcttctcgtaagaaatttaaaaatatactatatttttaaaataatttaataatgttagtaatatatattttaaattttaattttttgtgtgcctctctaatcgaaaacatattaccaccaaagggtccatgcctctcaggggcaatgaagtcctctgtggaataataaggcgaatatcacgaacacaaaattaatgatagttgagcacaaaaagatgcccaaacaagtttgagagaataaattggtgggcatcactaaatgaagatgggtctcgggggaatcagtgacttgggataaacacatatatttggacgactttactcccttgggaaaaccatgggaagctggccccagacatttttcgaacacgcagatagctggagtgaaacctaaaatagtaggatactcaaggtcgatcttgagattgggtaggacttagaaaaaaatattggccctttataaaaaaatatatggtatttttaaaatcactaaaaaatatgtatatttcaaaaaaaaaaa

SEQ ID NO: 197025 - DNA, 1534 bp, Cannabis indica
atgtgatttttaattggtattggaaaaaattcatcaagctgagacacatgagatagatctgaggatggaaaattaattgtataactcattattataacatgagaaaatggattatgccaagattgtgtggtgtaatatattggtgccaaagcatcattcgtgagaaatattaaaattaatgtataaatatttgttcttaaaagaattataaatttttaataagattaatgagataataaatttaattttgctaatattgaaaaaataataataaaaaaaatccactaagccataacattatctcaacttataaggctaactaaaaaaaatctcactaaaaaaatatatttaaacaataatatttattcaaaagcccatagattttcctttctaatggcttcctcttcttcaggagtgaaatcattttctatattgaatgtcttcctaatctcctctggggtctttcctttgatcatatcagcaacagtttgacatgttaagtcaagtaaatccttgatgttaagataatttgcagcctgaaataatgtcaattaaaaaattagtaattactaaaatagaaagaatgattccaataaatgtttaatgtagtatatatataccatgataagatcataaagtgtggcttgatcaactttgacaaagtttgcatcccaagactcgagatcaacatcattaggggaatcaatgtgcttcttacagtattcgatgaccatggcaagaatgttggcggtgacattaggtacaggaatggcattatcggcgcaaccatcttcgatcataaacttgatcatttgagattgcatcgcaacagtctcttccatctcaaacgattcaccatctgaactaatcaaggtgatcttttttgaggacgacgatgatgatgacatcgctaaaacatttgtatttccttttgtttccatgtgtagaaagtagtttgaacaatgacaaagaatttctttttggaatagagaacaagagaatgatgatgagaagactctttctccttgcttttgattatttataggagactaggaaggaatatagtctcgtcctagtttcatttggaatagaatttatttagtttaactttaattacttaattatcttttatttttggactgaattttaattaaaattgatagtataatttagatgtatatatatataaaaaaaaaaaaaaaaaagaaagaaaggtttacgtttaaggtgagttggactttggattgactgtttcatagttttttattattattcctttaaaagatttttccgattcagttaagaaaattaatttattaaatgaaaataataaaactaaaatgataaaattagatattataatttcaaaatttaattatcctttcttttaaaaataatataaaggctgaatgttgttcgtaattttgttctcaaaaaaaaaatattattcgtaatttttatatcattttttaaaatgagtttttaatattattgaaataaatagtcaatacattattatttttttcaaaaaaaa

SEQ ID NO: 197026 - DNA, 1676 bp, Cannabis indica
aatataaatgcttctttcccttctttatatactatcataaatacacacagcagaattgagtgggcggcttaagagtctgccaaattttccaacttttgactattgtgcatacaatctattattatgccacgtttcagttgtcctatatatatgtatgacacaattctctattgagttcattacataacattgcctacttctctatctctctcattctatataataaagactagacacaagagtcgttatcaacatactgtattttgggttttaacttttaattcagtttcagcagaggacaataatggctaacgctcatcaacagcagcagaagaaggcatatggatgggcagcaagagatgaatctggcctcctttctcctttccacttctcccgacggtatttttatattactttcttaaattgacagttcaagagtcttcaagatttcacctgctctgtttttcatctttacaattacaagaaattaaaaatgaaaaggaaaagaaaagatctacaaaagaaagtagacggttcttcaattgatttcttatcatgaatcttggttgaataatatatatctgataatgcatgtcaccaaaatagaaattaagtcatacttttttattcttgaatttatatgaaattcggttctggtttttaaactggggttttggtctcttcttttttgtagggatgctaaagagaatgacgttactttcaaagtgttgtactgtgggatatgccacacagacctgcacatgatcaagaatgactggggaatgtcttcatatcctctcgttcctgggtatgtaataatattatattataaaacttatatatcatatattttggttatacagacttatgcatggtcaaagtcttgacaaattgatggcttcaaaagtggttgacttagatttcggaacattaactatttcgaaaagaatatgataatgaaaaaagaaactctcaccttataataattttaatatattggacaattaccttttactttataaatatttgtttacttatttagttattttctttttttgcaatgattataaacatatatttctttcaatgggagaatatgagtgtaattcttgccgacaaaatatgtgttaattttttgtgaaacaacgcataaacacaggcatgagattgttggtatagtgacagaggtgggcactaaagtggccaaattcaaagtaggtgacaaagttggaatcgggtacatgattggttcttgccaatcatgtattcaatgctcaaacaatctagaaaactattgccccaaaatgattcccacttgcggtgccacttaccacgacggaaccaccacccttggtggcttctccgatgtaatggtggcggacgagcactttgtggtccgaattccagacaatctaccacttgacgccactgctcctctcctttgcgctgggattacagtattcagcccattaagatactttgggcttgacaagcctggtaatcatctgggtgtagttgggcttggtgggctgggccacatcgctgtcaaatttgccaaggctatgggagcaaaggttactgtgatcagtacttctcctaataaaagggaagaagctgttcaacatcttggtgctgattcgtttttggtcagtcgtgacaaagatcagatgaaggta

SEQ ID NO: 197027 - DNA, 1053 bp, Cannabis indica
atatatatatgtaatatatatgaacttgatttacattagtgtcctatgactggccacaacatgtttgttttagtgtacattattaaactataataaaaatgggttgttagagagaaaaaaaagagagagactatattagaaatggggtatattttgggccctattcgaatatccctttaattaatttcttattgtaaatttaaacattggttttctggggttataatgattaagtttaagccactatttttttttttttaccaaatttgcattaataaattgtcaatcaagtttaattgcatgatattttatatatataaagaggataagccttgaagcacacgtaagtggaattacagtcatactgatcatataaagttgcatggtaataattaattacattatacatatatatataacttaattaaaacctcaattccagaagggttggaaagaatagtacaaatgcatatcaatattttatatatagaagtaactgtaaataaaaaatacatattatatagttctttctttttttgggcatatcaaaattattttatatagtcatatatttatataactatgcatccatttatgggaagtaaatatttatataacatggtatgtatatatacaaacatatctttgcctagggaacaaactaaagtagagattcaatttataggagtttcaacaaaaattgtataataatatataaggacgtacgaacaaaatacgataatatttccaatattctaattaaccaccagcttcttgctaatgataagaatcatttttactgcatatttattttctcgaaattaaatactcaaaaaatatttgtaaaaagaaaaaaaatcatttatatacattaataacaaagttttaatcccaacaaaaacctttggtgtatttagacctattatatagttacaaaaaggtattccaagttcaaatttgatcttattgtcataaaagatgtcatttattttgaaagaaaacgaaacaattttattaaaaggcaagtaagttttaaaaggcgcctcaaaaaaa

SEQ ID NO: 197028 - DNA, 1483 bp, Cannabis indica
cactaagtgagatgaatctagctgcataagtccctgcatgcattaagctaataagggaatttaatccaacattaaatcatcgaactgatagtaaaaaaaacaagtcatttatcaaagaaacaaccccaactgccaaacttatccaagaatcacagaactttgaggaagacgttgtcaaatggccattgccacagtcattgtcctcaacaaattcacacacacacacacacaaatgtttacagaatattagaatacaatgtttaaacaaacaattttagactctgtttttcagtgtctggtgtaaatatctattaacataatagggaacagattttggccagacaatcaatcatccaccggatcctgaggagtttcacatgccttgcgcttgatagtgatgactgggcattcagcatgttttacacaaaattcgcttacagttccaacaaaaaccctacaaaagcaaatcgaaagaggctttacttcgaggaacaagtagacatagggcactattttttctttttttaaaaaaaagttagtaataataataactgaatactaagaactgagatcattacctctggaagggaccaagaccacggctgccaacaaccagaagatcaggctgtgtacgtttcacctcatggcagatcacttctttggcatcacccctcttaacccatgcttcacaagcaatcttaatgcaaaccagaataaacaacattaattgtgaaatcaatcaaaagtaatgctgtgttattcatcaatctaatctaggatgaaatattggataatattaacatatcttctatgaatgtagcagtgcattccaagtttaaaataatgtgggatttttctaaaataaaataataataattcgggattaattctctaaacaagatccacatcagcaaatcaaacttaagacttcaaccagctaagtttgagaactttcctttcttggaaagtagttaagttggttgggtattagagcttgctatttttagtaagcttatctctatatatatcatggatcagttttttaatcttcacaaaaattatgaaagagttttcactaaaaagaagatcgttttgaaagaaaagttgtgttgattgaaggtgtgtcaaaggacttgggttgggaagactcaaaatatcttgagagtgatctttgactgtaagagtatatgtgtgatctttgactgtaagagtgtgtgtatgtgtatctgtgatctttgactgtaagagtgtgtgtatgtatatctgtgatctttgactgtcagtgtgtgcctcattcatgattcatcagtgaatcgctcaactcaaattcgatgtgtaggcttttaggccaaaactagtacatcttgatgtttttagttttgtgtctttacttagctgctttgttcaaatgtatttggtttgttatttggaagattgaaaaaaaaaatcgcttagtactggctaccatctttgaagtgatcta

SEQ ID NO: 197029 - DNA, 414 bp, Cannabis indica
atactatataagatgtgcgtattacttattttatttgactctcatttgagattttttggccaatgtgtacagcttttttattagtgatgttggatctttgacatttttcaaaaaatttacaaaaattttgacgtttacacaaataaatttctcgatttggtattacggaattcttttatatataacgttcgatcctgtggtatcttaaatatcgttcattatacccacatttgcatgcaaaaaagtgaggaggggtgtattagaaatagtctaatattactaatgtgtggaatttataatatcatatataagatggatggactatttattttattatcaattaattttgagattgaaatcccaaacaccttcatcttaaaatctaacaactcttaggtagcgtttggttagagg

SEQ ID NO: 197030 - DNA, 770 bp, Cannabis indica
tttatttttgtctgagtctcaactttctcaccccaaaaagaaaaatataccactctgctatgtaccatctcatccaacccagtgccactactatacttcttttgctggttaaaggaacttcttgtacggtcatcacatttgtttatatatatatttacaacattaagtgcacacatcatcacttttgtctatattagctacagtgatgtattttggtaggaatattagtggaaaaattatagcattgatttgtgatttattcttttgaatggtataataggaataaatgatgtgtaaattaacaaaaatgttttttatttatttatttattttggtaatgtaagggtataaaattattggggatcaatctaatttatatttgaataagtaagaattgacttgaatataaacgttctaattattttattaaagcaaaactttttaaaccgtgagaacttatattaaatgaagacagggtgagctattggcctaacaaagtggaagaagagggcacaacaaaaataagggtataagggtaattttatttgcatataaatggtgtaaatggtgataattagataggtgtagaaatagtgattcgaatttctattaagaatacacacaccacactataaacttttaaagagggcgtataaataattaatattaataattaaggaaaaaggtagtgtgtttgtatatgggacatgctgcgtacatgtctatgcatatataagcatgcgctgtcccacttgcttgtgttccattat

SEQ ID NO: 197031 - DNA, 1183 bp, Cannabis indica
tataatcgatttggctttaaacatacccgctcatattagcatgatacacaatccaaagaaaagaatatatgaaaagctaccatttcaatttgaagaaaatctaaagtctttaccggtcagacgaggcctcaacgatcacgttgacctggtcaaccaaaggaacagcattttccgaacccatcttcgtataattgagcttcagaccagttctaaattcctaatatcataaacaaacaatgttttagaattcaaagtttgtctatgaataaatcaaagaatatataatttatatatatgtgtgtatgtatgtaatatacgtacctcctgattaaaaaaaacaaaaaatgcttaattacaagaagaatttggtattatgatcaactaagagaaataaatgttgagaagaaatcgaaagggtcttgagcaaaacaagagattgtatacttatacgtataaatatggtgagtgtacatatgtggattattattatttaaaaaataaataaataatttggattattagagagttagggatgaaacagagtaaaggaaagtttgggggagaaggatgtggagtgtggcgggagagaatgagacacaagagggctcgtgttcagagcacgccttactagtgcaatgagacgtgtcacgtgagaatgacacgtgacccttcttccttttcttttgatgataagattagagtccgagtggaggcgtgtggcagtcacaactaaccatacgtaatcttcaattttttaagacgacgaacagaagcgtgtggcatccacaagcaaggaaaccaaaatcatatagctcttctattctaccaaccttgtatcctaatctatttctatatgtatcataaaaatccccaactgatttcatgaattttacttttacaacattgatcaacgtggatctcacatattttaaattctatatttatttgcaccaagtaacaatcacattttatttgactttttcattttttaacgaatatttcaaagttcaaacattaactagaacttatttgcactgttttttttttaaaaaaaaattgacataaacgaaggaacagggctaaagaaggtttccttccttactaacaaaccctgtatcactaacctaagccgacaaaatcaaaccattactttcacacatactgatagcccaggcccaatagc

SEQ ID NO: 197032 - DNA, 575 bp, Cannabis indica
aaaaatgcttgtgcatgtttagtgaaccgttttaatggtagtgcattaattatagaagcatctgtaagtttttattttttaattattttattatataagttgtagaaaacaaatatggagatactagggtaactaattatcatcttaaatatattcggccaattgactgcttgtttgtttgggattaattgctttttaaaaattaagattattgaaacaattaagaattagtggaaaaaaaatctcaatattttacgtttcgttaaataataaatgaatttttgtattaccatccacattcgatataaattcttgacaaaatatgaataaaagaattggctttatatttacatattttctcattaatgattccgaagaaaaagttacacatgcatgaaaattgaaatcatgcaagagtgacctcagaaatgaaatggttgaaacatatgcaagcaatttttccgcgttttgaagttggtagttcagttggggtaaggttagaaaaaatgccatcgtcacaaaagctactaagttaattaatttaagaaactgggacaagaaaataattccaaaac

SEQ ID NO: 197033 - DNA, 1815 bp, Cannabis indica
aataaattatatagtcttcttctttttttgatcaaagaaagtgtcacgaaataacaagaattccctcataaaataatatctgaatattccagttgggtaacagtctgtcttgtgtgtatcgatattgatcttattagccatatacaaatataaacatataacataaatacattaattaatatataattaaactaataaaattagagattaaattattaataccttagtagtaggaaaagttttgtttatagtgagggatactctatatatatttagtaatgggtatttctaaattctaatttatttatattttgttggatcgatctttcataatcataacgattaattatcataggcaaagttgttattactcaattttttttaaaaaattatctattgatatatactcattgaatagggtgtgaaaagtaacatttttcaagtttttattatcagtggcggaactaaccgtgaatgttaagagagacatttttttttaacaaatataattaattaataaaaaattattattatttttattggaaataaaaatataatttttttggagatataaataaatatattagaataaaaataaaaattaaattattttatggaaataaatataaaaaatatagtgaaaataaaaattgaaaaattataaatttaatagaaaataacaatatatgatgacaaaaataaatttttgattttatgggagtaaatatgaaaaaatatatatatataaaaataatttatcaaaaattgagtggtgccgaccccattcctttgcttgtcatgatactttatagttggctatttattggtcttagaattttcttttattatttaataacttgattaattagcttaattttgttaatattaagtgatatcgtgtttattaaagcacatttaatatttttaaacttattcaaattcgatctaattatatattagatgttacattttaccatccaatctgattcaattaaattaagtcatcagatcaaagttgaccttgagttgaaatagatctatagaaaaaaattagacccttattataagaataaattgtatttttaatttttttttaaaatatatatttttatttgggcccctaattaagattggtggaccctagacgcgaacctagttcaccttagccaagaaccgaccttgcatttagtcaatcggccaacatctaatatagattggattcattctatcaattagatgtattttatgtatatatatctattgtattaatgattcagatttattaatccaatattttagacttattattttttaaattgctttgcatcgaatccatttaatttttggatccaatattatttgattaaaaagagtaaaattttaatcttaattttcataaatgtatatatattttaagtataacaacataacatctaaaaactcacattaaatgaaaatactaatgagtttgattgaatatatattgaattgcattaaatttttagacacctcatcgaaaattaaatccaatctaattggatattcaaaataatatcatgttagaaattattaataaggccctacactatgaaatttcatagtgtaacatatcaaatttgatccgatcacaattaaatattcaatattttgcaaccaattataattaaattaaatcaatttatgcacatttaaattacttattaattgaaattttcctttactttaaaaaaacaataaaaaaaaacgtaaataatgagtcattaatatattccatcgacaaaacagaaaaaaagaaggaaaaacttactattgtag

SEQ ID NO: 197034 - DNA, 975 bp, Cannabis indica
actaagtacctaagaggcaataacttctttgatgtcgagcctaaatcctcggactcttgtatttggaaagctatgctgaaatctagaactctcctctgtgaaggtttgtgtaaaaggattggggacaggaggtctacatccatttggttcgattcttgggttccaacaggggatcataaacccatcccgctgaaggacgctacccagggggctaaccttgtccattatttcttgaatgacaatctcacgtggaatattgatcgcctcaacaactggtttaggaaggaagatgtgaaacatatcttaaatataggtcttccggcccaccctcagaatgattcttggctatggcttggtgaagaaagtggaaaattctctctgaaatcggcctatcgattagtaaggaaccgttccttcgcttcccagtcaaacttgatttggaaggacttgtggaattcccccttacacccaaggctcaagcttttaggatggcagatcttaaggaatgcgcttcccactcgacaaaagattgggggattttttttctatacagaattccttgtgtccactctgtgatgaagaagaggaatcgagtttccatttgctctggcaatgtcagtatgcaaaagctctctggtttggcagtctttggggcatcagaattgaaggaactccaagtcgggactggaatgagtggctgatctggttcagggacagtgcaaataggcccctcaacctttgttttacggaattcttactgggtgcactctgcacttttgacattatctggaaagttcggaataagctgttacacaactcggtgaaattgggaatggcggaggcaatccagcaagtgtgtcgccttttccaagatcataaatccacttctcatgccacgctgcgaaaggaaagaattatcactacccccccgaggattggatagcttgtttcacggacataattacagccccggat

SEQ ID NO: 197035 - DNA, 2384 bp, Cannabis indica
cttccatcaattgtaaggagagcagattcttggtcagtgcgtcctgggctgctatcagatcattccttgccatcatatctgccttttgtatctcaaaaaagccttcttggtttatctttttcaggattggtttcagccttttgagtttagaaaccactttgaacatctttgaaccattaacattttcctgccagcattgtctcacttttgcatcaaattctggggctaacttccacatgttgtagtacatgaatggcttcttccgtgagctccaatcacgataaatagacacaagaatggggctgtgatcaaaggataattcaggaagaaacacaacttccgaatccggcaaagcacaactccatttcgaattaaccatggctctgtctattttcgataaaattctatcatctggtttttgcttattgttccaagtaaaaaaagagtctgagtacttcaaatctatcatctcacaaacctccatacagtcccgaagtctttgtgaaggattactatgagctttcctaccaactctctcatttgcatataatatctcattaaaatctcctaacacaatccagggctcttgtataccagcagctagcttctccaaatcaccccataattcttcccttttctgctcatcattgaaatctcattaaaatctcatttgcttatttccctaaactaacaaaattgcttttctatttttatttggtgaaattgtaattccattccattacttactaattcataccctacttacccttttttctcatttggcatatccacaaattttctctcttccactctagttatggaccaagcccagcaaactctaaccctagaaatttgaatattaatttgtcgtcgatcatactattgtgacggtcttcttctcaaactcacaccgcaagtaccgaccttcctttgttgcttcttctttgctaataacagcttcatcagttacaaggtaaatttctctatccgctgttcttagactaactggtttgagttttgtaatcttaagtttgaaagtggaaattattttgcttgtttttatctgattccatgctttaagaaacaaattaatggacgagatttctactcttacaagtcttattatccatattattgaatattattcaaagaaggacctttgttatttatttcctactactatatttgattcttggctatttaacttagttacttatttcagtttcttaattttggattatagatttttaacaagttgtaactaatcatttagtatgtttttctatcatccaaaattttacttcatattttctgaggattatgtttcaaatcaacatccttgtgtattgtttctaattttgatctgttagaataaaatatattttctactttattggcggtgaagtttcccaatcttactcacacctatttgtagctttttagttgatttgattatgtatatgcttttagtttctatcaagttaatatatggcatacgtgagagttaagatttaggagttttttcatgagaaatttgttaatatgatcttgagctgaaattttttatatgatcctgttctatgatagatattcacaacatgtgtgatttagtattatttttgtttttcactctgcttaatgtagatgatgcttttttttttttatgtgtaaaaataattagctaattaattttaaatttcataataaataaattgatagttcaacttaatagtgagagagagagagagagatttgtgggtctgacagttgagaggttgagaaagaaaaattcatggcccataaagtattaaatctgtaatattccatttttagttgtcaatttgaaaattgcatacttgtactttctgcgtacattttgacatatatagggctagatattgtaaaatcacaggtagttttatggaagaatattagatatttttgttgaaagagttcacttacatctgcaattacttagtttgttttatcatactccctttatattgattcttcattaatataagtttgtatttttatttagtttgttttccctttatgattgttcattaatataagtttgtatttttatttagtttgttttatcatactcccttatatattgattcttcatgaatataagtttgtatttttattttttttgggtgttgaaaaacatgcctatcagccagcttcaattgtgtttaaattaatttttattttctctcaacttattactgtatttcttatgttttagttatatatatatatatatatatatatctattatactaggcaaagttacgtgcaatgcacgtatatttagttatatacttaatctgaaaaagttcaatgaaaatacaaaaagttttaaaaatagtaaatta

SEQ ID NO: 197036 - DNA, 1099 bp, Cannabis indica
catgatccaaaatagtatttaccgttaatattttgatattgtaatatttgtaatagttgaataagagtaatcttgtcttagtaccaaagtcaaatggctcatggtgcacatgcgtggaatttatatatttaaataaatcttgtcctaaattaatcataaagcccattctctgaaaagctagggcttctttgactccgatctctgaatcggagctatggctagtcatggacgtccgagataggaagttttgaaagggtcggataataggggtgctgcagctccaaataacatcaaagggaaaaagaaggtgacatggaatgatgggaagaagaggggaccgccttcctctaatttagtcctcaaaactaaatcaaatggatgttgtgcttggaatcgagcctattgatttctcagatgcggagacggaggaggaagctaaggatgtgcgaataggggatggtgaagatgcttcgagagttcttctgctagagattcatgaattcttccctgagcctctctcgcctaaatcttctctgagatctatcaagcagcaggaagatatcaggaaagattttgtgcaatttctggaagctaacaatcggtgttctgagaatttagctcaaggtaagatatctaatccccctattctacgttctggtagtgtgaaacgcaatttgaaaacttctttttcgaagtcagcatcagctagtaagattaaaattactattgatgatatacatgaaattgaattctggaagccttcaatagtgtgttatgttttgggtgcaaatcccccactttcaatattggaaggcttagctcgaaggatgtggacgtgttggaatgatctcgtatggtatttttctaattaggttcaattctatagaagacagatataatgttttgaaaggggatacatatttttcaacaaaaagcctattgtcatgaaaccttgggatcatgaggttaacttcaagaaagaagatgttagggtggtgcctatttgggttcaccttgatgacctcgatttgaaatataggggagaaaaactatcttttaaaaacttataggccaagttggaaaactagattatgtagat

SEQ ID NO: 197037 - DNA, 1264 bp, Cannabis indica
ttcgtgatgggctaccgaaaaaaaaagatgcaccttgttgatataggtagagccaatcattccgtaggtgtaagggcccaatggaagcttgaagcggggacattacagatcgatcgattattattggattgagtctatttatgcacgcccctaattgttagcatccaggaggacaacatgtacacatattatttaatatattattatttttttcttttttctatcattcatataagatttattatttttttctacaaaaatattttaatggttgataattttaaaagttgtctattatagttccacatcatatttttggtaaaaaggtaactttttcacagcaaaaatcataaaaagaaagaaagaaaatgtcatgtggttaagatctatattgggcaataccactccaaactcctattagagatgctctaaggtattagtattaccacttaaaagttacactttgtaattagttaataatatattataatagttattaaattaaattaaattatatgatactttttagatgagtatatcaccacctctctacattaaccttattttatttttgggctgagcaatttccatagtaaaacaccagtttgatttctgcttgtgggattgggtcacatcacttgctacattgttttcacatgctttttgaaaagttgttgaaatgtaatagattttttttattattattattaatggtgcccataaaagcaccaagaaacaaacgaaacagagttcaacaaaagcaaaataaaaacaacaaggagactaactaaaggctaagaaaataactactacaaagataaacataaccaaaagaaagcaaatcagccatatgctgtcccactcggcagggagttgtcaaaattgggcattcctattttaccgaagtggtttgatcggactgcccattgcgccacatcatgggccacaccattgagttttcgtagtatccaattgaccacccaaaagtccagacttccagttaatgcttggaacttggtaactaaatccttaatgttgtagtttagtttaggcttgttgtgattattgccattcacagtagccacagcccctgcagaatcgcattgaaaaatcatcagtttgagcccaagctgaaccgcaacttctgcaccaaaacagagagatccaatttctccagcaagaggatcactatagaggagtttagtagtgaatacaattgttagagtgccctgctcattacggaagattgcagcacctgctgaaa

SEQ ID NO: 197038 - DNA, 775 bp, Cannabis indica
attcgaacggattgtgccattaacaaagcttcaacttcagcaaccgtgtaggactcttttcttgtagtgattgaggtgatgaacacatcatactccgacggtaagccattgaaaatggcttctatgtgatcttgatttgtttgagagtgaccgatcgtagccaatagattgactattcctttgatcttgagtaggtaatcattgagtgatcctgtcattttagtgtttcggagttgagttttatagagtccgatgttggcggcattcaaggcggtgtagtactctttcaaattctcccagatttgagctgtagtatcgcatccgatcatgcgatttgtggtcttttcagacatggaagaaaggagccacgagacaaggagattgtcttgctgttcccagtcttcgaaatcgggattgattgtgttggatctttcatcagctgctgttagaaattttggaggaacacgagtaggatcaagaaatttctgtaggcgactgcctttaatggatgcaagaacctggtgtttccagggaagataattgtgctcatcgagcttgattgatagtgcatgattgaaggagacagggtaggatcgaggcagaggaacttgttggctgctgtttggttgagcattgtttaatcttgatgctgcaccattcgcggaatttggatactccattgtagaacgattggagctctgataccatgtcagtgtttgatatttgagagagaatgaaagagttgcagagaagatgaattcattgattcaagaaa

SEQ ID NO: 197039 - DNA, 1043 bp, Cannabis indica
gcattgttattggacactagtggcgtctagcactttctaaacgtgtcacattgtaattggttagcgatactccataaaagttattacagtgtattatatgggatctgatacttaattgtaccaatagcaatattagtaaaatcacactaaacatagcatttctctttttaatagtatgatttatgctaattatagctaaaatttctcgtgaaaagtgagtaaaatgtcaaaatctcgtacatcatgatttattgtattgtattgtatcgtattgtattgtatatagtattgtgttggattgtattgtattgtgttaatattatttaatacaatactatgtttgatattgacttgtactaataggttgtgtaaaattataaactctttacaataaacttgacctcaaccccaaccacggcctggacttggacgtagacctgaccccaacatggacccgcacctagaccccggacccaaaacatgccccgggactcggatccgatcctagacccgaattgggacttggaccccagatccagacctcagacctggaccccagactcgaacccgaacccagactcaaaacctagacccgtgtggtgtatccatcacgaaagaacttcaaagttaagtgtgcttgacttagggtaatttcaggatggttgatctcttggaaagttttcttaagaagcgggcgagtgaggacaaagcacgctagaaagacttgtgtcggtttccaaggtcagtcgtcattccatgaagtcatcaagagtaacgtacctgtgaaaacaagtcattccatggggggatgcccaatagatgtttgaagtgggaacgttacaaacccaagttgtctaatgcttgggtcaaccttgccttcgactaacctctagtgagcttcttcccacctgtaattgcttcatgtcacagatatctaaatgtgaagaagatattgttagagctttaagacccaacaaaagatatttaatttagagaatgagagtttaaagagaaaaagagaataaaaatagaaactatggtag

SEQ ID NO: 197040 - DNA, 680 bp, Cannabis indica
cttgagatacaatttattagccagtaatttcttaaaataaatcgatgctgacctttttcataagcctagagttaaatcttgatctgaaacctctctgagaacatcatcaccaaggctcaacaatatggcattgtgagcttttaattttgtttctttcttcatcttttcattcgttaatttttccatgagctcttcaaattgtttgattggagttcttaaaaacttcaaattgttcttgaaatcttggagccctctcaaccttgctttgataccattttttttgtgatttttaatcacctcaattcaagaacaacacatttagaactcgagaaacaagatcaaagatgaacaagacttaatcaacaaagtatatcgatccacacataatgagaataggcaagaatttaataacaaactagaaacacaatacacaagggaggataagaatctatctgactttattaatcaataagtgagcttatgtacattactgaaacataaaagtaaaactaaaataatttatttatataaaaatctcacatgaggacttggtgatcagacacacactaatcatttatgaccctaaaacactctcaaaacctttctatttgctcagttggggaatggaaaatgagtcaccccttatatagcttttaaaccgctcacttaattacaaaagg

SEQ ID NO: 197041 - DNA, 1859 bp, Cannabis indica
ataagattcatgatacttacagagatgaatgtctttagaattagagaggaaatggaatggtgagaggcccatggtggagaagtggagcgcgtgcaacacaatcaattcaatggtaattactaaattaattactattgcacgtgccctgcttctccaacaaggagcaactcaccagcttaaaatgcttttatatataagtttaacactcttttttcttcactactactactctgttgtttttgctttgttgagatggaagagccagtaaagctagcttcatctatttatagcccaatccaagtaaaggctataaagtaaaatttgaaataaggttactttttctttaatgatcgtagtaaagagtaaggtggtgaagtaaattcaagacattagttgagagaaagaagaaaaaaatgtctgccaagccattccatgccatcatatgttttgtacgctaatataaatattttcaaacctcctcaatttaatagggtcttgtctatgcctcattgccttgtgtaattcacaaatgaggtcagtgtaataatgaccgttggatcaaggatctagactctctctgatgtaatcacacaagagtagagtcttagatcatgtactgtggtgggaccccctcaatcgatgatcatatggggttgtccttttgttctttggtaagtatacatttatatttattttttaaggggaacattagtccaacaagggtgaagagaataatgcaagagtgcacgtaggctttgcgtgttgagccttaagcttttgagtagtggcatgcattttcgagagagagagagtgtgtgagagtgtgtgagtgaattaagggctctctctctctctctctctccctagttagatatgattccctatgtgtagcaaagaatctgcttttttcctttttcttcgacataattaatagaggtttcacatataaggactcaagaatttcaaaccctcttaatagcaaagtgtcttcaagcctcaacggctaaagtaaaaaagtaaagcagagttgaactatatcaatagatctaaagatcagcattagctcattttcaacactcctacacacaacaatttatgtatattgagatatatgtttttttgctagcagagtaggcgtgcaagttggcgtaaaaactttcataacctttggaatagcaaagattctattggcttgtcaaagaatacagagccaatatataaatgttatttttaagtatgtacatcacctataacctattacctatgtatatggctttttcagccttggcctaatgttatttcttgtgtatggatttcagtgcggtagagcaatttagatatctgtgcaatgctttaacatgactctgttgtgattaaaatgagctagttaaaatttttagttgtttttttactatataattagctaggctaatggtagaggaggatatgtagatgaaaacattaaaaggagtatgaagaagaagagagatatgaataattataataaagtatggaaagtggctaataataaatgaggaaaattggcttgtgggataagaacatagattctggatgaggtcataatgaaatctaaggggatataaatagtggcgtgtgcaccctgcacttgggtctgtacacgcagtagtaaatgttttatttggtcatacactcttgtgtatttgttttatttttttaagcaaattgtgtgtatctgtttttttaaaagagagctttttgagactcaatcatggtctttagtcctaccaagttaaaattctaccactactcgattcatttctttgactttccccctaaactaaagaacagcaacactacaaaaataaaaattaaaaaaa

SEQ ID NO: 197042 - DNA, 1780 bp, Cannabis indica
ctctctctctatatatatatcttattcctgttgtggaatgggaatgacgaaaagccttgtgctcattttattacatttcattccgttctcttgtaaaatcaagttttatttttaattggttttctatttgggatctcaatattgttgtggttgtgctaatagatttgaattttcgattttgtaattaggtttagaaaatgggagaggattctttcaacttaacaccctaaccaactgctagaactcaatttcaactcaacaagaacttagaaactaattcacaaaccattctaatcctaacaaccaataattctcaaattcacataatcaaactaaacataaagtttgaacaactaaaaaccaagttctaggatttacctccacttggtaacaccttggtttcttgttgaattccagaaaaaagaaggagattagggttgggttctactggtttgaggggtcgaacaaagagagagaaagggaaatgaatttcttgaattttttattttcttttcttaatctttttttaattaattattcctaagaaaactcattatttttagctgaaaaactaagtggccagcagccactcatatggaatgccaccctatcctcaaatataaaatacctaaattgcccttaaatctcctaagttaagtaattataatcctaggggtaaaatggtcaaaagtcataaccctgctcaaactcggtattctaaatatctcaaatgtttgtcccgctaggaaataggttctaaacttacccatgtaacccaaacgaccatctatcgcattttttgtcttcgccgagcaaaaatcataaaaattgcataattcatatttaacttagataatgctcttagagtttaataaatctctagaattgagaaattataactctaatgtctatttttaataatggaacccacaatataataaaatcataaataattataaaaatatcaacagttaatgctaattgtctttactaatccataatctaacatgcagtcattacatgtttcatatgacgtgtttagctcatatcttgaatctgatagtaagtgatggtttgaaagagttgaatgaagtaattttaagtattcaaaatgcggtgagatatgtgatgttatctccatctattgaaaatgattaaagaaagttgtacggatgcaaatattgaatcaaaagccttgttatgtttagatgtcattactagatggaactccacctacatgatgttagaattagacgctataaaattcaagaaggattttgaaaatttagaaggagatgcaaactacacaagggactttgatgaagaaagaatgggtggttcgccaagtaatcttaactgggaaaagacaagagtatttgttaattttttgaagagattctatgatcttactaatcagtttagtgggtcattatatgtcacatccaatctattccttctagatattttgaaagaacagactaatttaactactatgatttctagtcttgatactttattaggaactatgactattagtatgaagcaaaaatatgacaagtgttggggaaggattgaaaagctaaatatgttgacatttattgccaatatcctcgatccaaggtaaaaattagaggttgtgaatcgaggttttagatttgtgtacaatccaagtgaggctaaaaaaatgataaagttggtcattgatacattagcacagttgtatgcattttataaacaacaaacaactctgccatctaaagctcaaccatctcaatctcag

SEQ ID NO: 197043 - DNA, 1576 bp, Cannabis indica
acaactcttcttaagcaaatataataaatgataaattgaaaggagatgatatgaaaataattttttctctcccctgccctcacctttttgtgtgaaaaggtgaaaaaataggagagactatgatcttgtgtgtctatgaaaaggataattgagtgtttttgtatatgtctaaaaacaatcaaaatatttctgtgatcaataatacatacctatttaaatatttaaatgagattttatttgtgaagatggaaaatattttgaacaaagctatttgtgaatggtttgtacatctctgattctaactgacatagaaatgtagctaatgtaacttgatttgaattgatttcagcctacaagttgtagtgctgaaatggtatatataggaagctagaagaaagctatgattaattcagcatgtcatctctcatatcaaattaaaaaagacaagaaagtattcttatgattctatgtagttgatcatatataaattaactcctaaatagaagaaataatattaaaataaaattttataagacacacctgttagcgtatgttcatcaaccattttctctgtaatagaatgaaaaagtaagtgggcagtgaaagtatagatggaaaagggtatatctatggtaagtggtaaccaccatttttcattacgcgctcttttcagaaaaaaaaaagtgaaaaatccgcgctcttttatatatataagtgaaatgtgatttttttttggttaaaaaacataatagtaataagattttttctaaaaaaactttatcaattattatttaaataaaattattatgtaaagaattaaaaccatatttatataatatttaaatacataaaattgttaatcgtatttttcggataatagaacgatctttttttaaaaaaattattgtttacatatatatatattcataatatcaattgcaacaaattagcttctaactactcaacagaattagataaaaaaaataagtgagaagggaaaagtataaagaaaaagagactcacctatttatcagtacaaccagagatcttgagtgtgaaggaaagctcccccaatgcagtgtatactcaaaaaagaactttaaaagaaaatcaaattgttagaattgagatatagagaatatacgattgaaagtatagaaggttaccactcgatttatgtgacttgaaagctccattgatgatataaattgatcctttgatagtgcagcaacagagcttctctgtgaggtgagctccatattaatgataaaaatggtttgtaatcttctgtctcttcaaatgtgtgtttgtattgccttgtttttttgagttttggtttgttctctaaagttttctttctagatctgaaacaaattaatttggggcttttcatctctccaacaaatatttagggtttttatcagcttaggaaaaaggtataaagtattcatatatattatttagtattaatatattcttttcaattaatattgagttaatgtgtggtgtttccttagccatacacgttgcattttgaaaaaatctttggaataaattttaagactttttttttttt

SEQ ID NO: 197044 - DNA, 1014 bp, Cannabis indica
taacttcaagaagcaaacctgtatcacactattcttatttaaacctaattgataaaaataaaatatacgattaacctataaataatattatataatatatttatatttataaaagctgctctcttttaatttatgtcgatcagtgtaattgtatgagagagtaggtgaaacgatcggttggtattcggttaactacgtggttggatgaagccctttaaatttaacaatttatatccactccgatttaatgatcggaagaaatcttgagtactttcaagaaattgactaattaaatcttgagtatttgtttaatacgacgttaatatggatctgttctactgttaagtttggcctaatgaatgtagatgcatattacaagcaaacttaacagtagaaataaagttaatgactaagctacaaatatagtaatttacgatttttaccataaatattataaattaaaaagcattattattggttatcaggttatcagtgtgcccaatatttttttataagtgctcacgattagttcgcaatattttcaaaaaattattttcttataagaccctaatatttaattatactaataatagtatgacaataagaagaatgctaaacagcactatactttttactaacaccttttaacaattctatgtgaagcttatggagattattgcccattaattaatatttctttaaagggcatttatgggagaaattcaagccactagtgtatttatttacttcttctacctaacactttgggctagactggaggatagggttattaagtttggtcagtataccaactaaatgaaagagctaccccaaaaggttattacaagagacccacttaaataagaccgcccacactcttttttatcttctctcagtagtagttgctctctcttgttccgttttttttttcaatattttcaatactctgagatttgtagaacaatcctcacaacaccacctctctaataacttaaataaattatatatatcagt

SEQ ID NO: 197045 - DNA, 3941 bp, Cannabis indica
  modified_base (111)..(111): a, c, t, g, unknown or other
gtcaaaacacaagggtccaaaatagtaatttacccgaatttataattgttgttgaggttgatttctcattattagtaaagttgacttttgtaatctaaattttacaagaanattttgtattaaaatttaggttaaaattataaataaaatataaaaattaataagatttttcgaaaatttaccccccccaacccccccccccccccccaaaaaaaaacttgttgtttgtgaattaaaccaccaaaacctatttacccaagctcatcgttgtattctttttatgaataagctgattgttgtatagtgtagtaaaagtaatggaaataacacaatgtaagattttctatgctcatttttctaattatattaaaaatattctcacacttttttttttactctaatcgtatgacaaacatgaattaggagcgtttcacaaaaacccaaaatacaaaaaagcctaatcattacaaaatgagaatcttataaaatatacaaaaactaaatttaaacaatcttaactcaatataattaatgaaaaaactcagtctcaataatcaatttaacgttattattaatgctacaacttttgcgtgaataattatgaactttcatccacaacataaaattataattttatttaatatataatggtatgtatagttaaaaataaaatagtaagttgtatgtgtgaaaatattaatcatgtaatttattgtttaaattatatttttggtactaaaattatttataatttttgaagagcaactatcttgtaacaaaataatatagaaattttttcatttttacacttcaaaactgttttttttttttttttgtatttttacggaattttacataaaattctcattgcaactagcggagtaacttaaattgcaaccaaaagcaacccacataaaaactaccggaaaaactattttaaaaattaaaactgtaaatttaaaaaaaaaattaaaaaaatagtatatgaaatgataagttgtataaaaaataaattaagttataatataataaaaacaacaaaaaatgttcctaaagtaacgatcctaactaatatatttttcagctaatttaataatagtacaaggaagatttagaaaatatagattttgttttttttttacattggtggagggagaattcaaatttataatctttgagagttggggtacgatgaaattttcttttactccatttattggtctctttctcctcttattcttgccaaatgaaatattttaattcttcctctctttccacactccttcctatattcctgtatgattttgttttacttaacaatatagaaaggaaaaagaaaaaagaaaagaaaatgccacatttcccactaatgaattttggaagtctaagtaacaaaaatttagtaatgtaaatctacattgcccacaaatgtctttccatagtcttgtccattgtgaagatacaactagattggcatcttccaaatagttttatattatttattttgtcatcttcaagaccctaccatattagaaaatcaagaaaactatataatctaaaacacaataataattattcaataattaagtatacatattttattgatttatagtaattatatcaatttgatagtgtaatactatcaactaactcttccttcttagatctctaaatcagaaatatttttattttatctaattatcaaaaagtatacaactgtgatgagataatatgtatgtatagagttggaaaggagacttaattacataaccctagttggattgaacttactcatcaaaatacttcaattaactaaaaaaatccacacttctactttaaccagactttacacacatagattttaagctcattaactatttctcactaaaaatataggctaacacattagagaactatccaatcaacctatattttattaaaacctataaaaattaacgtaagcttaaacaaaaggtctaacatacgactctttgtacaatatctaattcatacaattaaatctaattaaatctaatcaaatctgcaaactgtgaatcttcacttgtactgattgaattaaattgaaaaatataaaatatacacttgtgtagttgtgttatattatttataaattaaataaataatataatattaaaattaaattgtgatatataaatatattattaagtaaaaaatatatatgatgtaaattacacattgatataaagcatgttatgtaataaatcacaaaaagttgtaacatagaggagttacaatctgaaataaacttgtaacatgtgaattaaatttgaaagagttaattgcggcaaaactctcaatagtttcattttacttgcaattaacccccaaaacttaaatttagtcggtaaaaccccgaaaccagcattctgttagcaaaaacacacttccgtcccttgactccgttatttaccaacgtggctcagttcagttcagccaacgtggacctagtgtatacgtgacacaatataactggttcacgtaaatattttttttttaaaaaaaaaaataaaaacctagctaaacactctaagttcttacaaaagaaaccctttcctcacaaagatgaaaatatgaaaaataaactagaataggcgagaagcgtttgggtgctctttaggtaacataaaaaccctagagatagccacaaacacgctttcaaagctgtacaagacttttttaaaaaaatgtttgatttgcagcattaagttcagattctgctgtaacagatcgagaaactttccaaaaaggaccaagatcacaatttagtcttcaatacttgccaaataaagattatttgatttgctagatacatagcaaaatcgaaattaacatttttactgtatgggttgctccggtgtttctatgtgagttgctatatgaatttgcaatttaggttgctccgttggttgttatatgtgaacttccgtaaaaatgtaaaaaaaagactgcacttagcgcgaatcatatacattataaagtaaaatcagggccgaccttgagttgaaataagtcataggcaaaacaatttttctgggtccttactataaagataaatgatattttttaaaatgattaaattaaaaatgatatttttaaagataaataattcttttttgggtctagcccgcctatgcctagggtcggccttgatcagtaaaatagtgtgaatttgactggacgaataacttttaaatatatatatctaaataggggcaatttgtctcatgttgctcgcttactttagcagttcatggtttgccaagcacgtccttcggttagacgatgagctgtcctagttcgaggaggttcctgggcagtttgcggatatctgcatcgaaaattcatgagtgattctaaccactacgtaaaaaaaatatatatttgtaatttcttgcaattaaaaataaagtaaatatatatataaccaaatatcttagaatggaaaaaatcatgcaatttatgagtttacaaactagttgggatctctttcttgttcaacaaagggtaaaaaaaatgtggtccaaaaattgttgtgttgtaattgatgtaacatgagttcaatttgggattaagcaaataataataataataataataataataataataattaatataaataataataaatattattttaggatggtttgtagaaattactaattacattttttattttgttaaataataattcaaatcacaaatttttcaaaataaattctgaactaaattttgttatttttcattaatataactaacatgaaactaacttctagcacgaataaacgcaataactagtattgtcatgacacctttggactagtttattgttaaattttaatttgacaaaaaattaaattcaaaatctattttatactattttaaaaaatataaaattt

SEQ ID NO: 197046 - DNA, 2474 bp, Cannabis indica
atatatatatatatattaaaatgctctaataataatttttcaactcttttgcccatgcatttcttataatcataaatataacactaaattgagaattcctagtataatataaatatataataatgtaaataaacagagtcattaaaatgagggagagaaaaaaaaaattatgcattataaattacatatatggatggatgtttgtagcttcttttatttgtcaaacacttgtctatgtttcagccaaaatctctcaatttcttctgctttacgacccggaatccgtccagctatgagaccccatctgtgtgtacagtgtacaaattcttacaacttacatatgggatgataacttttacaaattatatgtagcatttgcaaattggtaatagattgttaaaatataacttatttttgtaaataatgtacttcattagtgtgataaaagtttttttaaaaaaaaaaaataacgtgacaaaaattataccgaatttgatataaaacaaaagctatgtgaaatttaagcacacatataacaagatacaaaatttaattatatcttaataattaatatactttttaaaaaatattgcagcataaattcctaaaaaatttactttcatgtagataaatgtttatactaaaagtagttttgataacgtgtaacgtggacatcaatatttgacacgtgacaagaaaaaaaacattcccggagtgaaagaacttgagtcataacaatcaacttaggaaagggtccctagccccgcgcccaggttgacttcgaggccccgaattaggtatttagatcccaacaagttattttcaagtcatcatccttcagtattctgagtaatgaagtcaataggaatccaagttcgaggccctgaaactaaaaatatatgaaacaatatcatagaaatcaactcgggcgcttagggtttcacccattgtccaagttaacaacccatctaggacttcaatttttgaggccatcttagtgcaaatggatcaaactttgtactgggacataaattagacatgtcacgaatatatttgaggcattaaaatcaaattcggagcactttcgtttttgagcacccagagcaccaggtgccccaagcacccagcacccatgttgacattttgtcaacctggggtgcttccaagcatcaaactgaagaactatcttgtgcattttctttgtcttcatataaatgagaaaataagtacttttagagaagaaacagactgtcctgggagccagaaagagggccagcgcccaggtcgatattttgtcaacctgagccaattctaagaagttttttttagaattatttccggcatattctcctttttttttcaaagattaagatacaagttttttgagaattgaacggaaccatttggtggcctgaaactgacccagtgcccaagttgacacctggtgttgggcctagcacccaggttgacattttatcaacctcggctgttaccaatcatgtttctaaaaaaatgttccgggccttttttttcttcatcagaaataatgaagatacaagtaatctcgggaagaaaacgagaattctaggggcatgaaaattgagccaagtgcctaggttgacctagtgcgctggtttcgataatccaaatgcaaattttactccgagcattctctttgtcatggtcgaaaatagggtaggagaccccatcctcaatttcaataacctttgaagtatttaaacggcttcccagaagctccaaaaagagcacccaatgcccaagttaataggtgacctagtgctttgggttctgcttattcgattctaattctgtatcaagcattcgtctagtttttcatagtaactgagagctatgaagtcagacaaatcaaattcacaacttcatatttttactttttcggtaaagtgacttactcgtaaatcgagcaattttgagtctctcaattccgtgaaacaacaacatccccgagaatcggtgagacttcaccaaaacataaaaattagctaagtaatgtcaaaatatcacttaggcatcaaaaaaatatattcccaacacgttttcccactcacccagcgtttaggttgacgtcatatgtcaacctgagcattagatgttaacctaggcgcttaatgttaacctgagagctggatgtcaacctggacgctggcccaagaatatcattcagtaaaatggtcataactcactcaatattgatctaattcacacgattcaacttgacttttaattttattttaatactctatcaagtcttgtctcacactccaatgacaattttgaaattatcaactccacattttgtcctcaagagagttacgaattaaaactacaacttacccgaagtgggtcctgcgaacgcaactcaggtttcagaaattgacgaccgaccttcgaattcaatttcaccatcaaatcatcatcaacagtcaaaaata

SEQ ID NO: 197047 - DNA, 1514 bp, Cannabis indica
gtttggtctttgttaatacatgtaatatacatgctattaatattaaactacttaatattagttggttattcagttattctgttaacgcatattgttagagtttagttattttgggttgtaattgtgaacctttttattcatttaatacaatttacaacaacagagtattttgctatgcttctttctctttgggttcttgttttctcacatggtatcagacgtaaccttgccattctccatggctagaccttcaacaagatctcagaatggtattccaccacctactacagatcaccctccatcggaaaatcccgatgttacttctgcccctgcaactgatcccgttgctgactctcgtcggatcaattcaagatccagatctcacaacaccaccgacaataacgttgatgaccctgatcatcaatctccaagaaatgaagcgataccagtctccaattgcaggtctcatgatcgcaacaccaacgacgacgtctcaagccccttcttcctcagctccagttatcaccctggactggtcctcgtgtccaccgttctcactggaatcaactaccaatcctgaaagcgtggcatcacaatagctcttgctgcgaagaacaaaattgccttcgttgatggctcaattccacgacttgaatctggtaactctcttctcccatcttggttgcgttgtaacaatatggtgatgtcctggttggtcaattatgtttcacctgaaatagctcaaagtattatgtactttgatcaagccactgatatgtggcaagacctagctgaaaggttcaataagggcagtggaccccatattttccagctccaaacccagctaactcgtctccaacaacgtgaccattccgtcacctcttatttcacgaaactcaaatccctatgggatgagctgaaagaatttcagcctaatactacatgttcttgtggtggaatgaagcaattttttgattactataatcaaaacaaagtcttgcaattcctcactggtctaaacgaatcctatgcttcggttcgtgcccaaatattgataaatgaaccaatatcgaacctatctcgggtctttgctatgatatttcaagaagaacgtcaacgcactctcggatcttcggacaacccaccccttgcctcttcagtttgcctaccatctacaaatccccctagaaacaaaaaaccccgtccttcttgttctcattgtggcaaactaggccaccttgtggataaatgctttttcatccatggtttcccaccttgttatggagcaaaaaaaaggcagataaaggcaaggctcaagccaatcacacttcctctaaacattctgcagatcacacaacagcccccaatatccctgctgatcttacatcacaatgtcaacagttaatttccctcctcagccagtagctcagtcaagcaaatccaactgctaaaaacactcctgctgcttcgaatatggctggtaatatcatctcacaactttcttttgtatttta

SEQ ID NO: 197048 - DNA, 1800 bp, Cannabis indica
tagtcacgcgtgcaacacattatttgaatatagttttcagcatgttaaattttttcaaaattttattaaaattttgcaagatgtcttaaataactataacctacatgaccatgaagaaaaaattaaactaaaaaattatttacagatgctaaaatagatagaaatgcatcaatatatctatttaaaggggttgcatgatagagtttttcaataaaatatatcataagtattaattacatatatatatatatatatatagtattttgtttttatacatatatagtttcatttctcacaaaagagcacctttcacttttgacatgacatcgatcgatcgatcctatgaaacgcacaccacatacactattatacatatataaatattgcgctatatatatagcttgtgatgattattatgattggtttataatattatataacacgaataacttattaatgaactaattaaattaacatacgccattatagtacataatggggggaaatggatcattaaccatgtacttatataaaactattattggcatgatggaagtccataatccaaatgttggaagaactcggaaaatgacaaagctaaactagtttttttaaaaatgagaaaaatctaatcttgggtaactaactcttatttatagtagagtagttttatatatacatatagttatatctatagagagagagagtttgggaggtagcaataagcgtgggagtgagagctaaaaacgacgcgtgggtggcgctgacagacgcacaaagcgctactactagtaatgctgcatcatctgcaccagcaccggagacatatatatatatatatatatatatattatattatgagaaatgttaaaagacacgtgccaaacactcttttacgtgttatattactattggtctaattaattatggggtctcatataatttaatataatagtttttaaagagtatcgttagccaatcgcaagacgacacatcttaagggtttaagggtgctaggcaccactagtgtcaccagcaatcctcttatattatatatatatctcccctcactctttatgctatcttttctaattaattaataatgttattatgattaatgtcaaaatatatatttatatatataaacgtatggtaattgtaatagtaaatagtacttaaattaatttgttaaaaaaaaaaaaaaccaaaagatagaaaggaaaaccagagagagatgtattgaattgaatcatgcatcggcctcaaagttgtaaaccccatatgtttgtatctcattattaattaataataataataaaaaagaaaacaaaagatgctctttgtcggtctctctctatgtggggcccaccctaattcttcattcttatcctctatccccacccccacaattcagtaagtactcccctatattatcaacctgtttgttatggggaaaatcaaaacttgcaacacaaaagactataacaacgccaacaaaagatagcataagattcaacctaaatttttctaatttgttaattcacattaatgtagttaaatttgcaaagtatatattaattttctttcgggcaaaacaaatgtgacatgttaatattgatgacacaccttattgtaaatgtgactactcattctttttcttttggctgaataataactacttctcatttagatgaccacctatatgcctaaactgacattatattaatattcatcattaactacagccaatccacccattaaacgcaaaagatagcctcattaattctctctctctctctc

SEQ ID NO: 197049 - DNA, 420 bp, Cannabis indica
ctttactttcatttaaatgtaaagcagtgaagtggatgagatgttgcgttattggtaagtttctttccacatcgacggagaggggaggcagagggtgttgtcatggtcttgctttgcgtgtgacatcacatgatgacgtggggtagatggcggagctgctgcgtttaattataaacagttattaaacgagaaaagataggtagaaattcaggcttttgtttttctttctttataacatattgaatagttgtattgtacgactgaaggcacaagaagacgagagtggcccgcgtttgattgtttttaatgcggcgccactttcaagtcacaatctcccccacctcgttactctccgtactttctaacaaattcttaaattcttcaatgcgccctttgagaaaaagaactttttatttttca

SEQ ID NO: 197050 - DNA, 821 bp, Cannabis indica
aattcaaaactgtctatattgttccttgcagatgctccatatagatcgtatgggtccagcccctatggtctcttccaatagatatagatgttacattagttttgttgatgcatactctaggtacacttgactctatttacttagaactaaggacgaggctctcccaaccttcattaaattcaaaacacagattgagttacaactcaatcatcaaattaaagccatccaatcagattagagaggagaatttagagctttcacttctctagttgagtcttgtggcatcattcatagagttttatgtccacactcccatgaacaaaatggagttgtggaaagaaagcataggcacatagtagaatctggtttaactctcttagctcattcctcattgcctcttaagtattgggatgatgcatatagaacatctgtgtatcttatcaacagaatgccaaccagagtcttaaacaacttcacaccccatgaaaccttgtttcatactaaaccagactactctggtctcaaaacctttggttgtctttgttttcctaacctaaggccatataacagaaataaaatgaattacaggtcaactccttgtacctttttaggttatagccttacacaaaaaggctacaaaagcattgccaaagatggtagaatttacatgtctagagatgttttattcaatgaaactgcatttccttttcaaacatctgatgttgtctctactcctgttgttccacacttctctcatacccttgctacaccacctatatccccaccacaaatcatttccccaccatcttcctcaaactcat

SEQ ID NO: 197051 - DNA, 1094 bp, Cannabis indica
gagagtgaaaaataaaaaataaaaagtaggttcaattatgtaagtaaattaaagtttaatatattgtgctttttaacaatttaggatgatcattcattaaatctagaaatagaacatcaatttagagaaagataacttaaataaaaagttcaaactgtgaatatacttatggaatgaattgtatttatttttatttgcaatttcattttaatgggaatgatatggaatgacaccaccattttatattttggtggaatataaggatatcacatgaattatcaaaaatacgaagaagaaacaaatttagttccatttcaaatattacttacaatagagaaagaatatatcatatcataataaaacaaatttactttagttctacacaaccttcaccacagaattcttaatatctagtttttccagttcccccattctctctataattgcctgcaaaaaacagcattttgtatctcacattttcccatgtttacatatctgaaaattcaaaaacaatccccacaaataaacaaatatgtatgtttcttaagttttgaaaaaagcccacaatcctttctcagacccttgttgaagaaagaaaataaaaactcaaatgaaaatgagagagatgattaattagccaataatgacaaagatgaagagatacaacaatcatatctgacaattgtaaatgcaccaaaattttggttccacatagactatcaaaacaacattctaaccttgtgaaacttaaaaaccaaatcaagctcactaaagaaatgatccaaaatctccacaaataaatggatgcactccagatatgctagattaccaaactgcaagaattaagtctcatgagatattattattcacaacccttattaaattcataaaaatcatgtttgatcatgttcacctcataattgtgtaaataaacacattaaaaaaagatacaaaaaggcaacaatttgactaataccttttctcatatttcgaattcttgcattaaggaatagtatacatgcaagatttattcaaataactaacacataatttatcaaacatttcaagatgagcacaaaaataagaacaacaaa

SEQ ID NO: 197052 - DNA, 1679 bp, Cannabis indica
tttctatagccatgcccaactattattatttatataagcacaacacaagtggggaggtggaaacttggggagattttgtagtacattctccaaggattttctttgttggtcttataatcataattcaagatgcaatttcaaatcacccctcttttgagggatttgcacggtcaactttgtgtcaaaaaattctgtaaagagattgatttcatttgaagtgataccaattaattaaaatacaagtaatcactatatatatctataacacattaaggctagaaattaagctgccaatgaacatataattactttggatatcaaaaacataattaatgattgataataatgaaaataacactcctattatatataattgcctcctataaatataaatatatactcataaatctagtgagattaattaattgaattctggattgctcccatttcatcaaaacaaaaaacaaaaaagcgaaaaacaaaagagctggattgtcatggttcggttagcaagggacatgcatggctatagaaagtatgggctatacgttataatatgttatattatatatatacatattaaatttatcgacaagaataatgctatgcaccttcatcataatatccaacactcataataattgacacatgttcaattaataatcacttatgtaattaaaaatagaataagatctgataaagctagctagctaattagagtttattataattttttaattaacactctctaagaatacgatatcaattgttcgagtttaatttgattttaatccctactatactacgcatgcatgatgcatctccaaagaaattctctaaaaatagcattttttaatataataaagggtgaaatatcaaaaatattactccaatcaaccattctcatttggataactgatctctaaatatgaaattttattctatatattagctcaaataaaaaatacggttagaatgaagtttactattttttaatattttttatttaaaaaaactttttatatataaatatattatttacactcacattttcatatagctaaaaaaatatatacgtattttttttttaataaagccaattaaatattacatactgtgttgtgtgtatacaatcgaagtattatttgtctaacattattataaaaaaaaaaaaaataataaataataaagagcaccctaaaccctaaacacaatgagaaagcattataatttgaagaagttggtggatgcaaaaatacatggttttggaaataattatttaattttttaaattaatgaaaagggttagtggaaaaaagagaggagagttagaaaagattaaaattggaagaaaaaaaataaaagataataaagaaatgaagcgacaaagtgtttgtggaaacttgaaccatggacaaaaaccagctagccttgggttttagactttctcactctcacatacataatatcacatctcttactcttactgtatttaagcattaaccacctcaactctcagtggcttatgagatctgctttctcatcaatttctcaagcccaacatttgctatactctctgctctaaatgaaggtaacagactaatgatcgatcttgatcttaattattgtatatatacatatattctgttgtgattctatatatctatatatatatatat

SEQ ID NO: 197053 - DNA, 1049 bp, Cannabis indica
ggagaagatttccataagtggaaggccaagttgaagtgaaggaacaggtgctcgatggattcttcttcaactctaaaaattgggcacatattgtccgctatatgaaaccgtttaagtaaaaccgcccttaccgggagggcatttgagaggatgttccaccacatcactttatggcgttcaaagatcctactattccacaatttattccaaagagaaggggcaacctcacagtgaggagaccgttgaaaagcctagattaagtatgctgatttgcacgagaaatgcccagatccttccatcgtccaaatccaacggtcttttccttgccctgatgggttacccccattcaggatggcagccagtgtctcacgagtaagcaagttattcaatttaattgtgtcccaaccacctgaatctgtcaaaagttccgacacagaagtgtatggacacgagtgaatattagtcaatcgtgggtagaatgcttcgccatgtgcaatccaggggtccttcaaaatgttcgtgcccctaccatcagtgataactttacaagcccctctcctaacgatatcattagctttcaccacactcttccagaaccaggagtccgaagttttggccttacacctgagaatattctgaccccttaggtatttatcttcaagaatcctacaacataaggattggccccccgtaagcagcttccaaccccatttagccaggaatgcttggttcatttccttcgatttcctaaactcaaggccactgcgagatttagggaggcagagcttgtcccacgtcctcaaatgaataaatcctttttcttctccttctctttctccttatacttttttatttctcttctatgtttatatgattaatatgatcactattttattttctagtataatctctagcataaatgcgcttaccttctgtatttctacaaggtgtccttgtaattcatgttattaatggtggcttttattttttccgatttcaaatggtataattatattttgagtgttgattataattttttagttaacttt

SEQ ID NO: 197054 - DNA, 809 bp, Cannabis indica
actaaaattgaaaacacagcaaaacaacctcttaatgttctaaaacacaaattcattgtgtggttagcggcttggctgcgtctgaagaccaaggataggttgactgtcatggttgccttgtggacctaatgtgtttaatttgtgggaaaggtgtagaattgcatcagcaccttttttttgtgtgagttcagcaagcaattcacaaagtagatgttgcagtgggtaggtttgaacataattcaggttgattttaactccatttgaaccatataagaatatcagaaaaaaaggctttattattttgtaatgaatgaaaaattaattgtgttattacaaaaaatattgactttatatagggggagagatatccaaccctagaatacacatcaaacaaaactaagaatatcccaatctctataaccacacataaaaaataatcatttaatgctcaatatgccccctttagatgaagtgtgcaaatttgtggcattcatcttgccaaataaattcttgaaataggatggaaaaagtggattggtaaggagattggcaggattgtgtttggtgttgacgtgaaggagcttcagctgaccactttctacttgttcacggacaatgtggtaattaatgtcgacatgtttggtccattcgtggaagactgggttctcagaaatatgaatgacaaatttgttatcataatacataaagggtggatgtgaatgattaaccccaaagtccttaagtatagcaagtagtatagcaattttcaagttgtgttggccatggcttggtatttcacttcggtagaa

SEQ ID NO: 197055 - DNA, 1212 bp, Cannabis indica
caaggtatacatatatatacataaaatatttttatgcatgattgcaatatgtatcattaattatacatattattattattttgacaagttgaagaagctagttggtgaggctttaatgaaatggccagtacagtttgtatgttagctgatttgtataaaatattaattaatgcttattttctataaatatatatatatctatactatatattttcttataatacatatgaattaaatcatgtgtcactactacataataaccatttaccatgatattttaaagtgatattttctagttagagaaaaataacaaagacctcttcctttaaaatgttattttcaaaccaaaaggaaactataattttcaacaaaaaaataaataaataaagaaaaagaagaaataaagaaagatatacgtgtggatggagtactaattatagcattaatgacataattagtaaaagaagcaacattaacattataaattatgaaaaatgctaaaagggacagtcgtgtataatactttttttagtgtcatattattattggtaattaaattttatataatttaatataataatttttaaaaattatcactaatcaatcattactagaaatcactggtaccccatataatatatctgtagaatttgttagcaatattctctaacagctatttagaacattgttattaggcattagtggtgcccaataatttttataggtgtgacactctacggttggttagcaatattctctaacagctatttttttaagttatatgtgacgtaatacttgattatactaaatagcaatatcagaccaaaaataatattaagaactaataatgtcttttaacaattctctattatttaggagctggtggcgatcgaaccacacgcaactcagaaagaaagatagaaagaaaaagcaaaagaattgaaaagttatgaaaatggccttttggattttgataaccacaccaatcatctttctcactcatcaatctattggtttgcattaaattgaaaaagaagaaccattgttatcattcttcttctctttctttcttcttcttcttcttttagtttttgttatgttcattgattattaatataaaaaagaaagaaaaaaaatcctaaagtattgtcattgttgagtttaaatatattgtgccacaaaaatttctccaaactatatcaactattaaaa

SEQ ID NO: 197056 - DNA, 809 bp, Cannabis indica
atcaaattatgatgttaattgctgtagatattaccatccatcaaatggtggccgatggacatactcattagagcgctttttgatgcatttggttttatcattccagaaacgcctacagcatgaacaactgtaaggatacaatctgctagatctgttatctatacacttgagcatattttaatcttccttctaaatgttgttctcataggaacgcgtgtgcggatagtctaggaaaatcggaaagaacttcttttgtcaatgtgctactgaagttaattgatcgtggtcaatatagcaaaaacgaacatctttctgaaacagttgctgcagccacttcaattttgtcatatgtagaacctacattggttcttccttttgttgcatctcggttccatatggccttggaaacggttagtcagtaacaaaatcaactattagaatttcaccttgatatattccacatcagttttcgagtgagtgcattaactcctatacatggaacttgtttcactggaataactactcttttaccaactttttatgtctagtcagatgactgccacccatcaattaaaaattgctgtgatgtcagtagcttttgtcgggcgttcactatttctgacgtccctatcagcttctgcagtaaaacctgttgatactgatggtggtgatgaattcattgaacttatgatgctttcattgtccaatgcattgcttggtatggatgccaatgatcctccgaaaaccttggcaaccatgcaattaattggttccatattttctaatgtaagtaacacaaacttctcttc

SEQ ID NO: 197057 - DNA, 655 bp, Cannabis indica
gtatagtcatctataatagttagaaaataccttgctccacctcttgaaatagtccttgaaggtccccacagatctgaatgaagatagtccagtttgttgcttgaaacatgctttcctgtcccaaacttgacctttgttgattttccaagcacacattgttcacacaaatccatgtgagtgatctgatccttcccaaatacccctttcttactcagatatttcaatccaccaaggctgatatgaccaagccttctgtgccaaaccatggttggtcgattgttattagaggtggtggcattgacatggttctttgctgaagatccattcaatatgtagataccattcctacttattccagtcatgactgtcatagatcctttgattacctttaatgtcccattttcaaccttgactgagcaaccctcttgatccatcatagcaactgaaatcaaattccttttgatgtctggaacatgtcgaacttgctttaattcagtaacatttcccccttctagatttaacatgacagtgccaattcccaagactggacaagatcgattatctccaagttttacgaaaccagttttgactgtggcatagctagaaaactggtttctatctggacaaatatagaaagaacagcctgaatcgatta

SEQ ID NO: 197058 - DNA, 950 bp, Cannabis indica
agctctaagagctgaagccatggcaaaaacgcgaggaaggggcgggggagaccaaaatcatctgcaaggaaaacgaagcaactctcaaatgcgaagtcgaaggggtcgctggtaccggaggaggatttatgtattgatcccttagcactttcagatgacgaagaggaaatcgagggtgtgaatgagactctgcaagatgtattcagaccactttctcctaaatcttcactgactgaaattctgaggcaagaggaaatttgacatgatttctcatcattcattgaagcaaatcacagatgttagaaagaagttgcagctggaaaatcgactctcattcctgttcttcgaactggaggcatcattaagaacctgggacctgcttttgatggatcaacgagtaaatccagagtcaagattacacatgaggatattgaggatgaggtttctttttggaaatcgtccttagtatgctatgttcttggagccaacccaccgttatctgtgcttgaaggttttgctcgacgcatatggaaagataagatcgacaaagtaggtatgttatcctatggaattttcttaattagatttcatagtatagatgaaaggaatgaagtattgaatgggggatatactttcttcaataaaaggcctgtgattatgaaaccttgggaccccaatataaacttcaagaaggaggatatacgatcggttccagcctgggttcacctcacagatttggaattgaagtactggggtcaaaaatctttattcaagataattgggcaagttggaaatccattaatggttgatgatgttacaagggaaagagacaagttgagctatccaagagttcttattgaggttttaatccatcaggattttccaaatatcatagagtttgaggatgagtttggatctaatgtctcggtatccattgattatgaatggaa

SEQ ID NO: 197059 - DNA, 857 bp, Cannabis indica
tccttcatttcttatttctcttttatactgttcaaacactgttcctttgacaaaacaaaatgttcgcctaacagaactaatgtactctttgcatcttccatgttgaacttttaaataactttcttgatgtacgtagactgtttcaagctaatgttcccttcgttttagttccttgaaacttcaatacaaagtatcttttgaactggtccaagctccttcatatagatttgtgatgctagcactaaataggcaatcagttgtggtaacctttaactttggctcctttgcaatcttgttctttttacgcaggtagtatatcaatatgctggaaaaagagaaacagttaaatatttaaaaaaaaaaacaactaagaaacaacacaaaaataaacataatgaaaatatgcaaacacatcaaaaacaaatgaaaaaaacaacttactgaagaagttaaaaagttatcatgataactaagtttgtaaaaccacatattgtgttatcaacttcctcaacaccaaaccgaaatggaggagatatcttgtccttgtcctttagatatacattagttgtttttctgaaacaaggtaacaaaaaatataaaattagcaacaaaaaatctaaagttaataaaattacacaaaggaataataaaaaaaaattatgttgatttcttcgatcggagaccctggcttaaccaaacatcaaaagcagcctccaaagttggctcaacgggttcaccaatcttatcaacaagtggacataatccatgcacatatttcaccattttaaaatcaaaattattaggagaattagacattgaatctaatttaacattagaagaacctagttcaataaagg

SEQ ID NO: 197060 - DNA, 2042 bp, Cannabis indica
aaataaataaataaagaaaagttgaataaagtgtctcaaggcctaaccccaactacctgctgcttggcaaaatgggccaacatcaagacatctgcgtaactacgggacacccaagtctacatgggcagctaagagacgcatccaatcgcctggtctagaagctcggcaacaaaaggtgcgacctcttgccccaccttgtaggctagctgcttctctaaggccttgacttcgaaggtctgccccgcagggggaaaagtgtgcatgccatcttacattttggccttatggatcacggatagcacaatcggcctcctacagacttgtagtctttcgacctccaaacgccctttcagggccctgttcacttccctatccttctacatgtggagagggtcaaaaggaacaaccttcctagggaaggttaaccccaccggaggtatccttggcagggtcaaagggtacgaagatcgaggctggcccaaccttaattcgggatcgtggcattgggggtggacccccattccaggagcagacacctcaagcctctgcttcttcctggcagaactgccacctgttccttcagtggaaaaaatcctctccattgtagacttgatgtacctgccagaagtcgacacaatatcaaaaagggaacatcgcatgacccctggaatcctcgaagatggctaacaaaaaaccagtgttcctaaagtaaatgcaccctcataactccctcaaaactccacaaagagtaaacagaaaagaaaacttaccaattgtgaagagaaatctgaggctggtgatcttggtgcaatgtcctcatcgagagaattggtatcaaaaaagtttcacaagataggggaagaactggaattaaagaactctaacttgacagacgagaaaaatgaagagagtggaatagttgctaagggtatttaaagggaaccttccacaagaagcaaatggtttaatttgttcgcccaagggacagaccacggttggataagtgggaagctgagaagatgtatcaccacccaatagacggcttccatcattgcatacatcgtaaaaagcactcggcaatgggaaagtcgactcaaatccaatcattgccgtttttgggcatcccataagacacgcgcccaacacgcgcacaaaatacagaagtagcatttaaaatcccaacaagaagatagaagaaattataccgcttgaataatgacacttcagtttggcggctgatgatgtaatgcattaaagggcttgtcataaatcccacatgcatgaaattttttaaagaggagatactgcaagctcccagaccatattacgtctcagaagcttgggggtaaatgttatccagatttttgtaagcctgacatgtggattttaatcaaagaaggccaaggggtcattaagtcgcccaaatgcttcacttagtgctctggaaggataaaggcattaatctaggcgggaagggcttccgtgaaggaaggtttcctgactgctggccacgcaagagacatccgtgaaccaatgactcattccattccaggatcaaaggtcatctgttcccgctaagatatggatctacttagaaaggtcaaagcacttcgtggatacaccagcccagggtacgcctttggcacgcggaggcttaacccacgggtgttaggctacggacccagcgaccagacttttttatgtacgatgtaagaggttatctcccacaatacgttatcgtatagagcatgtgtggccttgtgtctgagctaaacaatccaacagctggggataagggaaattcaaataagggaaaccccgaagtgacacacgtccaaggcccagcctatccagtcagtacgatcttacaaccttaaatgtcatatgggaaactatgccacctacaaatccaacggtaggatttcatccctactgagatccattaaaggcagcagatacataatgattggcctataaacaccccaaaaaaagtacaagagaggaggacattttccttcagatcgaagactcactctttatca

SEQ ID NO: 197061 - DNA, 1827 bp, Cannabis indica
tcttcaatgaacaaggagtggatatttgacttcaaatgtacttatcagatgtgtccgagtagagaatcattttatgattataaataagctgatggaggtaaagttctaatgggaaatgaccattcttgcatggtcattggaactagaaaggttgtcatcaaacaatatgatggtagaatcaaagtgctaaccaacgtaagacacatttcagagttaaaacgaaacatcatatccctaggtgcgcttgaagatgagggttactgttataagtctataaacggaagtttgaggatcatcaaaagtttgttgatagtgatggaagatgaatagatcaatggagtgtatgttctccaagaaaaaattgttccaaccaaagaagcgattttagtgaaagggctataattagatatgcagttgtgatatcacatacttgggtatatcagtgaacaaggccttaaaaactgtacaaacaatgtgtaattgaaaatttaaattcttgtaccttaccattttgtgaaaattgtgttttaaggaaacaaaataaggtgaaattcacattaaaagggcatacaacgaagaagatactcgaatatgtgcatgctgatctttgggggctatacaaataacctactcactccggtaagaaatattttctttctatagttgatgattatagtagatgtctttggacctatttgctaacaactaagaatgaatagctagaacagtttaaaacttggaaaactcgggtggaaaactaaacatatcttaaagttaagaaccttaggacaggtaatgagcttggagtttgtcaactccgaatttgacaagttgtgtaaatatatgggattactagaatagtagtaaagaccccaaagtaaaatgatattgctgaaaggatgaaccgaacctttttgaacaaagtcaagtgcctgttgtttagctcaggattagaaaaaaaaaattgggagggaagctctaggtactgcaacctaccttataaataggagcccaaaaagagttataagcttgaaaactccttatgaaatgtggtacaacagaaccccaaacctaatgcatttaagaacctttagatgtattgtatatgtacataaatttattgaaaaactagaacctagatcagttaagggaactttcctaggttatgccttaggtatcaagggttatagaatatgcattccgaagaagggtagactaaatgtagtaattgctagaaatgtgatttttaataatttggaattttcccacttgacagccagaaaaggtagtgtgtctccatgtgatccatgaaattctgaaaacgagaacactactcacatagaaatggagtacagaataaaacgtctagaagaaggttcgcaggtgaaagctattgtgaaattaaaaaataatactgtacaaagagaagttgttgtagagccggaagataacattgaccaaatggaagttctcgaaggatccagacaggcaagtctagaaggttatcaattggcacggaatagaaccagaatatagattcaccctccggcaagatttacggaagcagacttgatagaatttgcactggcagtggtacaacaagcttagattgaagagccctaagcgaagagacaattttaggtggaaataagtcaacatggctccaggccatggattaagagatgaattcactccgaaagaacaagacttgggtggttgtacagaaatcagagaataaaaagatcgtagagtgcaaatagattctcaaggtgaaagagggaatcaatgagaatgaaccagatcggttcaaagccatgttagtggcta

SEQ ID NO: 197062 - DNA, 1490 bp, Cannabis indica
cttaggcatcaaaaattacatccacggtacattttcctactcacccaatgcccaggttgatgtcacatgtcaacctgggagttggatgtctacttgggcactgggatgttaacctaggagctgggcccagaacaacattttgtaaaatggtcataactcactcaatattgatctgattgatgcgattcaacttgtttttttgaagctatttcaatgctctatcaagttatgtctcccacttaaatattaattctgaagttatcaactccaaaatttactctcaagtgagttatgaatttaagctacaacttacccgtagtgggcctcgcaggcacgaataaagctcctaaaattgacgatcaacatcttgagtcaatctcaccgttacataatcatctatattgaaaaatagtctaaatgtattttttccatatttttggaatactttattgttattttaatatgacctccttccctataaaaggagagctcgtctagctcatttttcacattcaaaatagtacccataaggtgatagcatctctctctagtttctctttctaaaaattagacctttcacacttagtcaattttcttataattttgatgagaagtaaaaactcgaagtagacgtagctccattaccatcgcgacatggggagtgaactactataaatttatgtgtctttaaattatttacttaaacttattattcatcttgccaatctagcgagctgattttggccactttttagtgtcaacattttggtacttcattgagagctacaactcgagttccccaactataattggatttctttgcttgaagcttttttctgaagggaattcataagtttaggcaagcaatcatccataaacacgtaaagcagcactaccactcttggtagtgacgctactactcaacaagcagtagtcactgagattccccataagtaagcgaactaaaaatgagcgttcgaaagggctcaaactcgagaatgtggatttatgggatattttcctgatatggagcggtcacctattagggaaatgagctatgagggagcattcaaaaggacatagactcgagatttcagacctagaggtccaccacacgcagctaataagaccaattgtattttttctcaaagtaattcgaacaatgcggggaaaccaatctcttctgtgggattctcttcacaagtctaatgactttagaccacccgttgaccctacaaagggaaagggacctgcaatcaaacataagggaagaacccataagctctaccacgaaagtgaagagtatgagattcagagggtgaagatcaatgaactactccacactcagaaatgattctgtaatgaacgaggtgtttggtgtaggtacttcgctcgaggtcctaaagaccaacagtatgaataatgcccacgactgcatggagacatgctgtacttaagaaattggttcaactccctccacacatgtcact

SEQ ID NO: 197063 - DNA, 1030 bp, Cannabis indica
gaagttaagaaagtggttgtaattagcacttctattttatttttgtttttctttttagtataaaaaatattttttttgttttttgtttgtttgcagttgcagcattgttcacaagcaccaacagtgagtttttttttttatatatatatttatattgattttattaatgaaataaatatatatagattaattaatatattatattttaatttgcagggtttaagttttcacaattgtgagaatttgacagtgagagatatttcagtgcgaaacgttcaaaaaaatcatatttcctttactcactgtaaaaacgtaaaagcttcttatctatctgtaacttcattacaaaaaagtgatactactaatggaatttacatctcgcatactgaagatattgaaatctttaattctgctattagaacaggttagtaaaatatttgcttattttcttttaattttcttttatccttatttaatatatgtcatatggtaattgttttttttttttgaataaatatatacttttataaacataatatatatttaaatattatgtatttatacttatattatacctagtttctcatctattttctttcataaacatatttatttaaaatttaaactacaataatataattataaaattccataaaatcatgtttaaatttttttggtcgagatttattaatatttaatattcttttttttttttgctgaatattaaatattcttaatttgagtgttactttttttttttgaacaattaatttaatttaatttttatttttgaaaatagtttaaagaaataaagtgattattggttaattaaataaaagaaaggattgaattattgagtaaagtcatttatatagtactcaaattataaaattaagtaattaagtaattaatatacaattttattaattgaaataaagtaattaatatgcaatttaatttattttacttcagttggtgggtattgtatatcgattgaaagtggaaccgaaacactgagagtaacagatat

SEQ ID NO: 197064 - DNA, 1556 bp, Cannabis indica
atctatacattcaaatatagtaatatatatatagtaccaaaaagagattttaatggtagaaattaaaaataagaacctggtctttatgggcgttggggtcgccggatatagaagcagcgacggaggcgctggccgaacgaacgccagaagatgcggtcttaatacaagaagaaatgaatttcaaagaattgggaagaaagccattgctggaattggagttattattagccttgttatggttattcttcatagtcagatagtaagaccttgtttaagttaaccagcaacctgtaagttaccgggagaatggtccccgtcgaccaagcgatcggaaatagcataagaatccggcgaagaaattgaggcaaaaagagaaaaagactaaaacgacgtcgttttgtggggagttggtcgtggtggtggttgttgttgttgatgacgaagacgacgatgatgatgatggctttgtgagttttgaccttaacacggacagagagaaagaaaagaaaagagaagagagaagagagagaaagaaagacggttggcttgtgtttgagatggaaaaatacaattgagttaattgcactctaagctgtgagcaacttttggaaatctcaaactcaccctctcttgcctcttcttcagttttcgtttcatgtcttcttttccaatctattcaaacgttaccgttttgacttctaatcccttccacttatacctttacttgtatgccctccgcacgactctatctatatagtttattccataagcaacacgttccaactacacaacataaatgattttaaaatgagttaatatgtctcacgaaattgtggtatttatataatatttaggtggtctttggttagagtaataaaatggaatagaacttgggaaactcttttattccatttttttgttaggttgcattttaaagtattgaaatattattctagtgaaatggtctttctttcattttggtggaatgattattctattttaaaatagaaggaaatatcattctaatgaaagatttgaaaaaatttaataattttttttatgcattttattgatcgagattttcggcaaccagatatataatgtaataatgatagcttagggagagttaatgcatatatttttacgtagttcgggcattaatgagtcgtagtccacgagtctcttctattaataggtgggtgtttctttacaaagaatattttttgtgttctatttccgatcccctcattaattttgttgaggggtatttatagtgattcgtaggaagaagaaaggtcttaattatctttaagtgtcatctatgggcacgcacaagttcccaaatgtatgaaatagggcattcacaacctacgtaggctgtctaggtttcaggtaagattagctttcatcccttcttgattgatgtgattcttcataatggagctgtcacttgcaccattgattatcgtgtaatcgctagaagacgggtttatgacgtctgacacgtcctcttatggatgtttcctgacgcttcccccatactgcattaaatgcaa

SEQ ID NO: 197065 - DNA, 690 bp, Cannabis indica
acttgaattccacgtgtccattgccagaattgtggataacacttactaaataaggttctttaagcaattaacttttttttgcattcaaattactaatatatttacaataaaatttcctaacaattttaaaaaattagacatgttaccttaattaataaaactttaaatacttaataattttttaacgccttacaaaaaaaaataataactttttcttctcttttcccattacatcatctttttttttttataatacacctagagacacaagctcactaaagagtttcttctttctctcaaatactaagatccaacaacaagatttttttcctcaattcccagacctaaccctcaagatggctcccatcattcacaacatttgatagattggtatagttattctttcattgaactttagcatgacaaacagatggacaaatttggttatggttgacaggcgtagtcgatggaggaatgtgcgcctcccactcaacgagaaaaattaatttaccatcatattctcgtattttaaaaattatcttattttggcataaatttattgatgttgttgtgcttttgaaactgtaaattttaaacattgatcttcttctatattattatttggttaaagattgaaatttcttttaagttcatgttgattgatgtattttggtatttatttagtatttt

SEQ ID NO: 197066 - DNA, 1020 bp, Cannabis indica
ttttttttttaattttgaaaatgagaacatttttaagaagcctaaagttaagttactagagatggcaagttatatttgctctccctttctctatgtgtttatcaatggataaatttttatctctatttcttgtttaggagcaacacaaatcatgagcatgaccaaccggctcaccttcgcttaagggacccaaagattcctgaacttgtaaatctgccagaatatgctggacccgagtcacgttattgtcctgcccgtgtatacgagtaatgtcctacttgaagagccctgcctattgggtaactgtcttgttgattaattgcctcttctttgttgtcattccaaatgcaggtacaacccagatgaaaatggtcaagtaaagttacagatcaacgctcaaaattgcctgcactgcaaggtgagttagagagtacggataaatctttcaaatacgttgtatgctaacattagatatgcaaaactactgtcatttagtaatgggatgataaaattagttcacctagaaatgatactatgtgtatcattatgtactattgtttgcagtgagtaatatatgttttggtctgacattgttataatatgtttgtctcaggcgtgtgatataaaagacccaaagcaaaacattgagtggacagtgcctgaaggaggtggtggcccgggctactctgtcatgtagaataaattgataagcaaattctcatgtttctctaattatcccatcacactaataaatgttttcaagaaaaaaaaaaataaaataaatgtttctcaagctttaaataaagtaaatgctcaaaacacatattttcacaaacgtagtatcaatatcaaaatctaattttccttctgtattgcatcaaattgggaataatgtaacaaaagagaatggtatcactttgaaaattttcaatgcaattcgtcatagtcaaatagagtaaccatttcaaaatttaaaattcaaagggtgtgttttgtaataattatttaaccaattctttt

SEQ ID NO: 197067 - DNA, 1566 bp, Cannabis indica
agatcgtacgagctaagcctccggcgcgtgtcaccttagggcttatcctttttgaatttccctttatccatggccattggatcatatgcttaggtacacaaggacacgcatgctctgtacgatagcgtgtcgtgggagacaacctctgacatcgtacctgaaaaagtatggtcactaggtccatagtctgacatgtttaggtgaggcttccgtgggctaaaggcgtagcccggtttagtgtgtctcgaaatgccctggcccctccaagaaaactagtactcttctcagcagcagatggctttagttcctagaatagggagagactttgactctcgaataccctccgtgtagctagcagttagggaactcttcttcatagaggctcttctcacaaagttggtgcccttaccttcccaaaacattatttgaggaagtggggcagcagatgacatctaagccctccttagaaacatccacgtgttatcacgacaaaaatacgaataacatttaccccaagctttcggggcataacttggtctgggagcttgcggcatcttctcctaggtggcttcgagcacgtgagatttatgacgagctctttattatactgtgtcatcaacccccaacttaagtgtcactatttagaaggcataatttcttctattttctggtcagagttttaaatgttggcttttgagttttgtgtatgtacagggcacatgttctgtgagatgcccaaaaatgacagtgattagatttgagcagactttgcatttgctgagcacttttcacgatgtatgcaatgatggaagctaattgttggtaggctatacaccttctcagcttcctacctatccaactattagatgtctcttgggtgagcgagtcgaaccgtttgcttctcatggaaggtgcctcttcctagtacccaataaatacctttagcagccatcctacacttttcatttttctgtctgtcatatcagaattatgttaatttcattctttcctctgccttgcaagaccgtcttcatacctccatactcaggcatacatcccgtcagcaaggccgtagtgttaggaccaacaacctcattttctcttaacaactagtaagtgctctttactgttaacttgttgttgatttatgagggaattgtgtgtattacgtgcgattatttttcctagggatatcggtactgtgcttgttacctttatcatgagaggtggagagttctgtggtcccttgtcatgttgacccattttttctttcattttaatgtctggcaaattcgtcacggcagtgatggagaatactggatcttctaaagcgatatgtgacagtaggcctggtagaaaaaaatgaaggcttgaagtagcctcctctgaaactgggccccaccccagcgtcatgatctgccattgagactagaccagccccgatcgtacaaccctttagccatgccaagaataccttcagtggggttaatgttcccatggaagcccgtcccttttaaccctcttgacctgcaaaaggaaagggaagtgaacagggccttgaagggg

SEQ ID NO: 197068 - DNA, 1235 bp, Cannabis indica
aatagtttcttttatcagattaacataataatacaataaaacaactgatcattgaccatgaatttgcatctaaatttttcataaatttccttgcgaacaaaacatgtaataccatcaacagaaaagtgaagaaaagattccttaaaataacatgctatataatatatatctaattattttttttaaagaaaagattcaaatcagagaaataaataaattaattacacaatactatgtgtctttatacgtatggaggaaaagagggaaagaaaaaaaatgagggatttgaaaatgaattcctcaacttcataattgagtacatgataaaataagaagaattgatgaatattatacctgccattgatagactttgaaggaaccaaaccagatggatcaaagaagttagatgatccagcaatagttgggaccatagagaaaaaaaaacataaagattgatctgagtttattggtgtggttagaaagaaagagagtacacaccacctttaaatttaatcaattggacaccatacaataatacttaatacgtttattgctatataaccacataattcagcactcaaatctatgttaatgattatgattagccctaaccatatagtttttgattaacaaattatatgtaatcaagctgaagagagagagagagagagagagatagtgtggagtggagcccacatgcatggaaaaatgaaatggaaacttcacaagaaagtctctcttagtcacgtgcaccatgtcaaccactaccactattcatcagtcaacaaaagggcaaaattattaatacctaccttcttaaagggtaaaaatgtcttcaaactatcaccttattaccacacttttataatagtaagaaattagagagatcaagcttggaggaaaataaaattttcattatccaaaaaaaaattaatacctaataaaaatgagcataattttatatttgtcaataaatagcctagtggctctactttttttctagtttgaatcccgcctccccaatgtaaaaaagagcaatttgtggcaaaactcctttatattttaatttttatacacttaacgcccttattttatttttttatttttgaggcaaaatccccttaagtttatttttctttgtaaatttgatacgtcagttaaatattaccattaaatattaattggatgaccactatatacaactgtgattaagtaacagtaaaacctcgaagtcg

SEQ ID NO: 197069 - DNA, 926 bp, Cannabis indica
ttcttaatagcggaaggaaatggaccgagtgatgcagccaccactggtaaaattcttgtctttcttgttgactagatattcagttttttatcacatattatctctatccctcttttggtttatgaatgtttggcccatacaatttgagcttgttggatgcttatttaattgtcaaagtatgcatatcttaaaattgtcaaaattcattttctcgggtaacttagttagacacttatcagagctaagctaattaacttaaagagtcttaaacatgaaaaatgcattttctgttagtattattttgccattttagcttttctctccagcttaataatgctaaactcttctcaatgaaaagttagttgagagcagacaaagatgaaccaacttgtcagcttttcttctgaacaagggagtaaattatatcttgtcatgtcgtatgtgggtgacaacaactgtggcatgaaaaataatgaagttattatattatgaagggtgtggtattgtagtctgtgtttgttcaatgaatcttttgagcaagaaaacacttgatgcgtctagtcatggttttttccttaaaaattattagtaccatattaggatttaggattgaaatagtatcaaaagattgaaaaagaataagtatttaattacagaaggtatgatgttcctactagttaaaattgaaaccattttaaggggcttttgttttcattgctaaatcacagtatgtttcctgggattaatttaactacatttcttgctcagtgcaaagctgggtggagtggaagaatcatgtccacgacatttatgctatttcttgttatattgttcattgcaatggtttttttctttgacaaagtcacgtactgttaaagttttatcagtacacctaaccaactgtgcttacacgctacttttttttt

SEQ ID NO: 197070 - DNA, 1797 bp, Cannabis indica
agttttatcagtcccaaacattctcacgagttacacacattgactaaaaggactctgctagctacctagtaagtctctttctatatgcttgcattttatgtatatttgagtaattttcaaatttatatttttacttcaacaaccttagtagcaatattcgagtttaattatatatagaagaaaatattactactttatattattattattaaaaaaaaattacaactcaaaatagataaaggagtcatagtggtattttcttccaaaattttaaatgtaataaatggacataattttattaaagttttgcttattattttattttacatgacttagttatgtacttggttatttatttattctatttaggaataaaataaaaattatttgtgaactagttatgtaagtatggatattttattttcttaaaaatagtgataattatatcttatttaaatttatcttcttttaaattcttagaaaaaataaggaacattaggaaatcatgcctccaataagatcagttcgaatcaacggtaatagaaataatcacgtggatgcaactccaatacccacaaggggcggaggctgagatgatgattgacgtggaggctgacatggaggccatagcggcagggggaggtaggcatggaccactgatagcatcgatagaggaagtagcacttgaacaacaacaaaggacctcctaatgcacaagttgaaatacttctagaaaatcctcgtatacgcgaggagttagctcaagaaaaatgcaaggctatgagctcagaatgaggaattacgctagaatcaaaatccactataggaaacctagcacttcaaccaaccgcattgaatctagaataaatacaatgtttcaaacttgtgttggagcgatttaagaaacagcaacggccaatattcagtgggggctcagactcacttgaagttgaggagtggttgcactcaatggacctgaatgatagagaatgagtgtcttgtgctaccagcctacttaaaaaggatgcacaaatctggtgggaagtagtaagacaaagccacatcacaattactatgacctggttggactttgtagaagtgttcaataggaagtactaaagtactgccatactagctgtaaaggaagatgagtttatgaatctgaagcagaagaacttcagtgtcacggagtatgcaaggaaatttgactgtttggtaaagtttacataagagatcataccaactgaggtcctccaggtcaagaggttcttaaaggggataaaccccatgattaaaaaggatataaaaatcatggttgggaccaacacagtttatgctgaggtgttggaaaaagctctcgaagccgagttgctcgaaaatagtataaagaaggagaatgttgtaaagtgggaaagccaaagaaacaatagaggaagtcaagagaataagaaaaaacatgaggaaaatcacaataatgatcatcatgaaaagggaaaaacaatggtgcaatataaaaataatgaggtgaaaaagccctatgtagaattcccaatttgttccacatgtaataagaaacaccttggtgagtgtaagatgaagtcaggagtgtgctacaactacgggtagccaggccatctgaagaaaaaaatacccaaaaggacagaagaaggaaaactaagatgctcatgctcaagtgtttgctctcattagaggagaagcagccataagcaacaatgttgtctcaggtcagatttctatttatggaatgccttgcaatgttctctttgattctagagc

SEQ ID NO: 197071 - DNA, 1990 bp, Cannabis indica
cgactcatagttattacgtgtatatgtaggtaagagttagaaccgaaccatgatgagtctaaagcttaggatgaagattgtacacatcaagacggttagacctggagtgtctagggtcttcaagacagttttaggctcacttttaataatcgctagactacgacttttgtaatacaaatattttacgaatgaatgtaacttttaataaacgagataatttattatatatttaagattaaagtttaattatgaaaattttaattatttacgtttttcaataaatcttttaattagcaagtgaattacattattcaaaacatacgataacgtgcctaatttagtaaggtgttacagtcccaaatgccttccgccccaaatgtcgtatgccccttcctagttttgagaaaaaaaattgtagcaagaagcttgtaagtgtttctttttttttttttttaataattagtagtttatccattaataaagttagtaaaaagtaacaatctgagtttatattgaatattatacactcaaaattgtttgagtgatctttctaaagcttgaaaattgttggagcttctttcggtaatttttttttttttgcacttttggtcaaaaatatttgttaattaatcaaataatctttatgttaattaatttttgggtgaatagttatttagaaaactaaatgtgttgtaagataagaaaggtatgtttttttttttaattatgtacgttgttttattattgtaaaatatgttaaagggatatatatttaatacgtttatagttgtttgtagtagtaagtaatattagtaatataccatgctatgttatggtatgcttgttttagttgatgtgtttggttggtggtggttgtggaaataagaataagaatactatactaaacatgtaaatgaatgtgtactacatatatgataatctctacgtatacatatatacataaataattacgcaataaattaaatgatatatagaaagtgatgtttgtattgtagtactacaaattaagtagaaagtagtactaaggtatagaaagtgcctactaatatattattttgtgatatgaataaagtaaagtggtttgtcttggaatatgagacacaacaacacaacccatttcaattgaagaccataagatagttaggattacattttttagttgtaattaatatatataataagtttattgttttgtataattttgaattaaaaatttgtttttgaatatgaaaattaattattagagtgtctgagaagtttgtttttaaaaatttagaatgtatattgagtgtttttaaacttttagtttgtaatcttaatttattgttttgtttaattttgaattgaaaattaagtttggttagcgatatgtaaaataatggttagaacgtatatattaattttattattttgcttaaaattttttatgatatttttagtattgtatatgtctacttgatataattagcatgcttcattttttcaaagaaaattaaaatttgcttaattgtttattgcaagacgtaggtacgatggtttacttcttttgtttgataatattatgcatatgttaggagagtttaaattttttaaatatttatttatagcgaattaagatctgagataaaatatgtattggggtgataacagaagtttgataacttgtagtgaaataaattttgggcttatttgtttgtgtgcttgggagatataggaaaaatttattgtttgttatttattaattgataggtgcttattaaattaaaaaatattgtagaaatagagagaactctatccaaatttttagaaatttatatgtttttaactacttagtactaaaataaaagaattagtttgtaaactcaatacattgaccgtttaactaatctataatatcttttttttttttttgttcaagcagttagactcatcttttataatcaatttttatagctactttttccttcat

SEQ ID NO: 197072 - DNA, 696 bp, Cannabis indica
ttgtcctcaaggtgaaaatttgggaagcgagtatccatagctgagaaattttcccatgtagcttcaaattcgggtaaagatttccacttgattaacacttcagaatcagcaagggtgcccgtggttgtaaaacgatgttgaagcactgtctcgggctcaacgtgcaattctaggtctgatgtaagttgcggtggaatcgtgggagaagagtggacatcaccaatggctcgacggagctgggagacatggaaaaccgggtgtattgttgccgaatccggtagctggagcttataagccacggccccaaccctttgtagaacggaataagggccatagtatcgagcagagagcttttcattggatcgtttggctaaggtgcgttgtttgtaaggtctgatttttaaaaacaccttgtcccccactttaaactcttctggacggcgttttcggtccgcttgagctttcattctctgttgtgcacgtaagagatgcatcctcaaatcatctaagatctcatctcttgcagccagcagctcatccaccgacgaaaccactgcaataccttttttataaggtaatatgggtggtggatctcgaccatataatgcccgaaagggtgtggatttgagagacgtgtggtaagatgtgttatatgaatactcagcccaagacagccactttgaccattgtctcggg

SEQ ID NO: 197073 - DNA, 3210 bp, Cannabis indica
attttttactctttaaacttttttatttataaaataacctcttcagtaaaaataataaacggttttttgatcgttttatagtttatttatagttgtattatagttgtcatgatgttgttgttcttgttattttttgttgttttatagtttatttataattgatttatagttgtggtgagattgatttctcattgttttttaattgttcatttttacttttactgagtaaagtgtatttttataattttaaaattttagaagcgtatttttataattaaaagttttaggtcgtaaaattataaataaaatgagtattttttaaaatctcccaaccccttatcactattaaatgccaattaagtttattacgtaactgcaaagatacacatggcaacattctattcggtcagctattaagtaaataaatttagctaaggaaaaaaacaatttcaataaattaaatctaaataataaaagtaaaaaaataaaataatgaacataacctaaattaatttgattcaaaatattttaccaattaagtatcttgatgtaaagctatatgaatacaagattataaaattggcatggtctaaaggaccctgcgaatgctttgtctctgggactctggtttgacgatgaagattgtaattttctttttgcttggattgatggctggggtggattgctccaatagtgtagatgatttggtcaacttgactaacaaattggtagtcgatcaagaagacgactgggaggtaaatgaagaagcagcgacggactttggtgaacgatcacttatgggaagaattgtggctaagagagggatatctggaaatctctttccaaagtatgttcaacagaatttggcgaaatgtctcgaactggaaagtgaaggtgctggaaggctcaacagatgctaatttggttggaatttcttttcaatcaaaataggatgctcaatgggtgttggataaacaaccttgggttttaatggagggtttttgatccttgaagaatggccaaggtccggtaattggcaggatgccaaattggacaaattgttctcttgggttcggatctgaggattcccgttgaaggtatttactcttaacaatgttaaaagattcagttctatggcgggcgaagtggcggatattaaatggagcaatactcagcaagttaaataattatgtgcgagttagaatcgggtttccattgttacatagcatctttgtggggagtttcatccttctaatggtagcaaagcttgggtccaaattaaatttgaaaaactaccgttactctgttttaagtgtggcatttggggccatgaacaagttgattgtgctcaggagacggtcatggaatcagatgtggatggaaggttagttcctaagtatggttcttggcttaaagaagaggattctatggccaatggttttagagctttcgatctcagaaatgttgtggaggacggtgctgttgagaccaatgtcgatgtaaatcggagggacagtgtagaaacggcccacggagttgaaacgcaatgcccagttgatgttttcaggccagtggagggtggcgctaatggcggggctccgatgatggtggagcaggggatgggtagttttccattgagcgatggtgaaggagtcgtgggtagtgttaatcggggtaatgggattgaagggggtgatgaggtggcaaggaatgagcctctggacaggcccaattggagagaatgtaagttgggcaaaactattgaaggggagggagtgggacttgtaaaaggagttgggccacaattggttgagggtgggcattctaataatattcacttaagtgaatcatgcccaaggtcttcttcttcagtggatatcaatcaaaaaaccaggaaagggggttcgaatataggtgaggcctattgtgagactatcgatggagtctttgatcaaaaaaagaggaagtgtagtggatatgagagttctttacagtctcacgagttagatggctttgggggattgcgttcatctttgaaaggaaaggaagtggtgcacgaggttgatgttgttgcaacgggagatggctttgctcgaggtaaggtcgataaggcacatagctcttcgggtagtggtggtaatcaacggcgacggctctccattaagaataaggctcgtggggtgcatcgggggaaaaatggtgcgggtgaagccaattttcaggcagtggcgggtggcgatttttttggttcaactaagggtgaagggatcttggatacaggttctatggttgaggttggtatttcttcttctattgatttaccttctcttgttttcaatgctgcgcagggccgccgaacctaatgtatctactaagctggaacgtccagggaattgggaatccttggacgttgcgtgcgttgcaatcccatgttcgggaatttaacctgagtattatttttctgatggagagtaagctgggtagaagtcaagctgaaagagtttgtagtgtgttacagttttctaatttttgggtggtggatcggatgggattaagtggtggattaattctaatgttgaaggatgatatcaatataagggtagactctagttcacctgggcatattgcttcggtggtaactggggaggggtttcaaccgtggttctcacttgtttttatgggcatctggataaacaacaaaggaagttctcgtgggagttattacagaatattgcggggttgagtgcggaggaatttcaaccgtggttactcatttgttctttgcggacgatagtttagtgttttttgatgcttctttgatggaatgtggccggtttaaggatttattggacaagtatacggcggcatcaggtcaagcagtgaattttagcaagtctgagatgtgttttggtgcgttggtggataggagtcttcggagtcggttagctgctttgttggatgtgaaagtggttaataactatggtaagtacttaggacttccatcttttgttgggagaagcaaaaaggagctgtttgaagttattaagaatagggtgtggcaaaaggttcgtggttggaagggttctatgttttcagtggctggtaaggaggttcttattaaagctattcttcaagcaatggcgacatatactatgagttgtttccagttgcctaagagtctatcgaagagcttgcatagtatggcggtcg

SEQ ID NO: 197074 - DNA, 1784 bp, Cannabis indica
aaaaaactgataaattgcattgacaattgggtaaatgaaacaacttcatccatagtcaaacacattaaaattgtttcttttattttcctgacacttatttttattttttcccaacaaaatctcgaattaaccaaatagaaacataagtctaatcaagtagtagtcaattcaattttatgtggttcgacctcacctgtgtgagtaaatacttgcaatagtttcatacacttgcgtagattataattttgagcaacacccctatatataatgggcacatccttgaaggacgcaaagaagatatgactcagactttagcaaggtgaatttcccaactcactcattcggcaagaacactaagaattcttgtaaattggggagcaagtgttaaccctgaaaattagcgttgctagctctcaaggttagtcgacataatcaaaggactaacaaaaatgcattcgacaagcctcaacatacatttctcaaagtcaccataaaacttacgagtctcgagatgcgtccaagcaaggaccaaccccgtggtgatccacaaacaagggatggcaaaaggtgaggatgtgaataagtgaagttaagtatggggaccaagtcgcagatgcatgtgtgagtgtgtgtgtgtgtgtgtgtcgtcgcgtgtgcgtgcgagtgggggctcgcatgtgagtcgtgaatgtgtgaaggtgtgtgtcgaggtgtgtgtgtgtatgtgtgtgcgagagggggctcgcatgcgagtcgtgggtgtgtgagtgtgttgcatgagtgtgtgtgtgtgggggggctcgcgtgcgagcccatgtggggtgctcacagcgagctgtgggatgcatgtgtgtgtaagtgtgtgcgtcgtgtgtgtaagggctcgcatgcaagcctatggtgcatgggggctcgcatgcgagcccatatgcatgtgtgtgtgtgttgtgttgtgtcgggtgtcttgtgttgtgtcgagtgtgttttgtgtgtaaggtgaaattcaaacacatgttgaagagaatatcgttggaggaggaatccaaggacaatgcatgcaagggaaaagcgtacaaccacgcctcttgcaagctctgaaaagtaaggatgtacaagtagaggaggcaccacacttgcaaggtttgaggacccgaccaagggtacgttgcaaccaccaactctgcgacctgagactacctgaccactaaaagcgacagtttgtctatttgggaccaccatgtaattcagaccattagagcttataattatcccattctcaagtctgagagaagattggaaaatcactcttataaccatcatattaagagcaataaaattttttatttctctctactatgagatagacacttgaatttacattttatttttttcttcatcttaattctgtagagtttgattttctgaccaataagttaattaatgagttctcactgtcaacatatttatatatatgaattatttttattgctataaattagtcaaaaaaaattataatttattataatgtaaattttattcctatttataatttgtctataaattgaaactagcttttattattattatttttaagagtaacactttataattagtatgtctaagttgaaacacatcatagtttgaattaaaatgtccctaccctaacattaacctttatggaattacaaacgtactataagaaaattatactatatatctcttttaatttgatgtctttaatttttattctcttttaaaattttatgtttacctcttttttcaat

SEQ ID NO: 197075 - DNA, 921 bp, Cannabis indica
aaaaatgatttagtttcatagcctttatcccctaaattgaaggtttgatctccattcttaggtcacgaagaatcaaattgtatataaacttttctggaaaaaaaaagtgtataacttcaaaataaaattcacactactccatgacgaggtagggctgtcaatttagtcacagcatattttaacccctaatgtagacaaaaactcaatttatgctacaacacaaaatttataaaaatatttggattagaatttttattcaatcatttttatcacaattaaattagatagtgtttgtcttaaattattagaagaatagaaaaggatattctttcatgtttgttaattgccacaacttgcctgcgagaaccagaattttcaacttaaaataatagccacaatttcattgaatacgattactagatgaaagatcggtatttaataaaacaaatcacaataagagattcgaataagattttgctcttcccaccaaagtttttgtcaaatacaatcccatatccttaaaaatctttgtactacaattgtacagacatttatgtccttgtaaaatgtagttgtaagctagtggcaaatagaattacaaaagaagaaaataaattgtgtttacaaatacaaagtactgtttaactattgaaatatgtcttccactccataagtcctccccacaaaccacaagaatttcattgcttcaatatttggaatcgatgaaaaatctttgaagatggatattgatcaattaggtacagaaggagtggtccaattatgcattatgcttaagaaaactatccttatcaataccacaggtatcctcattataaggacaaatgtacctgaggtggtggatgaagggtttttcttgattgtgggcctaggctggcccacaaagcaaaagtgataagagta

SEQ ID NO: 197076 - DNA, 1478 bp, Cannabis indica
ataaacaaacatcttgccaagttgtgttaagttagttgtattttcttttctttctttgcctatatttgctcataataagtttaagagaatgttcaaagagattagtggtagtggtgcttaagactttccaatatgttatatagttattggtacaattaaatattggtctcatttaatttaatgtattaattttaattttgatgaaatatagctaattaatcataagaaatcatttatttaagctaagtttaagagcattgtcattggacactaacactatgtttggtaagaggaagaaataggtagatggagaggagaggagaggagggagagagatgggaggagacaacaaatccacttgtttggcaagattgattgggagagggaagggatagttggatagagaacaaatcttttcaaatttccaatttagacattttctttctttaattatttgaaattacaaatatactctcataatataatattaaaaaaattacatctaaggacaatataataatttcataaataaatagtatccatcattttatcactttttttttcaccaaacaacttaaaaagattgctactctccttccctcttattctacatcctctactgattctccattcttcctattttccatctttaaatggcgctctatgattggttaatgatatttctaaaacgttattttcttaaattatataagatttgatacttaagtatacttatgacaccaaaaaaagtgttaagcaccaataatattttttaacaattctctaccacattttaacttagagttgagacttaaaaattactaacaccacatttggttgaaatgacattttattatttttaaaataaaaccaaacaaaaaataaataaaaattattttctttttattctattcattttcattatttccaaccaaataccacctaacatcacaaattacttacatataattttctttagttttaaggctgatgattgtaacatatatttgacattaaacttttaaaatcatatttggcttattacctactaaaaaaattgtaaaaaaaaaaaaaatagagaatgtaattgaagccgacaacccaacccaagagaacacactccataaaatgggtcgaagagggcaactctaaccaggccaaagcccagcaaccatttggggtgagaaacgggccaggcccaattactccctcggcctctctcgagtcctctcctctcctccctttgaaactcaaagctgaccaatggccatgtttttgattgtcgaagcgaactcttccttgcttcagcttcaccacatcaacggtaagacaagtgttattaaccatcgcaaccacaattttctttctttctctctctaactatacatgttatatttttttcggcagggttaagctatgagttgtaaaaaaaaaacgtagaattgacgcttcttacttcttagagactataaattaga

SEQ ID NO: 197077 - DNA, 1719 bp, Cannabis indica
  modified_base (865)..(865): a, c, t, g, unknown or other
gggcagccattattaatgagtggagaaatgtggtggctccattttcaaaagggtttatatacataaaggccatgaaacatcaccatctttagagggtttgtccaacccaatccaatcaaattttttttttttttggctcacttaaaaatttgaaattgacatttggaataaaatgggtccttattgaaacaaagaaaaagcagggtttttattattattgttgttgttttttgtttaatgaaaagaaaaaagctggttttaaatgaacaaaacacattgaaaatttgtcttatgataggattggttaatcttaagaagtatataaagtttctccctatacttaaacatgagtacttgttgattattctatatgattcttagttgtcaatgtaataatgtatacttagtcaccacaaagtataagttcttccattgaaaaaaaaaaaacaagttgaaatattttcatgaaaagtggctctataattattgaggttagaatattaatattactattattttcacttccaccatgtgtagggaaataaagtaattaatataatactatagtacacaagaatttgaatcacttgaattataaaataaacaagctgagctaggcaacaaattaatgatatttgatctgaatataatattattagtagtgctcaatattaccataaatttgacacttttttgagtagatatccatttttcaatgatagtaaattaaaatataaaaaactcaaattgtattaataatataagaatttttttatttttactattttaaagtatttgttttttacattttatgaaaattcatatagcaactcaaaccctaaataataaaaaattaaaaaaaaanaaaaaaaaaaaaaagaagtatatagaggaatttgaaataacataatgacataaatgtgttaggcaccaatttctttatttattcattttttttttatttccaccaaacctaactcaactatcacttatgtgcattatttcacttgagaatatacaagcatattataattacatatacaatgtataaaatgaagaaataaagtctgaaacaaaactcatggagattcatacaagatcacatagtattaaataatgaataggtacataaaaaatatttggtggggtgtgctaagctaatttattgagatagagaaactaataataaataattaaataattcagtgacttttctgcatggaatatgctaaaagtttatgcaattataataatgtactaatggggtcacattagtgctaattaaaatacttttttttcttcttcttcatagctttgttgagtggtataacaactaggctctccattttccttacctcatatttgctcttcttttttttttcacttcaaaattgtcattatcaccactaacaaaagcttcaaactttggttaagcccaaaaaccccaattgagacttagccaaatatatggtacaacttatatctatggcaaatgatctaaacaacctaatgtatttacaaatcactaagaacccaaaaagaaaaatcgaatcttgaaaggattacaatgctctacgagtcgatctgtctcgctgattaaccttaaggtgctcaacatcatacaaagtagcggagttatgttggacactttaaaatactttggtatttctcaagttgtataccgacggggtaatcgaggtgtaggcacaaccacatcgc

SEQ ID NO: 197078 - DNA, 1289 bp, Cannabis indica
aaaaattttatgttgtaactaaatataactgtttttaatttctagtgttggacaagtactctttgttttatcccaaacatttggggcaaccttatttactctaaataaatgttgtagactaaatattaacacaattttatttatctaactcaaagtcaaaatccacaatcatatatgtgaatttgtgctaactttttaaagcacatatatatctcaaaggactatagtaccactaatcatttgtacttaattttttttttaactatttgaccaattccaacaattaatacagtttaataaaataaatagtactagtgaaaattaggagaggtacaattcccctctaagtacacaagacactacatgtcgatccttaaatataccattacataactatgtttatatatctatatatatgtatagatacatgtgtatacatatgtaaatagaatctgtaaagccaagaaagaaagaaagaaaaaggaacaagtcaagaacaaggtatagcagcatgcaggcatgcatatgatcaggtggtcctcaaatcctcatcatatgttaatattatttccaactatatgtacaacaagtacaatccttaattataagaccaaatttacttattttttttaatatatatatatataagaataataataacaaattaaaaatatatagtattttcggggggtccccaatattgaagaatttttatatagccagctgccggttgtcttataccaattgaagaattttactaaagacttttgaggcttttctattttctatatatatagttatatatatatatatatttatatatatgttctgaataagtaccaaacttactgaaggagacaaaatggaatgtgttccatattccataattcctttcgtccaaacaatctccaagaaaattaaagagcatctctttctctcccaccatttttttttcttcctttttaaattccttatagctaatatatatagtagctatatgtatagtttcaaacctttttagcttattagcttaattaggtgctcaagtcaaaagaatcttcttcttcatctcttcaaatcattctcccaaatataaccaattaaaacttacttaatttatctattttctttcttcctatttatatatctatatatataaatataaatatcattgatccaatcaaaattgattaatacataataatttactatcaaataatgtgacaacattgacaagtatattgaagaaaaaataagtccaatttaaggccaattcaattaaaatttat

SEQ ID NO: 197079 - DNA, 740 bp, Cannabis indica
ttttcaattgggtgtttgcttaaggtgcttcttcttggatctatatgtttataatgttatgtgtacgtacaaatttgataaaaaattttgtcatagttttaatatttacatttatcaaatttgtatatacaaaatttataaccttatccattggagaggttacttgtgctaaaatattttgacagtctcaaaaaattagaaatatatcagtaaagtgttcagttgtttcatatttcaaaaacaaaaaaaaaaaaaaaagtgttcagctatttctatttaaaattgctttgtagtatatctgattatcttacttgaagtaaatagcttacttttttttttttgtcagaatcgactaaattaaaatatctacatttgtttacaatatcttttccttgttttggtattgtcaatgccaggttggactttgacttgtgacttccatttggcttgcttgtgaagatataagtttcacttctacccataggttagatcattatgtaaatgtttcaatttattttaggttaaattgtgtttcatttctaaatttggctcacacaaatataataaagaaaataacaaaataatatatattcttatataattttgtttatatcattcagagaaggagaaggcacataacttgaaaataaacttcttaagcagaccattacttatatgtctataatgctaaataatacatataacatgaactttaaaatgggaaattataataaatggtc

SEQ ID NO: 197080 - DNA, 1758 bp, Cannabis indica
tagtaaaatattcccaacatttgaagcattcgttcaagtcctttatgcgggcccaacctttttagacttgaccaacatgtcacttacatatacttccatgttacgaccaataagatcttcgaacatcttatttacaagtctcttataagtatcccttgcattttttagtccaaaaggcataattttgtagcagtataggccaacgtccatcatgaaactcgtatgttctttgactggtggatacatttctatttggttataacctgtatacgaatctatgaagcttaggatctcatgaccagctgtatcatgtactagctagttgatccttagaagtgggagtagtcctttggacacgccttattcatgtcagtaaaatctatgcataccctccacttgttatttggttcaggtgccaagataggattggatacccagagctggtagaaaacttcaattataaagtcattacagatgggtctattcccaccatatcttcatatgactagggaaagacatcgaggtttgcctttagaaatttaatcaatggaaattttaattctagcactaaaccctttttgatcttcaatgttctagtcaaaagagtggggtctctacttcttctaactcctctaccagtcaaaagttgtatgaaggatccctaaagcaaagatctaagtttgcctcctactttgggctgaacttcatttctctttgccggactcttggttaaagctcttggcaggcattttttctttcattccttctgacaaagctacgttgtagtagtgttgggttgatttttgaactccccttaggcttcctaccccattccatattgggaactttaggcataggtggtaaattgacgttactgccttcaagttgtacagggctggccgacctatcattgcattaaatgttgatgacacatcaatcacttcgaacaaagccatcagtgtccttgttgtgggacattctccaactattagatgtactaggatgtatcccaaaggtggaaggccttgaccaaaaagtcgtacattagttgtgtacacgttgctcgctttatcaattggagccccatctttctataggttgatttgaaaagaatgttggaaaaggctccattgtcgagcatgcacctagaaattgtcatgttccgtatttgtgcaattattactaggggtcattatgagggtacctcacctagaaagcatctccctctgtgaaggttatgcaatgctctccaagtttaagatgcttggaatctctttcctctatagctaggatgtcgctttttttgctcatgacggagggtcaaagcatatcattgtatcaccttgctcgttttgcttaatatatggggtctaccaattaaggaccctaggtgacccgccattggcagtggcattgggtctctattttggtcaccctgctcgtgaatttgttcgttctgcacataacgacgtaggtgaggattttttttcctactcaagaattcaatctccatatacagttgcttgcatttgtttgtgtcgtgactgaaatcattatgaaatcggtagaatttagaggtgtatgtcttgttgatgtccttcttgatgggaggacgcttcttgtatgagataacagcttgggtggccatgtatattattttgggagtttcttttaggagggtgaagcacatatacttctcttctttctctgtttagttttgtctataggggatttcttaaactttccctttttgccatt

SEQ ID NO: 197081 - DNA, 964 bp, Cannabis indica
agaaaaaaatgttgaaagtataaatttgtaataacaaattctataaaaaaaaatgtaatagtacaaatagataaatcaagttgtcaaaactaagtaaaaaagtatttggtaatacaaaaatacaaggaggagttgatatttgttttgcatattgcaaataggtcaatattttgttatttttcggttgttatttagttgtctttgggttgttttctagttattgttattttatttgttaggttattctagagttacttcagttgttttttagtttattgaaatacaatatttttattaattttgaaactttaacatggtatttttgaatgtttggtacagtaaaaatgtaatataaacaataaagatgggtatttttgtaagattccattttttatttttgttctctcaagaaattgaattgttgaaaaattaggtcggcccaataaaaaaggaaggagagtagcagaagtggactggtctaagtaaacaaaagttgataagaattatcattttttttttcttttgtttttgtaagtttgttttaaactattttacgatattaatactgtatggttacgtttatatagtaaattaataaatataagtgaaaataaaactaaaacaaaaaaacataaaagagtttattatacatcaaactttaaattagaaaatgaatacgatggatgcaaagtagtaattatagtttatattgggattagctaagatggaaaaaaattctattgttttaatggaattattttattccaaattaggacacttttttaggttgtgactttacttcttagattaaattttttaacatcatctataatttaataacaaaatttcatctataatttttatacattaattaatgcatgaaagcaattattatttgatcattatatatattaaaattattttttaaaaatttgtttatattaataaattttctttttctttt

SEQ ID NO: 197082 - DNA, 611 bp, Cannabis indica
gggagttcaaggtctcggcacttgtaaaatttgattagaagaatatattataacagttgcagtaaattcaaagagggagtctttatttgtataagtcaaattagttttgtaaacacttgttattcatctaataattttttttcgctgggcgtgaccccatagactaggagcaatgtaatatccaggaaaatactatggtatttaattgggcatgttttattaaatatgcaaattactcgggtaatgaagtaagattatgatcttacttatgtttattagtatgaattgattaaatgattaaataaaatgtaatttattaattacggagaatttattggaataacagggtattatggataccatttttagaataaaatattttcagacccgacaactttgggaacatgatagtgtggtcagaaatatcatgaaaataaaggatggattatggtggaagtataccagactagtttagaattttaaaatatcggtttggtggattagttagaattaccaaaatgcccataggtttttcagcaatttaagttttgtaaggaggggtagaatggtcatttcttatgattggttctaatttgtctttagtgcttttt

SEQ ID NO: 197083 - DNA, 1163 bp, Cannabis indica
gggaacttctccaatgttcacgatctaacgtcttatgtctcatataggttgtggagcttgattttctctaccctagcgagggaatccacagacgttgggataatggttaccgcataacatcaattgccgcaacttgggaccaatctgcccttattcttagcattcccaggcgtaaacctggggatgaaactcaggaaacattgcgtacttctcaatttccaagcacacatgttaaggtaccgtcccaaaaaaaccttatttcaagtcaaaacttgtagaaattaacacaatcttatcaaccgtgttttggttttgtttgcaggagaagtgggcgaagaatctatacctggcatctctatgctacgggcgaactgtatcttagagtccccatcggcggttattctaaatttttgcgtaaatccctcccctcccattagttgggtgccattctcatagtatctgtaaaaaggggttgttgtgtagcctgtaaaaatttagctgcagcagcagattaaaaattgtttgttggggttctctagctgcagcagccacactcactgacatgtttatgttaaaatgatttgtatggtcttaaatctaattagttctgaattacttcctacatatatgcattgcatgttaagaagtatattctattatatatatacacatttatatatatttattgatatgaacagtcaaattctgaattttgatgaaaatgcagctaacttttgcttaactaatatgtttttgatgtgctttctaaacatagtaatcattggtcatgggcatttttatttttcttttttatctaagagttgctattagatctgattagtctattttttctttttcttttaggttgtggtcatgtatagctaattattaaatatatttaatatttattgtttttttttctttttacaatttaaaattaaatattaaatataagcatttgagctcatttaagaaacaaaatgacaattggacgttaaatgaagtattttgtaatttttaaaacagtacaaaatcgaaaattgagttaatttatatttttttaattatattaattcaaaatcagtgtaatgcgaatacatgtaaaaagagaactgttgttgggtagtattagtgctcaacactttttataggtggtattttat

SEQ ID NO: 197084 - DNA, 1057 bp, Cannabis indica
tttgatcatatttagcatagtgtcattaattgttatggtttatgatcaagtgggtagtggtaaagaatcaatcaacacgtcttgtgtccgtgaagttggaattttgatggggtttattgctttatttcataaaaaagaatgtcctatttgtcctgttgaacgtcatcttttgactctttgtaccagaaagttcctgccatagttcttgattattattgttagttaactgcttgcccgtttgtgttctgcatcatcatgcttgccatagatacaataggattcgaacagaaagcatcatcttcaaacatggagtaactaatacttagatattgtccaaccatccttgctacttaatttattctaactgtatagacacatttactaacccatactgagaaagggatgagaaggattacaaacatcaatcaaggattgtctttctgtatttatttttgctaaattatgtttggcatataaaaaatttgtgttttagttatagtgcaactgttacacctgctgttatctcttcgatgttgaaacctgagaacccaataagttggtttgcacatagtagttagaaaagtgaccaactcatctgtacagcgctagcaaggaaagaattctgataggaatgcagatataaaaatggggattcagccttctccattgatattcaatatcagaaaatacaatagttgtaagatagacagggaaattcgaggatcccttaagcctctgaatagatttctaatgaattcccacaattactaaataattccacacccactaacctccctttctctatttatattattcaataactagagtattcctacttaattccacaataaagcagctgtcctatatcctcacacattcaagaaggagatgacatgaaaatgataaacagcatgtccagatttatctccacttttgttgtaactccccacctattagataagatatgatttctgaattcggattattaaattagaaatcagattctaaaaaggtcatgagtccttgatcctttatcaaggcggggtggggtcttacg

SEQ ID NO: 197085 - DNA, 625 bp, Cannabis indica
ttatatgccttaagctacttgaggaatatccaaaactagttggcataatctttgtggacaaaaacagaaaaaaaaaagtttcttagaaaagactaaaagagtagattgctttttgttctatatatataaagcatggaagaaaacaaattcaaatccaccattgaactgaacttttgaagatagcttcagcagctggttaaacttttttgtatcatatcctagtaaagtttcataatgggttaagtgtaatatgcttgtcaatcattaagggtcacttcattcaaaatttagttagaaagtctaagatgatatgctttgtaaaaattccttcttgaattgagccattataacaaaataacccattcgcacttaaatttgagttatgtctctttccattaaaaaaaagttaacagagtaaaagttgattaactttactaggatgtgatacaaaagatttaccctttttttagcacatcatataactacggcaacttttagttttttacgccaaaagattcaacagaagagaagaatggtgattaattattacttgtgatttaattttggttgtttaattaatcaacagagtagtagagaaattaagacaagttgattattagtaatc

SEQ ID NO: 197086 - DNA, 1224 bp, Cannabis indica
tcttaaatttgtggtttttatttgagtttttttttcaatgttttctgttaatattattcatgatattcttttaattactgaataagagtaattaaggcctgcctaatgttatcatgtgttgtcaatttaagcttattattataatattatagttctttgtcattgtttatagttttctggatatttgttggtgacccaatattgtaacttcacaccgtgtcaaaattttcaaaaaggatttttatgatatgaagatttttattaagttaaaaaacagtaagaagattaattacttttgaaggaaacatagagttattaaataatatatattatatatagttagctttatgtggttcacctttttctctaatcgaaaatccatggtgatggtgactttctctttaaacagatatccaaacactttggtatcctgggatttttgttcctctaatttaatgatcaatatttaaatttatatatatatgggaagctacaactcttttgagactaaatccttttcacacacacatacacattgaattaaactcgtgtactcaaatttccatgataatgtatacgttctgatcgtcatcgatctttttaatgcaaaaaaactataatttcaaaaatgggaccatatttttttaaaatgggtgtctatcaatgtctcctttccgattgagatgtttttcactttttcacagtagtctttaagtcattttccttaatccttattcatcatctaaatttaactacacataatggttttacactttttttagttatatgccatcatatttcgtcccagaaagctaagtatatagtactatactgccctgtaacagagaaattacaagtagtactatatatatataactatagaaaaaatatgtactataccctcaaatttttttagaagagtttttttttattattttgtataaagttttctggtttaatttgtttttataattatacacggtgtatttattttagataacttataaatttaaaaaaaaaatattaaataatttactttaaataattatttatcacgtatattgaaaaaaaaaaatttaactcttacaataaaatatttaaatattattattatttaaagaaaattagtattttattaatcaataaaataatttaacaagtattatcaccaatatattacaacgtatacaattataaaaaaaaaaaaaataaaaaaacaaaaaa

SEQ ID NO: 197087 - DNA, 1071 bp, Cannabis indica
tataatattatataatacaatgcagtgtaataccgcatatcaaaccaaccttttatttttttttgaaacaaatttaattcaagatttatacaatctattagaaatggtctaatactacactaatatatcactttataattggttaattattatttttattatttattagcttgtacacaaaaccatataaggttttttttttttcctcaaaacaataataataaaaaataataaagcatactaccttcgagactcctcctcgcctattccagactcaactagattttccttcattttatacaccaaaagcacgaacgatctagaaattaaatcaaacacaccacccatatctatatataacccccctgatccctatacattactccatcaacataccaacaatcaacaaatctcaaagcaacaatttttactcatccatatatacaatacaacctctctctatagttgcctcggtttcctacaagccaaacaaacaccccaatcaacactaactaaaatggccaaaccaataatgaaactccccattgcacttctgattctcctaatcatcacagtccaatccactactgccctagttccctacacgggaggatcgctttgggacgtgatgctgaacaacattccctccgatgaccctttcagaatcctcgaacacacgccctttcctgttccgactaaagcctcagagcccttggccttggcacgtgcggactggaaggagacagcgtccgagcacgtgatcgcggtggacgttccggggatgaagaaggaggaggtgaagatcgaggtggaggagaacagagtgctgagagtgagcggagagatgaaggctgaggaggaacgagagggcgacaagtggcaccgttccgagaggatcagtggaaagttctggagacgcttccggttgccggagaatgcagatttggatgcgatcaaggctaagcttgagaatggtgttctgaaaattacagtgcccaaactggccgaggagaagaagaaacagcccaaggttattgatatttctgaacacaaggctgaattgtgagagca

SEQ ID NO: 197088 - DNA, 915 bp, Cannabis indica
aaaactcaaacccattaatttttatgtaagtttcgaattaaagtactatgacctgttttactagccctaattttttaattattatttttttatccatttactttctcacttttgctataatatttcacagtgtcagtataatagtctttcgaaacttcaattttgtttccaccctaaacaaactaagagttacgaacacacaattaaattaaatgatattcaccaacttttgtcttcttcttatctgaacatttttttattaattattatcttatttgaatgttgtagcaagttgaaaactatcaattgaactcaactatattaaaaataacaataaattattataattatatccaaaggttgagtttttacgaaagctgtaattaataaacacaaaaattttataagtaaagtgtataaaagtatcaagtaataatacaaacaaagactatttatttttgttggtttaatatttgttgaccactagtatatatgatctctacttatccaatgtagatgacttcacatgcatctctggctttttcttatttctttttaattaatataaaaaatgtatatatcactatcaatatacgtgttacataaatgtacgttatgtatattaaaaataacatatataatagttttcttttttaagctaaatcatctcgactattattttatttcctcttcactttttaaggttaaattttaagactaattagtaattttttccactgaactttgacatgtagtaaatcgtgccccctaaactttttttgccgttaaaaattccctcgaactattgagattattaaatttaaggacttttgtctaatttttataaaataattctaacatggatgaaaattcaagggacatgatttaacacatatcaaagtttgaagagcatga

SEQ ID NO: 197089 - DNA, 808 bp, Cannabis indica
acaccatcatcaacatcaacccttttatttcaaaatttaaacactctttcattatattactattaaactcctcaaccaaatccaaattccagcgccaaacaaacaactccctctctctctctctctccatcggccatggatggttacgatgatgctgagcttcgcgtgggactgcctcttcctcgttctgtagagaatttgcttcacaaaatttgctccgagaagaaccagtccccgccgaaagccgatgtccggcggaaattggtcgtagcaggcgaaaaagaagctctacaggttttgcagatcgttgatagagaccaggtcgggaacctctccgcatacattgttgacctgcttggaaattcttcatcgccgtcgccgtcgccgtcgccgtcgacgtcgtcatcaccattcctttctccatctccttcgctttcgtcttctcgttcttctcctcctcggaagagagtctctgtttcttattctccaactcgaagaatctatttctcttccacttccgcaagtgagtgtgagtcactgttgcttttttttttttttcctctctctctctctctcttggaatgcccttgattatgccctatggtgtcgtttcatggtgaaactgaaacaggtagtggctccattccttgctcgctcagttctcggactgagaccccctcaaagcccagagaaacgggacaacgagaagtattggaagctttgggagaacttgagtttagaaggcaattcttaatcctcaattacagtgccgggtactaatattttgcaatttgtctcttcattcatg

SEQ ID NO: 197090 - DNA, 1350 bp, Cannabis indica
gcacagactttccatcatgggggtattttcatccattagtgttggagggttcagtgtatggatttggtccctaatttctagtggtactcatctcccctgaggacttacttcgcgaatctgattgcaaaaattgggattcacccttttcaactaattccttcgtcatataggctcttggttgggtgatatgtgatctttaaaattaaaaaactagaggtcccttccccggaggagatcctttacttctacagtgttaaggccaatcccatgaggatagaaaggtcaaagctggatttcttctgactggataagtgccaggactcttactgccctatttgttagatggctcacactcatgacctttgagaatattggttcatttcttttgggtttcctactagcagggtgccatctcttcggttaacctttaaacttctaggtattctaatgatttaccttgagttttccttctttttaaactctactaatttctatattcagactaacatatttgatttgaagcagagcttccccctcaaagtgttaggactaaggagataatcaagaaagaagcttgatatagggccttctcgaaagagcaattgaaggttggggacctggtgacaactgaactcctctataggttttgcttggttatgaaattccagagtattgacacagtgagccttcgaggacaacgccaacctcccaaggaagtgaaggaggcaattgccactcacttggctgttaaaatcaaaaaggcagccaaaaatgataatgtcttgaactctgattgggggttgtgccatcccaatcctctgctgcttatcctgatgtggggacaccaagtgctagtactttgggaagaggtaatggatccttgcgcatcctccatatccatagcctgagacgcatgtcttggggaatcaaggaggacttgacagatatttcttaggcataaaccaccgtagataccccatgaaggattacatagacaaagtagaacaaataattaaaagcccaagaaattcagggactcctttggatactgtcaaagtagaccctttgatggccatgtctctgctgaaatttaaggagtatggcagcttcattggtcataggggcattatagcttttgctcgtgaacaacctacaacacttcgctgaatggttgcacccacgcccaaagtttctttactagattcttcttcttgacgctgctattttccatataattgtatgacttgcaattgttccttatatttactcatattgttgcttcatgtgcatatacaccagaatccgtgatgttcaagtattggagtagccagatctcagctgctatggaca

SEQ ID NO: 197091 - DNA, 1948 bp, Cannabis indica
catcgaggtaggaaataggacactaacaggatttgaagagggaaacaatggtgatatggataatgtaagggagagaacatataaataagcaagcaaagaaaagggccacagagaagagtacctggagaagaaaggccgcctcgaagagagaaccggcgtctgagccatctcttcaatgcttggagagacggtctggattcggagatgatacgcaatgatgatttgtgggtgtgagacaaagagaaaccaagtgacggttggtttagctgtagaagatcgattagaggatcgaaatgagtagaggttgtgcagagaaattaaatgctgaaaagaaagagccgccataattaaatgcaggtgtgagagagagatagcattaaacaacgactgagctcgagaaattagggggagatgcataatgattagggtgacgtattagggtaataaatcaaaggtcaggggaaagcaattaatgaggctaacaagaacaaaagggaacagcagaattaaagagatgataggggtaaattaatgcaagaaaagcagaaaagaaacaaagagaaactaaaagaaagaaacaaagaagctcaaacctgtttgagaagaaaatcaaaagaaagaaaaaccaggtaaaacaaaccgaggttgaaaccagagcaaaacctgtaggaagcttcaagaagaagacaaaaactcttttttactttggatatttgatactggttccaataatatatgttgaatatgttttcgagttacgactgcaacaacattataaaataaaatacttttatcgctacttttattataattagaatcatatatatacaataatttcaaaaattaaaaaagtttcgtcggaaatataattttttaaaaatcatcataatactatgcaaatttgatcaatcttatattacttatatatgatattatgctaggccaaaaagttcatcactttatttaaaagaaaaaatatatgtatatttataaatcataatattttaaatttacccatgtttttgcatgcatgtagttgtacgtacgtatatgcacttttgctcgacctaatcgacaaaaaaaggaaaaaaaaaggtaaaagagaaaaaaagaagatgtagggtttcatcaaatcataatatatatatgttcacaatcacatcaaactcatatgtttaacattatttagtatattatacgcatgcatttatataatatatattaatataatatatattttttgctatcaattaatatatactatgtttcatcactctaatttaatttctttatatttagtttgtcacacttatatacgaatcaatattttattttttaactattttatttactagctagaatcaaaatctttatcatcattttttcatcctcaaagacttaaccctataattaaataataataaattaaccaattattattgatagtgatatatatatatatatatttatataattaaactactcaaatccacatgtgtaataatgagttgaccagctctggctccttgtctaggttatatatcacaacttattattttaaaataataaatataatcaaggtcagaatttgtaccaaactataaagaccattaatttatataatcaagtaatatgttaaatgggacaaaatctagcagttagatgagcaagaaccactaactatattatatatttgtattacaaagagacatattaaaataagtgtatgagccattgggaaacatcaagtctcatataaatacacatatataaatattattatagatgcatggattatatatgcatgttatagtaataataattacatattatattactatataagtacacaaaaaaacagagaagggctcagattccagttcttggattcccaattaatttttgccattttgggtttgtaattagatattgcaaccccatatgttat

SEQ ID NO: 197092 - DNA, 1183 bp, Cannabis indica
aataaaaaattacattacattacaaaaataaatgatgtaaataaaaaaactatgaggatgctgatgaagaagaagaagaaacaagcatgtcccaattgcagacaatgtgaccgattatcacagaaatatcatccattttgcctcctttatgttttcttccagcctcagcagaagcaatggtataaggacacacaccatatctatccaatgacctatagtaagcagctccagctattgcaaatgccaaatctttatacttattattatacttatcatcatgatcatccaacttcagctctgtcttaataatgtcttgtatttcccaatcaaataagttgtccaataatccatcacttcccatcacaacaacatctcctttcttaacacccaactccatttccacagcacattcagggccatcactcctcttatggtttcccaattgaaaaggacagttaaatcgcttttgttgagttggcgatttgtatattaacttcccttctctaaacaccaagaatccactgtctcctatgttcgcacctctcaacataccgttgttgtgtgttacaacacacatggttgacgaaccttcaagattactatttttagagaaagcttctctaatgatagttttcggatcaataatttcagataataatttgttgttgacattagtggaagagttaacgattagtgatcgagcatatttacccgaatctattccatttttgtcccaaccaccaacgccatctgctactccaatagtttgttcatcgcgagacacgaaatgagcatcgtctcctaagggtttgaattcgagtttgctttgtttgggtatgtaaaatgaagcgcaacgcatttttagaagttttttcttaaaaataattttcgaacatggtggtttcttgtctacattaattttgttattcatgattgtcttttgttttgtttctttctaatttataactaataaaagtgttaattaactataatatgatcgaacacttgatacacgatcactttcatttgctttaattaatttatagtagtaggcgctgtagatattatactaatttgagtaggattattagtagatattatactaatttgagtaggattattagtagatattatactaattaagttaaataggatttaaggaaactacgtttttttttttttt

SEQ ID NO: 197093 - DNA, 1958 bp, Cannabis indica
gccaaatttcgggtataacagttataaaaagcaaagaagaaataaatagcaaagtgtctttatgttgacagagaattgatgaagctttaactgattcattcttagataatttattttttgattctttttgacagaattaagtcaaaattcttttgactatactattttgtaacagatgaaaatttgatgttgacttacatttttagtccatgtttttatcatgttcatctgtaagccttttctttgatattacacttcattagctataattatttgaagcagttaagccttagctatttacagcaaaagagtaatatagctacttgattgattatacttcagagttgagcttgagatattctcttgcattttttggtcaatttttcatcttaaatcatatgaatagaaaacttgaacaaaactattgcagaaccactcaacaagtctaatctaataaaaatggttgatgtattttatttaacgtatgaatataatttattcttgactcaaaactcctgagtcttggacaacaattctactagaacacaatatttttatccaataaaaccaaagtttgcaattgcatgcatggtctaatcttgctgaattttctagtgtttttgtttgtgtaagcttacagttgctatgttgagactcttcatatacaaccaaattttctaattgcatggtccaatctagctgacttttttatagaggtcggtgatcttaatcgagctctttagtattacaaggtatttacctggatcactttgcatggacatatctttatgagtggagtgtatgtgagtgtttacaattgtatattcatgttacaaaattctattgacctgcatgactaagttataacacatgagccatttataattatatatgtttaatataatgaaactttgtagtaatcaaaatataatgtaaaagtaacatgttaatcttatagatatgaatctgtactaaactgtcaaaagacatacaataaaaagaaaatagcaacattttatgtgtacaaactttcttcattgccacagagatgttacaaggcaatattgtttatgttaacatgactttctatccctttcaattatttataagcagcatggaatgttatcttagcatcatgtaattcttgcttttatttgttttttaaaaaatatttaattagttgtatatataatatttttttttctgaatgatgcatcatgtggtggcattactcacagagatcaaaagaagatggtgtgcttaggcatcctacagatgctgaagtatggaagcagtttgaccggcttcatccgtctttcaccgttgaacctagaaatgtcaagctggaattggctactgacaattttaatctatttgggaacatgagcaactcttataaattgtggccacttaattgtgtcccatataatttgtcaccctggaagtgcatgagttttgaatcgttattgttgaccttattgattccaggtctatcatctccttaaaaagacatggatgtgtttatgataccattaattgatgaactgaaatagttgtgggagacgggtgttcaagcctgagatgcatacaatggaactatattttcaatgcgtgcagccgtgttatggacaataaatgattttcctacttatgatctaatgtttggtttatgcacaaaagggtacatggtgtatcccacttgcaatgaacacactccttccgttgacctaaatagtaaggttagatatgtgggccacagacattttctcccaatgaatgatccaagaaggaaaagcaaaaaatacaatgggaagcttgagaagagagcactatattgatgggggatgatattttatctcaattggaccaaattcaatttcatttgactagaaaacacaaatagtttgggggtgtgaaacgaaaacgttctactgaagtactaaattggtaaaaaaaaa

SEQ ID NO: 197094 - DNA, 1634 bp, Cannabis indica
ttaacacattagattaaaaaaaaaccttctaatatctcatattcctaaatgctaataaaattatcaatgcctattcaataaattttatttgttagtgattttattataagatcataagaattaggttggactaatttaatgtttattatccatgtaaaattattatgttttaatatatatctatattttaaaataaaatcaacttaaataactaaaatgaattggatggatccactctaatcgaataaaaaacttgtcaatgcatccaatgattgaaaccgatctaattaaatacatccattagatcggatcagattggatgattcaatttgattggattggatcgtataacaaaattcaatatccaataagtaatcgaattggatcggttggatccaaatctattaaatgtgagccaatgaatacccctattttgagaaaacacatggtaactactaacttataattccctaaaaataaataattagccaaaaaaaactactaagaaattttcacttttaattcccatttcaaatttatttatacacaaatataacgtgtggagtaattatttacatgatcaaaatcaaaatcattattaactcattatcatcatcatcatatttcatcataatcttctctaacaatcaaaggctttctctctctatctctgtctctaactctctgtttaagttcatccaaaactccacctttcttcttcgaaccctttctaccaaatttcttaatctccgaacacaactctgtgatctgattcactatatctcttcctccaaacaaatcacgtctcgaaaatgtactcttcagcccaggaattcctttagatttcacatttgattttccaaatggctgataatgtgaagtgtttggattattattttccctgttttcttcaaactttcccggaaaattgaagggttttgttttctgggattttgttctcataacatctctgaagaaaaaaaaataagtgaaaattaagcttaaataataattatcaaagaaaactaaaaattgattcttttcttcttattctttatacctttgatttgtagctctaaatgaaagaacttcagaaacagataaagaccttaatagcttgacctgaaaataaaaattgaaactttatcaataaatttatgaaagattagtttttctttttcttgggttgaaattaaattaaaaatagaaaccttggaattttgtgtgggtttaaaaaaatcttcaacagtcttgggatgcttacaatctgtaaagaaccaaaaatagaaatattaaaaacaaatatttgattttcttagtaagtttctcagcaaccaaacagaacaaggaacttactcgaattgcagaaccaagcttcatcgtcttcttccacaagctcatctggagcagacaagtcaacccatttgggagctttgatgttctcgtaagttccatcttcaacgaactcggattcgatgctgttccaatcgatgttttctgggtccatctgcaaaaaatgaaagagaaaaaacaataagaatcaaagaaagaaaggaaaacaaaaataaaaaattgaaatgtgtaatggggttttggaaattgataagtgtaatgatggtgattgagatttggaa

SEQ ID NO: 197095 - DNA, 725 bp, Cannabis indica
tctctgctagggtttggtttagttgtagccgtttgtgtgtttagagaaataagataatatatatatgtatgatgttatatgtttagggtttcttgggataatatatacgacaagaggttaatgaaaatgggctgtcattttagggttttgaaccattgatagtcaacatagggtttgactggaaaaatgacaaaattgacattgcttttgaatggttttctttgctgtagtgtagggcattaattcctacagcatccatacaaggtgtgttagacatatatgaacaatcctatataaatgcagaacaatagattcaacgtatatatgatgagatgatcgaatagtttttatagttcaactgttggtttctgtggcaatgcgcttgcagctgaaatgaaagttgtgtctcatggtattcggtgggcgatggatagggacgattttacaattgcttccaactccaaaattctggttgaagctcttcgtgacaagaagacccctgactggcaacaagcgcctggtttttattctattcttcagcttttaaattcatgctctaattgtaatgttgtttttgtgaaaagaaatgctatcactttcgctgatgaacttgctaagaatgctagacattctcagagcgattccttgaactgtaaaggggagggatttctccctgtgaatcgcactctcttttggtgttaatatatccgaactgaggttctttt

SEQ ID NO: 197096 - DNA, 594 bp, Cannabis indica
taacataattttttatgatagcatttatttatctttaatagtataatattcttatgttttgtcgaataaacaatctacataaccaagcattctccaaaatttaattattgaaaatgctataatatggacaatatttataattgctaaaatacacacttcatcttaaaatatttttttttattttttctctcatccacgtgagttttgttaatttttcttaaaaaaaaaatactccaatagggtaatgaaatggaatagaatggaaatgaaaccatcttcgttcatttcttttgtttggttgcatattaagatattgaaatgtcatttcaatagaatgatctatctactattttggtagaatgcaaggccgactctgagattgagtgaaccttaggataataaaattattaggtcttttatttaaaatatatgtgatatttttaaaaattattaaaaaaatatatatttttaaaatgaaaatattttttttgggctcctaggttgggtgggcccaaggcccgagactagttcgctttagctcaggcccgaccctagtagaatgactattttattgagaaatataagtaaatgacc

SEQ ID NO: 197097 - DNA, 2498 bp, Cannabis indica
accatttatacaccttataaatgtataaataaagttttcaacaactataattttaatagctatcattcattcacatttataaataactagtaacatcttttattaatttaagagtgaaaaagtggtgagggttacatattcaaatgatcatcaaattaaaagatttacaacttcgattttgtgatcattctacacacattttgtaactcaataatgtatgttacaatttgacaaaattaataatttatcacacttaattatttgtaacttaattatttaatctaaacattttattatataaaataatatatataacatttgtagaaaataattttataacacaatattttatttaatcaattaaatattatattacaaagtaatataatattctcccacttgattaaataactccactctaatagaaatcattgaatttgtgcatagtgtaaaatatctttacaacttaaatttttatttgagtgtaattaccacaacgtttgtcaaaatttttgttgccataacattcaaccactattctttgataattaactggtaataacacacatacatttgctatgtccactcaagaaccttataaatttcttttgcactgtcaatggtcatgtgcacaaatccaatttatggagtttctatagagaataactttcaattctcataagagacgtcaacaaccctactccatatagttagaattttagtgtctcacaactctttagatactttcttaatcttaagtgagttttcttaagttgtagctccattaaaaaactatttggttttaaccctccaattttcactacatgtgctcacctataaatagaacaattgaggaccacattcactctatggacttgtgattacctattaaacttaagacttgatttttacaagtgttaagataggttaccatcaatgagtaaaatactaagagagtttaggtcccatccctcgaaattcatgttttaatcttgtgcgaaaaataagcaatttgttaacctcacattttttattccaaacgaatcatgctagcaaaatctagtgtccacatttaaggtgaccactattctccttcattacttaagctttaaaaatttaatcataaaagattaatttttacccaactcaaattctcaataattttgataccaagcatataaaaattaaacacttatttagacaccaaacatgtcttaattacacacttaaccttagacaccaaacatgtcaaattcacactttatctaagacaccaatcatgtctcagatatacgttagttttagacaccagacatgtctaaactgtcatattggagtatacacccgcacactttcatattttattgacaatataatatttgcatcttgattctaaaaatatataagacgctttgtctctatagttattattttagatttaatttccttcttgaaattattaccaccaaatgtgtcaaaatttcacatatgcacatagcaaaataagcctttgaaattaattctaccattaaagggaaaaatttgagctcaaaagctcaaaccttgcttaagcttcacaacaagccacaatttcatgttaaaatcactcaaactagcatacaaatacttcagaaaacatattaaaacctaaaaactcgcacaacaatcctaactcaaaaaaaaagcctgggaacctaacctcaaaacttgaaattcaaaggaaaagataagggggaaacttacccaactgaatacttgtgctacaacagctcaaatcttcaagaattggtctaaaatgctgaagaacttgctagttttctagtttctagggtgaggcctaataagagaggagagaggaagagataatgggttattatttctaacttttccaattgattaaatgagtcattataaattactctttctacaatcaaccaaaagtaataaggataagcttaaaaaattaaataaatcaattcaattcccacttaataaaataatactaattttagggtaaaagacttaattaccctttcttacacatgtaaccaatacacacaaagaggtaaaatggtcttaaactataaccatattaactcttgacattctaaatgtctaactaactcaccctgttatttctaaagtacagaacaaaaataaaatgactctataggccatacattgcatttcatcactgttaccagcataaaatatgaaaatcataatatttcacatataacaatattagatcacctagaactcaaatatatctccacaattacataaataatattcaaaagtctaattctaaatttaagccctaattatctattaattctcataataaaagtaagtggtcattatagttgcagcactacaacctggttagggacgaagtcaagagagtgttaaaacctccaagcatatttggtggtgttggtattgttcattctactttgaatgttgtagaaatgagtgataatgaaccaaagatcata

SEQ ID NO: 197098 - DNA, 1058 bp, Cannabis indica
aacactagtacaagacgagtacatagtgcatggtggttttggtttcaagaatggtaccaaatggaattgagctattctagctaaatttctttgggccatgatagaaaagcatgatgttttgtgggtgaaatggatcaacacgatctatctgaagggtacaaatatgtggacttacactttgccttaagacaccggctgatattggagaaaactgtgtcacttaaggtaagttttcaatgttcaacaagtgtagaaagctagaagttctggtaagttcaaagcttcacagcttaacaatagtatgctgagatgtgacctggattatttttcaaaagttgttcggtgcagattaagtctacccaagcacatgtttgttttacggaaaaaagtcaatagttagtggctcactaaggatcttctctcattctgcattattgctgctaccaatgattatcctgtgtgtggtttgagtactgaaagtcacaatcacctattattcgagtgctcttattcagatctggttgtgcaagaagtgtttaactggcttggtttcagaggttggcccttccaatttgctaattagccaattttgattacaaccaaagtagggaaaactaaatatgacattacctatgccacacttgttgcttcagtctactatatttgattaaacaagaataaatgtattcatgagggttgttcatatgcagttcaataggactcccttatgttgtcggttagttttcctcttacggcgtcgcctgtaataacgtcggcaacgaatttgctaaaaccgatgtatgtcccaaaaccatctctaaaatctatttttctagccacatgtagttaaggagattcaaagagtgataaagtgttgtttgtatagtattaaaaataggaatttcaatacttgtaattatagagtgcttagcatgttaatggactgattaggggttcgagtgtactggtttggagacgtttggctgtttttgttggttgtggcttttacgtatatctttttggttaatgaaatttcacatattgcaactagcgctgca

SEQ ID NO: 197099 - DNA, 535 bp, Cannabis indica
aatcaagcttttcatgaagcgcagcttattgatatggaattagttggccatcagtttacttgggaaagaggtcgtggtacatctaattggatggaatgttgtattgatagagtgttaactgcacacttttggcttcaactcttctctttggctaaactatataatctggagcgagcgtcatcggaccatagcactctatttttggagcaaaaaaaagcaatcatagttcatagggcgaaggcaatttaggtttgaaaatgcatggctaactgaacctttatgttttcaattgataaaggagtattgggaagcaaactcagccatggatattcaatccaaaatccatgcgtgtagtgaaatgttggtaacatggggaaaggaaataactggaaatttcgggagctgcattaaaaattgcaagaaagagttgaagcaattgagaaacaagagagttagtgcttcagttgaaaagttccaggcaatgaagaagactttgttctccattcttgatcaacgtgaaattttttggagacaa

SEQ ID NO: 197100 - DNA, 801 bp, Cannabis indica
ttttcttgtacaaactaaaagcttgttaaattgtttgctctccagtcataagggatttttacaaaaatttgtgaagcatttaaaggatataaactttttaagggaggacctgattttcagcactcacagtgaagaggtaaagaacttttgtccatttcagttcttttttggtcattacttttcaaatttcacatctcagtattttatattttagtgggaagtttattaatgtgtttgaattgcagtgagtattatatgtgcatcacttcgttttttatttttctctctttttctcctttcgggtgaaggattatttaattgggttgctgcaataggcctttacattacccaagtgggggagctcaaatggtcaggctgtagtttgtttccagcagatgtcgactatccaaattcaatagccataagcaggaaaactcaatttcagtttttgatcagattctaaaataggaaactccaatatattaggacataaataattatgtttgtcattttgagtgctttgctccaactccaagtatccctttaaatatatttattaaaatgctgtacaattctccttaccctattaacttctcagagataatgtgacagggtacagattctggtgttgacacatatttcggtctttgcacttatcctggaagagagcttcgacaccgaatagatttaaaggtaattggttacatgtcatgtttaatgttctagcaaagactaaatattttattcgagatatcttttctcttttctctttggttttggatgttatatctacagaaattt

SEQ ID NO: 197101 - DNA, 667 bp, Cannabis indica
cctggtctgtgtaaaagtgtcaatatgttcgggtttggatccgggtccaggtcatggtcccgatctaggtcctagatgtcgagtcttagtcaggatatgggtctgggtcctggcttgggtccaagtcttagtctggatctgggtcctagtccgagttcagttccaaggtcccatgtcttggtctgggtccaggtcacggttagggttttggtctgattctagtcccatgttcgggtcttgctctaagtcttggtctgatttcggttccgattcttattcttggtctaggtccgtgtcaggttctgagtcctagtccgagtccgtgtcaagatcccggtctagttcttggtctaggtcaggttccgtgtcacaaatcttgacaccaactactggtcaggtccaagccccatgtttacatctagatctcggtctctaatctctgcctcgttcaaatttaggtccacggtcatggtctgggtcctaatctgagtccgggtctgcgtttgggtcttggctccttgtctcgaatctagagcccaggtctcgagtttgggtctcccatccaggtctgggtcgtaggtaccggtctgggtttaggttcaaatttgggttcggatcccattttgggttttggtattgttttgtcccggtctgggtccaggtttcg

SEQ ID NO: 197102 - DNA, 789 bp, Cannabis indica
tttataacttttgcaaaatacatattctaaaacaatttttataatatttctattttaatcttatttttttattattattcttaatcaattgtcaaaatttgatataaaccttttatttaaaagaaaaatattaatggtagttttcacaacatacattatactatactattttcatgatgctctataattatataatttgtattttgttgtttacatgctgctctgataccatttagttttggatggataggagttgtatactaatagagagatataatgctaatccatatagtcagaattaactttaatattttttctaacgttggcttttcctattgagattgacacttaagataaaagactttgcttgatatatcttctagttggtaatattaaactaatggtaatattcttattatctatcttaatcctagtagagaaatagcctagagatgaaatttagaaagaaatttttttttgaaaagatggataagatttttcttatctgaatttgtgtgtccataactgaaaatgagaggccatatatatgggtcctttacaaacaaaaattgctaaaagtcttaattactacgaatagaaaatgtcaaagactttaattacatcctttccgagatggggaatctccgaaattctactcttttttttatatatatataacttcaaagacaaaatttttagatggccagagaaatctctgtcgtttgaatgattccttgtctttagttgtatattgctcttgtgagtagtcacaagtcttggcacacaaaa

SEQ ID NO: 197103 - DNA, 1288 bp, Cannabis indica
gtattcatctctaaagtctaaactaaattgctctaggtttatactgtgatgtatatggttttccttgactatcaactacaattaatcatagcatatttaatgtcttacattttgttgggtcatattgattggtaaatttcgttttcaaattgtattcttgttgtagtttgctgttccaaccatcgttcttgattttgcagacaccaatctcactttttggtctctagacaacaaatagaggtggggaatctattatcctttcctttttaagcaaattgtctgctgtgggcattcatgaatgaatgacataaaatggtacattcagacacaagtttaaagaaacttgaaagatcgtagacaattatttccttctttattggctgtccgattttgcaaagcccgtttggggctaacttttcacctgacttccaaaactaccaattcatctactcttcaaaagctaactgtctctcgaagttggatatgattcaagcctttgttatcattttacaagaaaaagagtgccaatgcatcctcctttgactcacctctcaatatgactgcagcccatgtggcctttatgatgctatcgcctatcgatacactgcttgcgtgtcgtgttggtatttaatcattagcttggtgattgatttaaaattttcattaaatatagtataattagtcttagaagatgcagattaatttgtttgacattatgcattaatgtgaagttaaatacatgcctaactgtgataaatttttcgaagtcatagaaactgttggaatacagtgtgtggtgaggctcagttaggtggctatgattcctgagcatttttagctgttatattgtttatgagatttaactctgttagtagaacatagaatcacagttaagctagtcaatgttggttccactacttaagctgtctgctatctctggtatgccatgtacgtgagaatcatttaagctttacactttctgtctagctatcttttcatgtcatgcggtcaaataatgaaaccaaaatgtaaattcttggataatcttatgtgaatgttgtacaaataatttggtaaaactcaacaatacattggtccctttttttttttcttgctgagtaagaattgatcatggagtatttatatgaaacttcatttatgcaggacaagtagacagtacacccaatgtttatttgtgatactttctactttgccatccttaggaaaaatctatattacacctcctaaaataggtgttttgttattgtaatttttaatcaattttttt

SEQ ID NO: 197104 - DNA, 1025 bp, Cannabis indica
aggagaaggtgccagctagagaagtaattgatctctctgaagtggtgcctgttgtggatccctcgaccccaaaagtatctaagtccaagagttccataagggggagctcgagtgggtctagtcagaccaagacttcttcaaccgccgtggtgcagagcacggaggccaaaaagggcaaggacatgctccatacctggatcggtcacttcctaaagtgaacgatcagttgtttggggcagataatgagttgtccctagaactagtgatggcggagtcctgaaagaggctgctcgggtaagtgtttccttctttactcttgtttagcctttttaccagttcatgttttaattttttccatgcaggtcaacctgaggatgacttatgcttattcccgagccaagtccacagcggtaaagagccttgctaccactaacaccttgtagagggaggtgtatgcgggtaaaaaagaggttcaagacgtggggaacgagcttagagaggtgagcaagaagctccttactgccaataaataggttgaagagctaacaaatgagatgcaggagatgtcgttaaccacccagctagaggcagacaatgatgccttgtctaaggaggttaatgaacttaaagacgagagggagagtctctgcactcttctttcaaagttggaggaggacgtctagactaggcagaccagggaggatgagctcgtgaaagaggtggaaagcctggaaacggtcgccttggaggttttctacgagttttggaaggccaacctctcaggcaattttgattaccttggtgattccaaagaggtatatcttgattactgtgcgggtcaagtggctaaagaaaacctcgaggcaaccacttctacactttcgactgatcagagcactgaaacccctactgcccagaaatttgagcctccggcccctacaaatcaagctaatccgtataaggagcccgggacccctaccgtttaaaacatttttcttctttttctttttatatatatctgtttg

SEQ ID NO: 197105 - DNA, 1354 bp, Cannabis indica
aatgagtaatactaatattcacaggtatgatgatgagttgttaaaattaataagatatcttcttggtattttttaatttttatttttgtttattttcataataattttagagtttaatccaataacttgcactaatctcctaagagattgttttggtagattatttattttgatatccagaaaattatttttgtgtaatttatttttgtaattgtatatggtagttatttaaaattatttgtaaatttttaaaaattttaaataatttacagtgccaaaaattaatttaaacaactacttaccacgcatacaagaaaaaataatcgtgaatacaacaaaatatgtaaattttatttcaatattataaattactcgaaattttctaaaaaatttacaaataattttaaataactataacgtatgccattataaaaaaaagaattgattaaaattaaaacaaataagaatctaccatacccaatggttttaagttatgttttggtataatatgaaggcaacattgtaaaataattatgcaataaaatgtatcataaatgttttgcatataaagttatacaccaaaaccatttagatagattaggccaaccgacaatatctatttatatatttatagagataaatgttatacattattgttgcttttaaatagaatcttaattgttgatttaaaaaatatacaaaatttactaaactcaataatttttatttttatttcaatcattcccaagttaatttgtagagtgaaaactccttttccattatgaaaagcatttattttggaccaaacttgaggatgacattaccactaccatgcttaatggtgatacattaaagataaacgattaagaaagtcacaccacataataataatatgtatatatatatatagtataaatgttttatactatatatatgacacatattataaaataaatcatacttactcacacccttatctttatcacaaacaaaaagttattttcttccccaccccacatcaaatattttattttttttttaagaaaagcaatttgcatgccttgtctataaccaatccacaaacacccttttttatattaattcatgattaaatgaaaataaagaatttaattgtggtgagaaaaataaagtactattctatggttaatgcttatacaccatttgaccacaatggggacaaataaataaaagagatgagcactcaatgtgtcatatcgttattggtgaaattaagtatttgattttaaataatttaatttaataattattaaaatatcgttagtcattcgcaaagcaccacctcgtgatggtactaagcactactggtgcctaa

SEQ ID NO: 197106 - DNA, 1041 bp, Cannabis indica
tatatatgtgcacctatatatatatatatatttagagggtatgatatataatgtatataattggttaattcatgatattgatgtacgtacctggccagcttcgatgagagctaacatggcccatgcagtgtttacctaaatgtggtttattcttcctttttttcgttttttttttttttgtgaaggatggtttatctccttttaagttggtgtaaaccttgaaataaatatatattataaacatatgatgataataatgaatatatagctcacacttaaaaaatgggattagattattaaaaaaattaaacaaacaataatacacacactatatatataatgaatgatgagttgattaaaacatattattcctatgacaaggttaatcgaaattcactattaatacattcttttttaaaatatataaatatcttaaattgtaccagctatcctggcctaaccatggatagaaacaggttagacttatatagagtccacttatctaatgccaaaaataaaattttttctttaaaattatacatttttatattgattgattttaaaaataccatctttttaaataagggtcaaaaagaaaatcgccccacaatatttttgaaaaaaaaaagaaaaaagaaaaatcgcccacagtaaaaagaaaaaaagtagagaaatttcagtatgtaatgtaaaaacatcttttattaatgcatagacgtacgtaataccttatttgtgcatgaaagatagctttcgccccaaccaccagaagaaggtagttgcttagagagcaagaaagtagaagcttttcgaatggaatggctggtttggtaggtgcggccagctgcgatcaagccctttacggcgaagtaagtggcatagttgtagcaaacgccccatgatccataccatgagccatctcttcttgcttgctctctatgaactctgttgcctttcgaatacattcttcgatctcttctttttgtgctttttgtatttttctgtgaatgattttagccctttgatcactgatgctgtgca

SEQ ID NO: 197107 - DNA, 2760 bp, Cannabis indica
gtgaaaccagacaacattctgttagaaactcacacttataattggaagaaatcttcttagaggttatagataatttcgatgttaactttgttgttcttgttgttgtctttaagaatgctctgttttcttgttttggacttatgcctatttggtgcacatattttatgtggcttgtgacatgatggaaatgagtcccacggcttaagggaatataaatttgcataatactacataccagtacagtagcaccaactagaagtacttaatattagatgtcatttttaataataataataatagtaataataataataataacaataataataaaaaacaattttttttcaaaagaaaaggaaaggccgtgtaagcaataccattttcgtttattttcttcttttccctctctttctctcaatctcccctatatatataaaacacgtttcaatatgaagcaaagattattcaaaaatcaaaatggaaagaagaatgattgcgattatgatcatcttggcctcggttgcaggtttcttgagactcagaccaccacattctccatccaattctccatccatctcggaactaaacgattctccatctccatctgacttctccatctacctctgaactgaacgattctccatctccatccacctctgaactgaacgatgtgagcgataacaatggtactggtgttcttcaagtggagatcgatcaatcctctctcatcatagtagcaaatattcgacctaggttcgatcgaactccaccgaggtcataattggaaaagctatttgcaagatatcaggatagatgccgtgaatgtggactatgactgcgttaagaatctcgacttattgatcgattctatcgttttctcaatttgtgtgtgaggacatgtcagtcatgtaacccctgcttgtggttttagtgtagcattacattgtataatttttaggtaaaaataatttcatataataaattagataaaaaaattcatatgctctaaactggcttacaataattttttaaaaaattaacaacaaaatctacacccaattatactatatacatgttatgatatttttaaataaaactaacgattaattcattaaagtaaattgacaaacctgttgagaagaatatcccaaatcattattattggttattccaatacattcacgaccaaaagaaactcccgatccatcataaaattcatgaatttgaccaccatcagactgactttggtccccgaaaaattctaattgcctttcggtgttgaacaactgctccatcgcattataagaataatcttcatacttgatggaacataatgttgacgcattggcaaaagcagaggcggcgacaataatattaatggtggaagagaatgaaaatactcatcttgatcaaactgaacatgatcatgattattattttggacttgggtttgtgtaattaattgctcttattccttagccatttcaatcttctcatcaaaagttttaatcttggcctccaagtattgtgccaaacccatcaaggagtttttggacaaaagagctagtttgtcattccaattcatggagggtagtgattaaaccccattaacatgaatattaacattagtagtactaatagggttggaataattatcctgagtagcactacttactttcttttcaagtttctataacttcttctccaacaccatagagagacccacttcgctgttttctctattcttaactttacatgactctaatcattcataataattagagacaatagaatgagctttgatcgagtcttctggaaacacatctaacttgccagcggaatcataacacaccaaacacacctccgactcgcccaattcactaagttgtcttgcttttctcttaagtgtagcattccattgtataatttttaggtaaaaataatctcatataataaattagataaaaaatttctatgccctaaactagcttacattaattttttaaaaaactaacaacaaaatttatacccaattatactatatacatgttatgatatatttaaataaaataattgattaattcattaaaataaattgacaaacctaatgagaagaatatcccaaatcattattattgattattccaacagattcacgaccaaaaggaactctgaatccatcataaaattcatgaatttaactaccatcaaactgactttggttcttgaaaaattctaattatctttctgtgttgaacaactgctctatggcattacaagaataatcttcatacttgaatggaacatattgttgaggtatttacgaaagcagaggcggtgacagtgacattaatagtggaagagaatgaaaatactcatcttgatcaaattgaacatgatcatgattattattttggacttgggtttgtgtagttaattgctcttttttcttaggcatctcaattttctcatcaaaagttttaattttggcctccaagtattgtgccgaacccatcaaggaatttttggacaaaagggctagtttttcattccaattcatggagggtagtgatgaaaccccattaacatgaatgttaacattagtagtactaatagggttggaataatatcatgagtagcagtacttactttcttttcaagtttccgtaagttcttctccaacaccatagagagacccacttcactgttttctctctttttagctttacatgactctaatcgttcatagtaattagagat

SEQ ID NO: 197108 - DNA, 691 bp, Cannabis indica
atcaaaaacgtattactaattcaaacatataaatatagacatatattacgattgaagagtccaaatatataaacgataaaacaaaaaagttgaacaaagtcacaaaacaggaaagaaaacttcaaatatgcacaaatatatatatgtaagcagttacttacatcgtaatggcagagatctctttcagcaaccttgactaagaaatgattagccttaactacacactttctaccaacagtaccataaccaggtctaaccggaaacctaacggatttcgacgacgctggaggaactctcacagtggccgccgccgctggatcctgcaatgtcagtttcttatcaacttcacggctcaacgaagaagcagtagaagtagtcgatgacgatggacctggcaccggcgcgggaattgaaggttgaggaatcggagtagttgaagcataaccaccaccaccactccttcctcctcctcctcttcctcctctgccaccaccaccaccaccacttcctccacctctctgaaacgttggagaaggagaagactgatcgggacgatcatcggatcgccgaccaccacccctaccacggcgagacattgcgattttcagatgaaagttagagagagagtagttagagagagagggaaaattgaaaatgaaaatggcatttcttctcagagtctccttttata

SEQ ID NO: 197109 - DNA, 1191 bp, Cannabis indica
agagtgttagattatagaatataatcaaacatacttgttaataaatttaaattttagtaaaacaacttccaacactaaacaccagtggtgcattgtaataatgctataaaaaataatagtttaacaaaatatgaaaataggcttacctttcaaaaaatttataacaaaggaacaaatacccttaaaattaataaaattaatgacacttaatttttaaaatatatataagatttaccaaacctaatccttaatgttaaatataaaatcacataatctcattggataaatacatatgtagtataatgcaaaaacatataatgttcaatttttacatatataaaagataataatgcaaaattagatctttgcttatctttgcttatttttctcctccggaatccggataatacaagttgtcaattaagctgagtaatttggttggagtagttgacattttatatataaaacgagcaaacgtacataaagctttagaagagcgttaaagttaaaagtgaaggaaaaatagaagtgatgttttctgtgtacgtaacagtgtaatgcatgttttgtatagtggaaagcaatacggcaaataatagtttgatgcaaagaaataaatactttccaagtttggtttttctggttatgaactagtcccgtgtctgaatctccatttgatcagatctttattgtataatccttctccccttggattagccatattggcacattttgggagacactcaccagtgactacaaataatattagatccattcaaatattttattgccaagaattatttctactccactctaatttctcacaaattccatattacaatttagcaatgaaaagtaataccagaagaatattaaataatagtacataaacacaaatgtatagtgctgagctgaacaagctcctcgactgcaactgcaaaggctagttaaaagcttaaatcttaataaaagagttcagtggtgcacatttcttaaaccatatataatcctaattagttaatcacttacattgcataatcgattgtattatattctgtcaaaatatcaataatagttcaattcaaagaatgtggtccatatatatacatacatacagcacacattacaaatttaaaagcctgcctgcatatcacccccaattatttatgctaccaaaataactgatagaga

SEQ ID NO: 197110 - DNA, 1456 bp, Cannabis indica
ttacggttttgtaatcacatatatatacataaaatctatcaagaattttacagcagtctcaaaacttaatattgcacacatatatatatatatatttatataatatatattaccaagcaaaatatatcatatgggtcataataaataaaaattaaaaatattcataagtacattaatattatttcatctgaaatcagaaatatatacatgaaatttaccctttcagttatgtgcaaatgatatactataattataatcatttcaactaagagcatataataagaatgtatgtatatacataccatttatatatcccatatatattaagaaggcagtagtagaatttgtatacgatatattcatatatctttctaaattctaagagaattataagagagagagagagagaaagaagaaagaagaaaagggaagaagcaattagaagctaataaagaaaagaaatgaatgagaatgaacaaatacctcgaaattaaattatgtatatatgtactgagatctgaccattaattatgcacagtacaaatttccttataattaagaatatgtatatatattatgtattgagtgtgtgtgcgaatgctctggtgaatgagcaaaagcaatatatatgtaattagctaataatatatacaactagctagctagctgggtagatacgttcttacgtctcttaattaggacatgtttaaagatcgagagaagttaaaaaaaaaaaaaaaagtcaattgaagttaaccggcaaatataaccatatagatttagattaattattgaacatattggatataattatcattaaaacacattaattagacataatttaaataataatttttagatagatcgtccatattcagtgaataatatatattgagagatttttatataaatattaacgcgtatatatggtcattgaaatcggcggccggagagagctagaatgatgacaaattacaagttattagagggatatatatatatccgatcatagttataaaaccaagttatacttacatgagatacacatatagatataaatgtattaataattgttgtttaatttgaatggaatcagtacgtacgtgggtttgacgcgtaaagttataaatttgtgtgtgccgaaattttctttttttcttcttcttgattatattactcagtgctactatatatgttttcctttgaccggtctcatcatccatccatcggttaattccttcactcaaactaatgttgttattacaaacacactcatcgtttcatcaatttcgcatgtgatataactacaacgtgatgcctaacaccactcacaatagtttttcaaaaatacacaaactttaaaaaaaattaaaacaactttataacaaatattttaaatttatttatactatttattgttctaaaaatatttaattaattgttttagattttaata

SEQ ID NO: 197111 - DNA, 820 bp, Cannabis indica
ttaatcattcatcttttctcattcgcctttgccttatccttttgcttatcctttgtcttttcttttcttttcaacgtttcatcatctgttatgtaaccaccaacttgtttcctagtagcatgattaaacaaactcacaacaagatcatctcaataacttgtattccttttatacttgtgaaattggtttttatatgtatattttgttttcatatattacattcatgattttgtgtaactgattttaatgatattcttattaatttattaataactagtttgtttatttattttataggtacgatatattaaaactggttttgaatttgttattatgaaactggttttcgatacacacatttgtctttaatatgttataacgttgaataattgtaatttactctttaggtattcttctgtaatctgttttagggtgataataagaagttttagaaggaatatagccgtaaatttttcttattattattttatatatatacatatattttgctttatggttttttagtttgtataaaaccaattttattattgtgtgatactattgaaaaactgtttttgtttcattttaaataaccagtttctaacacaaattattttattattttcataatttgttttttttttttttttaagtaactagttttcataattagtttttttttgtttgttcataattgagttttaagtttcagaattttatttggtgatttcaggaaattaatttttatctgttagtttattataatatgaagtcaaaaattagtttcgtttatcacctagttaaaattctaacataggga

SEQ ID NO: 197112 - DNA, 620 bp, Cannabis indica
tttttttttctctttcttcttcaacagtccattttttgctcatagaattgataaaaatagcctaaaaaatttgaaacagtaagaaaaaagtgtttatgatctagaagggtagagaattgattttctctttaggggttctttttttttgggagaaagagcacgaaagtagacgggaaattaaaaagaaaaaatcttaggaaaaaaaaattaaattaaaaggctcgttaaagtatttttcgattttgtttatctcttagtattttgaaatagcacatttttttgtttaatttgggtataattttaaggttgagcttgtttcattcttttaacgaatatatgaattattattttataaaaaaataaaaaattttgatgtctaattaatttgttttggcccttttgggtatataatttttggtgagcaagctttcctattagctttgtttttggtatgacctgcttagcttttcaagttagtttttcttcatatataaacttttggggctttcggatctttattacttttagtttaaactaataatatatgtgcatggattgatcttcctctattccatccccatgttatgagatagatagagatatatcattccctcaagatc

SEQ ID NO: 197113 - DNA, 1660 bp, Cannabis indica
aaatgattacattattttagttttcaatacttattagtatctaatactatgacttttcttatgtgtattaattattttttaatgagaaatatatgtattaatttagttagctagttgatataaaaattttggcttttaatgattcaatttgtacacctttagctaaatatgttttttaatctggatattcttacgtattaacggaattaagtaataaaatgctacatttattctttccaatacttagtaatagctaagatcttttagggacaatcgtttaaaattatggattcttgtatttgtattgcatagcaatttctattatatataaaactcatttcagtattattagtagttaaatagtaaattaaattaattaataattgataatttatagtaaataaaattatgttatataaggaaacattttttgtgtttaagattgaaatttcacacagtaaaaggaaaagaataaaagctcgttgaagcacattcacgacatatctttctttttgcgctccaataatttttccaacaatcattattagagctactaatcttaaaagtcacatggttacaatttagttgtgatttgaattgcaacgggttacgatttaagtttctaatttagtttactactttaagtagatggcaacgaaaccacaagttcttgtggtctgatattgacggagattagctaaacaaatggttgatagtgatttaggattgcgatttaagttacaatttagattgtgaattcaattttaactttaggaattaagtggcaacgaatccatgatggggagtggactgaaattcagtggacgaagactagcaacgaagaaataaaaaaaaaataaactataaaataaaaaaatagtaaaaacagtaagggtagaaaaaatatttacaaaaccgtttggtaatgctcctaattatggtagcttttttttcttaatgttttttcttaatcatattcttaaaaaatacaaatagaaaataaaaataaattattttaaatattaagactaaaaatataaaaacaaaaaactatgtgaaatcttattagaataaaataaaataaaaaaagagataattatataaggaattattttttgtaaaaaaaaattatatttttacgtttaatgaattttttttatatttttttataaaaataacatagaaacaataagaaagttacataaaaataatatcaaaacaacaacaaaaaataccatacaaataacaaaaaatcgacaacaaattaacatgaatacaacataaaaataaagtattttctgtaaataatattaaaaattttataataatatttaaaattccataaaacagtatttaggtgcattttaaagttgaagtttttatttttcatttttttttcttagaagataatcaagaagaagtaacgaaaaaagttactgtcggcgtcttttgcaactaaatgtggctccgattgtggtggctttgggaggggattgattgttggtttttagtgcaattacaatctgaccattgtatctttttggtgttctttctagattcctttgatttggatatgctctttggacagctttcccaagaattcctatggatttcttcctcctcgttgcttcactccattaataagtttttattttttttt

SEQ ID NO: 197114 - DNA, 1999 bp, Cannabis indica
ctagagcaacaaggtacttttttctttttatgataaaactaagggttcaaattaaatctaaagtgtttgataattttttattttctaaggaactaaaactttatagcatgtgtgatcattttctttggttagtatttgggtgataatgaatagagaaacaagaagattgtgtaagattcctgaacaagtgagacatgaagttgcaccattttacttccatagagtagccattgccaaagaaaagaatgatagtgacaagattgacaagctcattgatcaaactgctcagacaatccgaactggtttagctgtaagaattataattttttattttatttttacattaatatgagaagataataaaatgtgttgtgttgttaaactcagccaaggtggagtgatatggatgccaatcaacatgtaaacaatgtcaaatacattggttggattctagaggtaccaaaatttaaaacaaaaagactttagttaatccaatttcttaagacattatatgattaatttttttgtgtgaatatgcagagtgtgccaagaaatgttttagaagagtattacttaacaagtatgactctggagtatagaagagaatgtaggcaatcaaatttacttgagtcgatgacaagtcccacatcgaaagtggatgaagattccaagagtaattgtataaaaaggatggcagatatgaaatatacacacatgcttaggatgcaagatgataaggcagagatagtaagagcaagaacacaatggcattacaaagagagtcatgatcatctatcaatatgatctttacacgtggcaaattttcatcactattattatttttcatgaatattgttttttttttttggttatttaatgctttttgtttgcttgtttgttttgtttcttgtactagtatatttatttatatggccatgtaaaaatattctaactgcactttgtgtgttttcacagtgcattgattataaggttcaataaggattagcttaattattgtcaactgttttaatcaatttttttttcttattaagaaagtgagagctgagaatcattgtcattaaagtacatgatgtgatggaattataattaaaatatgagaaattgtatggtttcattgtttgaaaacttcataaaatggaaagcaagagggaaaatggtaccaataattcgattattgattaataccaataatttcaagtacaaaaatgtgataatttttgtatactctcgttgaattttctgctcaacttaaaaaatagaaaaaaaaataaaaaaataagaagacagattgaagatgattagtagtttggatttgttaatgaaatcctagtgtacaagctagttgtattataattagaactttatagtgttagttctgtaaggattttgagaaggtttttggttaagaatcaaaataaaactacagagactttttacttgggaataagtattccacattagggagtctccttgtccaaaagatggagtggcaagattattattgcatttgaattggattttgaaagatttctcctttggacagagagactgtctaatctgagagtagggtgttagcccaaaagaaagggccacttgtgaaatgtcagtttgtcttaagaatctatccttcgtaaatgggtctttgatgaaattagaccaaccaaattacattattgtgcttcataatttaattttgatgataataatatttaagttatattttttaaaaaatttatagatacgtcaaattttaagttaatgaccaagtaatcattcttgatatattcaagttattaaaattttatttttcatttaaaaattaatttaatataccataaaaaatgatatgtgaataatataacttgacatttaacttttaaatacttacgaaattcctattaatataacttaaaaaattaaacttaaatatttaattatctacaactaaaaattagatttaagtatttacgtcacaaat

SEQ ID NO: 197115 - DNA, 1284 bp, Cannabis indica
taattaattcattaattgtaaaataaataattgaaaagtggagtctatatataaaaaaaatgaactgacccatttatgagaaacggaccagaagtatagcatgagttcgagaacgacacgaaaatataagtttacggactgtgttgaccttacccttggagcatctccaataatacactaaatttagtgttacactatcactaccacaacactaaaaaattattctttatcattaaattaattttttaacaaaataaataaaaaaattaatatcatattaaataacaaaaattatcacaattgttatatttaactaataatttaaataaacttactaattagattaaagataataatgttgtaaaattggctaaattcgataaattaaaatatttgcaataatataaatattataaggttcatttacaatgcatccatataaataaaagagtcacgtgacagaaagtttgaattttattttcggcgttttaaattttttaaaattttcgatattctgcaaagatgtcttaaataactataatatacacgaccataaaaaaaaagactaaataaatctctcgaatgccaaaacagataggagtatatcagtgtgccacttttaaagaagtgtattgttttctgcgtgttaaatttttttaatgtcttaaataactataatatacacgactatataaaaaaatagactaaaaaaatctgacgggtgtctaaacaaataggaataaattcgtacattatttttaaagatatacattataaaatttctcaaaaaaataatttttaattttataattgtaataatataagtatatatataaagattacttaaattatatataagaaaaaggatatgcagacaaaacctcaaaatgctacgaaaaatgcagtctcgttggatcctccattcacgccatatatgatatttggcgtctccttgatgttgctcttaccctttaaaatattagtaagacacatacgatttatatccttttaacggttgacacaacatagttcatattattttatggatcgacacaaccagctaataggatcgtgaggttctaaaatatgagtcaactcgcatgaaatacacctatatttatacagctttggtcaagtctctagaccacaatggtagcatgtacacagtaattgagtatatttagaaaaaaattaaattctaaattaaaaatattacaaaatagacttttggatctcttttcaaaatagttattattcacatgaatttatgtgatttgtgcatta

SEQ ID NO: 197116 - DNA, 1250 bp, Cannabis indica
aaaaataaaaacacaaaaaaaaactgttttatttaccttatctttgcatggagaagaagaaaagagagaagaagtttttcctttttaagcgattttgagaattaagtgaagaataaattaagggttttttccgttaaataaataacagtgccaggcgtacctttaatgtacctggctaatccatcatattatttatatcttcaacaaacgaaggaccatgaaaagtcacgctttttttttttctttttatatatagaaatatatagaaaataattattaatttacttcataataaattaaatactccactaaacattttattagaaatttataacagtttttcaatctttcaaaaacaaattatacagattctccaactaggttcaatcacatgaaatatactttagcacaaataaaataatgaaaagatgctattaataatttgttcattatttatggaaagcacaaaattaactatattttctgttgaaaaatcatatcatgtgcaaacattaaaaaagaaaatctaataaattctggcattgatgtgtgtgaagaaaaataaaaaggaaagataaagttatagagataagatcatatatatatataagggggtgatgtgtcaaaaggatatgatcaatgaaatatatgtgtcatcagactagactatcaccacattgctatattatctctctctaaaggagcagcagccgccattaaagccaattcagtacttgtttttcttcttttgttttttatatttctatcaacaaaaacaaatagaaattaaagagacaatatttgactgaaaccaaccaaaaatttattgtgagataaaggtgttgaaaactactgatcttaaagctatatagccaatagaaatagaaagaagaaacacagatccatattcagtcaaatatttatataatatcatgaacaaaaaacaaaaaaaaaaacgaaagaagaagctagctaagaacatatatactactatacatacattataaaagtaagaaaaaaaaaagtactagagaagaagaagaagtaatgaataaatatttacatatatatagcaaattaattaattagaaaggggaaagagagaatataaaagtgcaataagctgacagatagagaagtgagcacaaaccgtcaacaaggtatgcactcatacaattgtcagtgtgtgctcactctcttctgtcagtttatatattatctcatatttatatatatatatatatatagat

SEQ ID NO: 197117 - DNA, 655 bp, Cannabis indica
tgaattgcattacatcggtctccttctcaatcctcattaatgggtccatcaaaggaaaattctttcccgaaagaggcttacgccaaggtgaccctctatccccccttttccttttatgttctgaaggtctctcttgtttaatttttgaagcagaatgggctggtaaaattcatggattaagattcggggatatggaccaaaaattatctcatctcttattcgccgatgatagtcttattttccttgatgcaaatataaatgaaggctctactctaaaatctattcttgagacttattcaatcttatcgggtcaatgcatcaatatggagaaaacagagatgtgtgtgggtagtaagattggagaatctttggctaatagcttagccacaagtatgggggtttccttggttacaaaccatacaaagtatcttggcatgcccacgtttataggaaagaataagaagcagatttttggaaaagttagagagaaagttgaagccaaacttcaaggttggaaaaggggtctcttctctcaagctggaaaagaaattctcatcaaagcggtcatccaagctctcccttgctatgtcatgagttgtttccgaattacaaaaggaatcctccatgatatagaaagcttgattgctcgtttttg

SEQ ID NO: 197118 - DNA, 1399 bp, Cannabis indica
gtgtaatgatgaaaactcgagatattttcatgctagtatgaggaagagaagagttgaaaactaaattaccacttttaaagttggtgataaagttgaagatgattattcaaaagcagttgatcatttcctcaaccatttcaagaactttatgggaaggaaaagctcagctactaaggagatcaaaacaggatgcttgaatcaaggaaacatattgaacttagatcagcaagtgagactaaacatgccttttcataagaatgatgtgaggaaggctttgtttagtatccactcctcaaatagtcttggattggatggattcagctcgagtttctttaagggtttattggaggacattcctggtgatatttctcaagcggtcttaaaattcttttagaaaggtcactttcctaagtctatgaatgaaatagtgatttctttaattcccaaaattgaggacctgaaagtggctatgactatagacccatatcttgttgtaatacgctttacaagtgtacatcaaagacgctctatttttgagattatctgaagttctctataatgccctactagattaggcacattatcatgttttaaaattactgtacactcctttgctaatcaaagagtttactaaaaaatatgtgaataattaaaattttcataaataaacttgaatacataaatatataatatatttcgagatctcatttataaagttaaatcatttttcgaaatacaacagttacattagttgtcgcctagtgactataaaaatagtgtctaattgttctaaagatttgaacactccaagtctaatcgtctcgatatgtacaatcttcatatagctcaagctcattgatgctcatcctttgctttgcctttacctacacacataaacaatatatgtgagtcgatagactcagtaagaaaagcataaccataacataaaaataaacataattataaccagacgcccatacactcctatctcggatttgcttgcatgtggcggaggcttccgcccttctccatgggcttctcctttgtgtgtggttgggatatactcgtatcaatatattctcttattgttagtgcctagtgaactctctttcaaacaagaagaatgattgcaatgagtatggtattgttcttactgatatccttcacgtttggaggtctttttctcatgcctctatttctcattataaccgagctagtaatgtttttgcccattctctagcaaaaaacttcactagttgtggtcgggtcttccgcccaacttactattgatggtttatgcttgtattgatctcatgatctctttggcttcttgtcttttttaatggaattattcatttttctccaaaaaaaaattccattattcatagttgattgtagt

SEQ ID NO: 197119 - DNA, 1307 bp, Cannabis indica
ctatactcacaccatgaaattttatctttatagattgaggccgttgtgacgaaggatgagctgcaacaccttgcttttctgtgcaagtcggaagttgactcaatgggtagaataacagctggcattctgagggtactcaagctggaggggtccgttggccaagcagccatagatcaactaagcaatctaggtatgcttttaacattttgtgagaaatgaatatattttgcaattataataagaaattaattgcattattccatttcctcacacggatgtcgaacttctttaggaaatgataacatttagtataaatttgcaggaagcgagggcattgacaagattttctcctcagagaagctcagtgctagtgcttctagtattgggctaacttcatcaaatttaaaaggtgaaaactcacgtttaactttggaatcaacagttgcttcacttgagcaagccattgtagattcacaagcccagtgtgctacttttgtaagtgatttagaaggttcagattctcctgtaaatcttgctactatcactcaacttactcagaaacttgaaagtatgcagtctcttctgacacagttacgaacccaaatataggttccactttttgttcgctattataggtcgggatgtgaaggatcccaattatatagtgcagccattttttctgtatatagtgcatagctatacattgaacgcagagtgtatctagaactagagccagaaagtcaaaattatataagtaaaaaagttttgtaacatgatagatccctcgtatgaattacagctttgaaaggaaaaacaatgcgcgtgttcttttgttagaagaaaatttaaccactatgcttggtgcttggtagctgaggagcgtaaactgttggtgtctaactttctattaattttgtgccaaatggatctagttgtaagttggtaaattctctgtggtatattttaatggttctttttttttcctttgtcttttattgattatcaccctaaaaatgaccaagggtgcgtttggaaagtcacaatgtaattggatttgtgtgtaattagaggtagttacacaatttggcatgtttgtctgaccaggtaattacactgtagctgtgtaattagaaataattgaggggttccaattacactctccaattctcatggcccccatgagaattgaatgtaattacactgtaattactaaaaactttccatattaaatattagctattaaaaaaatttgattttcccatataattactaactattttgccaaacaagataataggaattcatat

SEQ ID NO: 197120 - DNA, 1357 bp, Cannabis indica
atgaagacctcctctgctatgaagctgagaagatgacaagggcattctctactgtaaagccaaggagattatgaaggccttctctactataaaaccaaggagatgacaaaggtctcctccactatgaatctaaggagatgatgaaggcctcctcagatgtgaatccaaggagatgacgatggcctcctcttctgtgaaactgaggagattatgaaggcctcctttgatgtaaagccgatgagatgaagaaggcctcctctactgtaaaattgaagagatgaacaatactgcctttgctatgaacacaatagagggaatgttaaagacctccaagtctgcaacctaggagggaacaaagagtgcatctatagctacataaatgcatggcaacacaagagagtcgatgctaatacaacaactaaatatcagaataggtgataacattttggtgttaacatattttagaagtctcccaaatcaaaggaaatcactcaagacaatcagaaaaaaattgctaagattgtcaaaattgattcctacctggtagtttgacatgacacgggcttagtctacatcatgaagttagccttgtacaggtgtaaagctaaattggcggggaaatatttacacgaaaactgaccctagtgacatggacatcaaattttgacatgtgacaagaaagaaaacatcttagagttgagtagtcttgagtcatagcagtcgacctaggaggggtccctagccctgtgcccaggttaactccagaaacttcagaatgggtgtttggatcccactaagttatttccatctcaccattttttaatattttgaaccaagaagacaagaagaatccaagtctaaggcctaaaaattgaaaagagatgaaactacatcccgaaagtcaacccatgtgcctagggctttcacttagcgcttaggttgacattcccaaatagggtttcagtttctaggtttgtcttaatgaaaattactcaaaatttgtacttagacatgaataacacatgtcacgaacatgttagttgtatcagaatcaaaatcagaacactttacgtttggagcacccaagcaacctagtgatgcacctagcgcccgggttaacaattggggcgcttctaaccataatgttaaagaagtatcccaagaattttattttctccatccaaaataaggaatcaagtgctttcgggaaagaaacagataaacttaaaggccaaaattgggacccaatgctcaggttgacctagtcctaggtcccaacgcctaggttgacatattgtcaacttgggccatttccaataacagttcagataaattcttatgcgcataaactctgttt

SEQ ID NO: 197121 - DNA, 1245 bp, Cannabis indica
acccaccatagctacttctctaacaacatctgttgtattacaagaggtaagattaaaaaaccaatctccaaaagcttgcacaggtacagcccccaaatcaacactggaaacattccagcatgcacggctgaaagcacaattcagcagcacatgacatatggtttcgggtgcttgatgacaaaagggacacatgttatcaacattcacatgcctggtattcaactgcactcttgtgggaagacagccagaagttgcacgccatagaaagtgctgcacttttgggggtatatcaatcttccacaattgcttgtatcccttctgaacaatcaggtcaactgctgcagaattctgcagaaaagtatatgcactttttattgtgtacaacccagaattttccagccgccaataccaggaatccctctccacccgatccctcaactgaatagacaatatcagatgtctatccctttccccgaacaggtcttgaataacatcaaaatcccatgatctctgtccaaccgaaaacaagcagtgcaccatttgaccctccaatgcagggtgatctgagatgacaaaggggttatttgcctcaggaagccacgggtcctgagtgatgttcatagtagtaccatcaccaatagctttcctcacaccagacacaactagatcttttgcttcatagatgcttctccaaataaaactggggttcggtccaaggctagcagtatgataagaccccgaagggtaatatcttgctttataaattctactaaccaaggaattttcattattcaacaatctccacccttgtttaccaagaaaagctaaattatagttgcgaagaccccgaaaaccaataccaccatcatatttgtgccgacaaagacgcttccaactcatccaactcacacccttactagtagaactagcttgagatttccaccaaaatttagacattaaaccctcaagattagaacaaatctctttagtcaataagaacacgctcatagcataagaaggcaaagcttgagccaccgatttaagcaaaacttccttaccggcctttgacaaaaaacgactttcccaagagaagattttcttctgcattttgtccttaaggaatcccaagatggcatttttattccttcccatgatacaaggtaaccccaaatagaaactattcttcaaagcctccaccatccccaacatctcgctcattctctgtctagtagcaccactagtatt

SEQ ID NO: 197122 - DNA, 1004 bp, Cannabis indica
ggcacaaaacccaacaaaaattacaagatccacttatacaatttctaaaataatttacttttaaaaaatttgaatttaaaatttaaatatatattaaatggaatcagttttcttttctcataggtataataaatagtgggtcctattattaatgtggtctttgaaaaggtcttatttttcattattattattatgtattttatataggaaataacaaactaacggaatgaatatatcataagtgtctgttatgtcattatgtaatttataacatgggttgttttgattagttagacagaagaatggacaacatattttgacagaggatccactttcgttaaattctccgatatagtataaacatttaatttaattatcctatcatcatatatccaaaaaaaaaaaaaaaattatcatatcatcatatttgcattaaaggtttgattggtaatggatttagatggaatttatcatttcaaaacttatggacatttgtaattacttgatttgtagagttttgaaataaataaatattaactttctctacaatgagtcttagagaaatttcaacttttatggataaatatgcttcttagatataaaatctaacaaagttcaatatatcatatacactcactcactgattactcacatctagctggctatctatttcatgttgtaatagttctcatagcaatttaaagaagtctctctatttcagttacagctgaatgttttcttggttgcattctttgtttgtttcaagttgtatactagttcatcatatttgcagtttattgagatgaattggtcattgacttcgtaattgacataattcattcattgatcaaaatatccattgtaaaacatgacaaatggaattgcatcatgtacttgagaatttaaaaattcatttatggctatgcagctgtgatgcaacttttttgaaacataataaaccagaatagtatttgcacatacatgactctatctacatgtgaatt

SEQ ID NO: 197123 - DNA, 1065 bp, Cannabis indica
ttggatatacacatcgatcctgattctggtcaagagttacatataagtaaaagtaaacaaatttataaaaattgcaagtatgtcaatatcatgatcctattccaacaactcttatggtgagtttttagatgttgcatatatatatgccttcatttccacttgattacttaacttcaaccgttttttatatattacacacacataaactcacatacacacataatcatatcatttataattaataagagcatatccgttaatgtgcctcataatgacaatcatatatttatttttcatataatatatatacttatgaatatgtgtgtaaaaatgttagtcaaagatgtaggagagagaaaagaaaaacacacataccttctctctctatgtgtgtgtgtctgtcgttcgcttttcatccaaattaccagcaaaaaaggctaaccttgtccaggcagttgatacttattattttatataaatatatatatgttataaaagccaaagattttggcaaaattagcgtagtcttctttactagttagtcctattcctgtaagtagtgttgcttattctggtgccataatttccttacttcgatgtccactcttttctagaaaaatatttatatatatatatataaaatgatttttgtaggtattcttgttctcaaagtacacactagtatagtaacgtgtaatataaaaattatgcgagtctcttttcgaattaatgacatatatatgtctatcatcatcaaacattttatttgcgtagtaatatatatttaaagatatttatatttatatatatatgagaccaaaatgtaagaaagagagcgtattattaaattattatatatgtatgtatacacgtacaaattactttactatggttcaagagataattaatagctataatattataattattatacaatatgtacatattcccaataattgatgagatggacaaagcattatagtggttggttatcaggttaggttctagtatatatatgtagaacatgccagagtgaaagggcatatatatgtatatgtattatat

SEQ ID NO: 197124 - DNA, 1607 bp, Cannabis indica
aaccccccccccccccccccccccaaccaaaggacctttttgcttcgtttctcttttttctttcttctgagtttcaacctcactctcacctttttgccttttagtttaaggttcaatcaaatcaaagcagcccatatacttagaagaaaaggaccttggagaagataaggtaggaagaatatatatgtgaattctaaagttgtaatggccatttctttcaactcctttacgtctaaaatcttggtgcctatttatgagtttaattaaattatagtgatagtttgaggtccttggatcatagaaaaactagctaaaaaactatttcttgagctttcatcttcaagaggtaatatccatagtttttaagcttgggatattggttctaaggaaattcaatgtcttcccgaaattgagccacttctggtttatcaaaatcaatagataaacttctaaagagtataacgcctttcaaaataagtattttgtgattttcaaagcatataactatttatgactctaagtacatgattttaggctttggaatcatttaatatggttatttttctaaatagatatggcttccacatgttggaactgatttctaaaccaagcaactaaatctttgagttaggaaaaattatatttgaacacattaaactattcagaattttataacaaaaatggtaggaattattgatatgttatattttaatctaggaagttttcataatcaattttattatagccagtagcagtcatttttggaaaataacgatcaaaagtcggtttggaaaattttgtattagaacttgtaactaacttttcactaagttaaactaatcaaaatcactcgaaattttacaaaggtattcttaaatagtatcgtagtatggtcttgtcttttgacattgtatgatattctctctcgtttgtagtatgtgggtatttgtgtgtctttgattttttattatggattgtcaacattgtcattgaggatggtgatgatggagtttttttgtatgatgaagagaatgtcatgaagtaattataaagaataaatgattatatgctcacttatcggaggtcagaaaatttggagatcatttgctattctgacacagatattgtgaattgccaagaaactaagagatctacttctagttatgtctacttgatgtctggaggagctatatcatgcaaaagtgctaagcacgcactcatatctcatccctcatggcaacataattcatagcttgttatgggcaaccaacaatgtaatatggctacgaaatttggtcacttggctgcaggttgtgtaaggaattgaaagactgctaaggtatattgtgacaatttattagcagttctatatccaattgacaattatgataaattttagagctagtgtttcctccttcttcttttcttttttttttttttttttttttttttaaagctagtgtttcattcttaattcaattattatttgaaacttaatgaaatttaaacaaactattgttctattagaatgtttttacatgcattgcatttatatttagcttatatttttagtttataatttttgtttatgttatatttttttcaaa

SEQ ID NO: 197125 - DNA, 1009 bp, Cannabis indica
agagagagaaagtgaaagagaagagaagagagattttcggtggtgagctttattggtcttcgtttgaaggccttgtttggtttggtctaccgtcaattaatacagtggtaattattgctggctgtctacttttttttatatttatatatatacaatatttaatattataatatatattacatgagaaaggagaaatggacagaaagtttgaggtgtggggtaatgtctatagggatggctgtcagaagcaataataaataaatatacttattttaattttaaattataaaatatgaagacccaacttccaccaaaatctaggacttgatctatttctttcttttttgccctagatttctttctttggttttttttttaaacaaaaagaaattgtattacctacctagctgtatctatctaactaaattatttatcatcacaattatgttctttctttttttttctatttttgtttctatttgtgaaattttattttcattcaagaaaattaaagaaaaaatgaaattatccttttgggatttctaattaaatgaacagagatcattgaattattgcttgtacaaaattgtaaaatgaagggtaaaattattagtactgttttcatccttatcttgttatcctttattatttgagccagaaagattttaatgggtaccaaagttttgactcttattttttgttattctattttctttcttaagttaatgaagtttttttcttttactaaatttcaaggaagtaggtacagaaatatgtatagcacaaaaatttagaggatctgtttgtttgtttatttattaaaatttatgttcgtttaaaaaaaaaaagattctaatgtgcttagattctgataattatttaggatttttcccctttagctaataaaaaattgaaggctattataagaggaaaagtaatgaatatgacttgggtagccatttatatatatattatgaaattgaaagacttttacacaaggtttggcaaa

SEQ ID NO: 197126 - DNA, 1085 bp, Cannabis indica
gactttgtttttagaggaaagatccaagtatatttggaaaaatcatctatgaaaataatgtaatacttgaacccttcattggtaggatatggagatggcccccatagatcggtatggacaatttcaaaggggtgtttagtgctgtgttgagatgaatgaaaagagaattgatgtaatttcccatattgacaagcattgcaaaaactagtttgagtagtgggcacatttatggaattaagaactttattcaaaacaagttgggaggggtggcccaatctttggtgccactgatttacattggatacattctttgtatcttgagtgttcttattacaagaaaaagattgaaaaatctgtcttgagggctttggacagtgagacttcttttgggtaggcaaatggtatagaccttctttaattgctccctgaagtagatggttcttggtgtgattgtccttgacataacaacaatcagagttaaattcaactgtaacatcattatctttggtaaatttagagatgctaatgaggtttttagtgatagaagggacatgaagaatatttttaagatgtaaaggtttgcttgctgcaatagaacaagagccaatatttttaattgcaagagatgagccattacctacaaccaatttttctttgcctttgtaggatgtttgttgttgtaggttcgagttgtctgctgtaacatggtttgatgctccactgtcaagataccaattggagtcatcagtcatagagggtgaagtaatgtaggcctgtggttggtttgctgcagggttaagattttcatctggtccattgtaacttagatcgaatcgtctgtagcatctttggactgtatgtccaactctgttgcagagttggcacacaggacgattgccttgattggggtttcgacctcctgagttgcctcgacctcgattgttgggattcgaaccacggcctctgtttccttgccccatgttacaatttgactgattggaatttgatggtggtggcttcctgaactgagtcatgttggctgaagcattagtgagatcaagggagagagtagcagcatgtgcttc

SEQ ID NO: 197127 - DNA, 1096 bp, Cannabis indica
gagtatgtcctgttactgttttctctgtaatttgatgtagcccagagtacctgaggttgttcatcttacccatttttcccttagttcgcgccaagctttcctttttatagtattttttcaaggtttttattaatagcctttgactttgatcgttggcttatggtacttgatactgacgagaaacttttaataatcttctcccttatgcggaatttagtgaacaaacctccatcaaactaatttatgttgtcagacacaatctttatgggctttccaaacctgcagatgatattcttaatcacaaaatccatgacttttttttttgaagtgattgaaaccagtggttcaacttcagcccatttattaaagaagtcgattgcgaccaccacatacttcgcacctccttgcccagttggtaaagatctaattaaatcaatcccccatataacaaatgggtaaggcgaggtcatcataagaagttcaataaggggtatccttggtatatgtgaaaactggtggcacttgtcgcacttcttgacaaatttatgagtgtctttgttgatggtagccaaaaataaccctatcggattatcttcttagataagctctatcatccagcatgatccccacaaaagctctcatgaatttttttaatgatgtcagtggcttatgatgggagtacacatcacagtaagggcatggaataccctctcatgtaaagtttgtcatcaataagtgtgtatctcgggatcgcatacatgaatttccaagtctcaccttaatatgttgaaaatttcctattcagcaagtattttatgattggagtcatccatgtgggactcgaatctatcatttttatttcttgctcctcatcgtcgcagatactgggctcgcatagtacctttactagaactaagttgagattttttgactcaaactgtgatgccaactttgctaaggcatcagcgttagagttttgttctcttgaaacttattcaattttaaaataatcaaacttctctaagttcttccaaactttctctaagtatttggccatcttggtgtcctttgcttggtattcaccgaacacttgatt

SEQ ID NO: 197128 - DNA, 1113 bp, Cannabis indica
ttacgaccaacatgcatgaataagtatttcccttttatttcttttttttttttttaaactttgtgatatgacacctgtgaatattatgcatgggaaactaaatttgcttttttgggtaaaaattaaaaaatggtaggacccaataactgacagccacgtgggctccactggaagctatagttggatgtgattggaggaggtggtggggttaggcctttctgaattagattacaatgtcacgtaaagcataaaagtgtatttaataattgtttcaggtctcctttcaaaaccaacaaattttatataattatctttctcaggacttaaaataaaaaaataaatttaattatcttaggttggactgggttgcactcctctgtagcgtgggtgcacagtcttttaaatactcaaaccttaaaatatacaataattaattaaataatcaaacttgtaacttggctcattgagatgctaacacatgtgtaataatttattttttgaaaaaacacgtgtaataataatgcttcgtgttcttattatttattttaggacttttttcaataatattcatgattactaaattatttataaaaataattttacataaaaaattacttaaggatccataccgtgtatctatattcaaacttcttaaaaatgaaagaattacgtgcactatttgcactttgtttaaatttacattttctaaattgaatgtctttattttctaaaaaaaaatatatattcatgtctttcgatctcttaatagtttgtttttttattttaaaaaaaataatagtttccaatttcaccattagctattttagctcaaaaagaataccattagaacctattttttaagatgactattttaatacgggggaaacatatatttttttgtcattaaaaaaatgaaataaaaacaaccttttaatttctaatttttatttagttaacgagtctattttttttttttggtcttaatatctaaagaataactaaatgacttaagcaaaacttattatatcaaccaatttcaaaaggatttcatatatattttggtcactttttttgtttagtgacttttaaaaggggaattatcccatatattat

SEQ ID NO: 197129 - DNA, 752 bp, Cannabis indica
gcagttaatgatcgaagagcagagttggccttatagtttcccagcttcagaagattaccccaagtcagaacaacgtggttatgttagtggaagactacttgtcaaagacaggtataacaataatcattaaataaaatcatctttttgaaatatatttatgtctatttttttgtttatatttttatatacgtaaaatgtgtgtaggtatattaacagtgattacatttctgccaatggtgcatatgtgggattggctccaccaggagaggttggatcgtggcaacgagaatgcaaggtgactaactgtcgattaaataatcaagtaatgattttatatgatatttataaactaatcaagttaactttatgattaatcaggattaccaattttggagcagagcagatgaaaatggctacttctccatcgattatgttcgtgaaggcgactataatctatacgcatgggtccctggtttcattggggattatcgttatgatatcgtccttaccataacttctggtaaataaatatagatataaaagaactgattctattcactaatgttaggagaatataaaatcacacagaatagagaatgtagggtatgttaaaactaatagtttcatagaagctcatgaagagaagaggttcagttgtttaatttgatttggtttgggacacaatgcaatgcaggttcatatgttgagatgggggatctagtctatgaacctccaagaaatggaccaacatt

SEQ ID NO: 197130 - DNA, 750 bp, Cannabis indica
attattatattatttttaaaaatttatagtttttttattattgaaaacaactttaaattaatttttatgacaacagtactataaaaccatatcattttcagtgttaaatttcattttctgattaacatatacaatttcactaacacaaaataaaccaatttctaatcttttataaaacataaatagtaataaataaataaaaagatggggtagctattgagcattgcatatatatgcctagctagtaagcaatgcactagaattagcagtgaaacaacatatgtgattttatatgccctaaaagaattttgagcaaaatagaaaatataattttggggattctcaagtttctattgttatggtgcaattgtttattacgattattatcgttataaatagttattaatagatagattgtgtaagatgttttttagatttaaaagcctagtatacatcacacttctttaatacttaatcgttaatcgcttattgaattcttaactgagattattgttaggattaaacagcttaatatacctaatttttatgattttactttttgaactagatcttcatgtaaaaaaaatagtaagtaggaagtaagtaaaaaatgctccaataatttaataagaagctttggtgttttctttttcctttctttggttatctttttcttttgattatgattaaatttgctttttcttgttctttgctctctttttagtttgggaagataagaattattacttt

SEQ ID NO: 197131 - DNA, 977 bp, Cannabis indica
gtccaaataacatagctgaactcataagtttatcttgggtggccacttgtatgacatcttcgaaatttatgtaaatatgaagttggaagaataaggatggattgacaagaaccctcccgtacacattttgaacttttactctcataaatttcaagaacatgggttgaagagaaatatgagtctttttgaggaccttctcaataaatgacacataagtttcaactgaatcaagatgttccagtgccttcttgtttcctttacttttagttgttttttctttttcttttcctttccatttctctttttccttcgaatagtttgaactatgaagtttcttaattagagaatcctggataatttcaagtaaaattataatacaattcatacaaaatgtaacattaatgtaaatacaagtaaattattgcatacttgttcagtcaaaatcaattctttaggccaaggaagcagtgtgttaaatacatcataaacatagcatataacaccagttggatatgagatttcagcttcctcctgaataacatttatgatttgaactcatgcatatgttggattttatgccctaactaaaattctagttcaatgttatcttgaattttatttattaataaaggaatagaattattttattacttatttaatgcttggttcacatgtttgtttcatggtcatttatttgatttttaaattcttttaaatcgttatcacattgttattcatgattactatgttgtctacacagtgaaaagttatcaagattatgtgattaaacattagccccatgatttataatacataggatttttctgatatgataatcaacaatgtagtttacttacacttagatagtggtatgtcttttctaagacattggtaaagtaagcttgtaatggatgtattattatacatcggactggactgatattcacatataatagatatcataaacttaccataat

SEQ ID NO: 197132 - DNA, 1945 bp, Cannabis indica
aagaaacaacaattagtttgtggagcattcgcgtctgttaaaatatcagttttcttttagaaatacttggcagacaacttaaatttgaagatagagatgtatactatacagatggatattgatgctaaagaactcaaaaatgttgttgatttcaataaaattatcttggaatacacaggagtcaagcttgaaatagaggactaaggtataatcctactcagttctttgcccacatcttatgaacattttgtagacacaatcttgtatggaaaagatactctcacaatgacagaagttaaagtagccttgaactcaaaagaaattcagaaaagatcaaggacatggaaaaggaaacaatggcaacaaaggtcacaacaaccataaaccaaagtctaaattcaaacaagggaaattttgcaattactgtaaaagagaagggcattacaagtctgaatgctactacataatgaacaagtaaaccagagaaaaaaatcaagaaagaggataagctgatagagattaacaagctaaagttgcaagttttgagatgaaagaccatggcatggcctagaaaattttgggaattgaggttgaaagaccataaccaggtataatcaaactgcattagaagaagtacttagataaagtactataaaagtttaagacaaacaaggccaaaggtgtagccactcctctagctacacatgtcaaattgtttcaaactcagtgtccacaaacaaagaaaaataggaaagctatggaaaaggtacctatgctaatatatattaggcaacttgatgtattctatggtttgtactagaccagatctaatgcaagccttaagtgttgttagtaggtacatgactgatcctggagaggatcattggaaagctctcaaatggattctgatatatgtccaagggacaacagatttgggacatgtttttagaagaaaatcaggtcaacaagctgaagtgtatggctatgttgacactaattatggagccaatatagacacaaggaaataactcactggttcagtgttttgtgtgtgtggaaacacagtgagttgaaagtctaatatgcaaaaggtagtttccctttcaactactaaagctgagtacatggcaacagctgaagccttcaaggaagctctctggttgaagggtttaactcaagagattagtttcaggcagaaattgtggacatcttctgtgatattcaaagtgctctgcactgcattaaaaaccctatgctccatgaaagatcaaagtatatagacaagtacgtagtattttataagagacgttgttgccaaagatcaagttcaagccaagaagttcaatactaaagacaatggttgctgatatgctgaccaagagtgtgaccttacaaaagtttaaacattgtcttaaactcctaaacattgataaatgttgctgaaattcatacgttcttatggatttcagctgtcacaactactgcaaactgtcctagtaactaaatcaaagtggatttgcagtgtggttcagctactcagacaaatttgtgcacatgtagtcttgttgacatgtctaggcacttaatagtacgttgcatctagttagtttcctgttatgtttcctagttcgagtactatatatagaagcctatcaccactattgatttttgtactgaacttaaaagtttgatatgagagagttggagggagtgttaaagagtgtattgtgtatttcactaatgcctctctctcatgtgagctaaattataacggtacgtgttaggctaatggatcttgtctcgaattgtaaaatctctttggagattcaataaagaaaccaaccattgttgaaggttgttttatcatattaatctctcactctcttcttattttgattttagcttggtcattctaattctcttgactgcattgattgaattgttt

SEQ ID NO: 197133 - DNA, 808 bp, Cannabis indica
tataattgtgtggccaaaagtagagaaaagaaatagaagaggaatccacgtggggaggttgcgtgttgattacgtgttcagtttaactggaacttgagttcactgttaattacttcccaatctgaatcttccacgtgtgaatctcccttcttctggtcaacgcctcatttttttgacttttctactgttacataattcttctaaaatactttcaccgttacttacctaactacctactcatactatactattattacctctattaaagaatcccacccacaaaaacatacctccactctaggcatggaagtgggttcacatagacggacctaagtaaaggttaggaggcagaaggaaaaaaaaagtagcatctattttaatttcttttttgataggtaaagtaactttcaatgatagagcaaataggtccaaattacaattacaataactgaattgaaaagccactaaagctagcttagtagtgagggagggatgggaaaaagggagaggtcataggttcgaactcaggacctttaaactattaagttaatatatgattgtaaaatacgattacgctacacttaaaaaaaaaaaattgatttgaaaatagatcattccaaataatctctctatttaagcctaatgatttcttaactagtttatgtgctaatatattatcattccttcaaatgtaatttaaggaaacattaagaaataaaataaaaaatttgttaccaattgaacatgatccgatctgtccttccattcatgcttgatcttgctaactaaaacttgacaaactaattcc

SEQ ID NO: 197134 - DNA, 1546 bp, Cannabis indica
aaaaaaataaagagatcaattataactattcagatattaaaaatacaaaaataagtgcattattttatagtggtccatcatatcgctattagacaccactccacctagagatagtatcttataaatgattagcgatattccatgtacaatagttattaaattttgtgagctcaatacttaattatatcaataataaaattaaatgactatagatagatattagatatataggtagtgaccactaatatctttttccttttagtatagtgccctcaatatttatatttcttttttataattaatccctatatatttaaaaattgctaaaaaatattattggtgtcaagtatcttcgtcagtgtcatatcgttattagtgtaattaagtatcaagtttcatataatttaagaaaatacttttaaaaaatattattaactaatcgtgaaacatgacctataaaaaatgttggacaccaccccactaatacccaataacaatattttatatatttatatagtttgttacatattaaatgattatggatagatattatacatatataggtacaaataacatattaaattacaaacctcgataagggggttgtttatattgtaggaattaaataattttatatatagcccattgacataacacatttattacattattattttattttatttaatataattggctgaatctttacctaatattaataagtataaccaccctagttccaaagtcatacatcatgtggaaaatagctacacatctctcacttaattactctaataaacacaatgtaagcatgcttattaattgtcattattattattattattattattattacataagatgtgacttttttaattttatttgtaagaaactcataaaaaaaaaattgtatgtatgctaatgagtggtagtccttagtgattatgatggtgatcaatagtcattaagcatcactaattatttttcacacaacctaatagaaagataattgttaaaaaagagaaatgctaaaatgtaccacagttagtgcttagcactctcttcggtataattatatattaattctatataatttaagtaaataatttttaaggaatattgataactaatcataagcacccacctataaaaaatacttggatactactagtacccaataacaatacttctataaaaatagttaaaatctcatattactatttataattggaacaatttaataatgaatttttacttattttattttaaaaataattacagaaaaccactaattatttatagggcaccatgtgggtgttagacaccataataacactatgaaagaggtgtgcatacatttttcactacaaccttttttaagattagaatatattctataatatcattgcagttaatttaattacaaagggacaatcttgatgtagactaaaacaacagaaagtggttaaattaacattattaattagtgggtaagttcttaaaagcgatttattagataataggcaaaaaatcttaaaaaataaac

SEQ ID NO: 197135 - DNA, 674 bp, Cannabis indica
tctctctttctttcttgaaactaacattcttgctaaaccttaaaatatttagagactaaggaattagagcaattactatgtaaatgcccaatagggacttctcaccgtacacaccctcaaccatgcttatattaggaactccagctgcaaaaaattaataaatctatggcctcaaaatcataccctaatgtactaaaaggaaaataaaaaagcaaatataagatctgtattacaattttttaagcattatatcctcaaaattaaacctttctgctctataacaacaaagcttttattttagagttacaaattacaaactgcccaaaagtacataaaatatttaagatttggaataatcaaacccaacatttttaccatttaaatgatcgttcaaatcatagcttcactttaattataaggctaacattccaactgttaaatcaattaaagtttatattatgatttgaagaaaaactgaacaaacccagaagagatttcactttgttgctctgtaaatgtccaataaaatgccattctatgtcatcaggaagctgttcaaaaacaaaacaaaaagatcaaaaaagagtatttttgttcatacaaagcccaacatgttaaaaagaaaaaaaaaaacttgaaaatgttatatatatatatatatatatatatatata

SEQ ID NO: 197136 - DNA, 2536 bp, Cannabis indica
tttctttttctatttctatttctatgtgtacggcttatttgtttatttatttccttttgtggtttgttcaacaaaactttactatattttcctcatcagaaatctgtcagaaaatatttctgttttttcacttcctttttctttcttcataccgtcatatatatatatatatacggattcttatcatattttgtctctaataaaactgtatatattatgaagatttaactcatcatcaccacaattagggctgcatgcatttcattttaccttttattgggaatatttccagttttctactctctttcttttttttagaaaaatatatatacggtttatttatattttacacacaataatatcataatcgcatgcgatattatttcttttgatctaatatatattattcgtaagtgttaattattttatttatttaattttttttttggaaaaaatagattttggtcattatgttaattaatttggctgatcttcttcttcgacaatttataatgcgtgtggaaaatgataaaatagttgttattttaaatcagaataaataatatatattttttttcttgtttggttttagagtgttcgttggttctcaatatcagatttaaggtggagtacttcttctcaattgggtcagctgtctaatcattattaattaattaaattcgtcggtaagtacaaaaatataattaattaattaatgaattaataagtaataataatgaagtaattaatttaattatatttattttgatagggagagaggatcagtggtggttggtttgggttgggatgacaacgagagagagcacgcttgtgttaatattcatgaaaaacgaaacgtgcgtgactgtgcacatgcgtgctctctcccgttgtcatacaatacatacatatatatatatggattaatcactgctacccaggtaacactatatatgtatatatatatatttatatgtgttcatgtatagatgatatttcgatgacactactaacaaaacataagatttttacatgggttatatatgagttttataagttgtccatctatagaagtaatggaaaaaattaggaatgtctagctagtatatactttggctttcaatcgatatatcaactcaatcttgattcaatagttatacaccatggtgtgattaccatttcgtgattcactcccaaataatatatatatatgaccatgttcataagataaaaggaaaaattacttataacatgaattaataggcaaaagaatatgaaaaaggaaaaaaggaagagtggattaattaatggaatttggtgtttacatcttaattactacttatgatatgtgaacaatatcaaataacatgatgtcatttgtttagaaatatgaagttttttttttttttacttaagccaattatgtttacaaaagttttgattgttaaccatgagagtgcttaatattttgattacttataaagcgtacttgtttttgtggcaacttattatatattttgagatgtttttctaaattttggctgtattataatcttgaacattatttctgaaatatgtatgatgcagaatgcagatgtttacaattttaaggatactatatgattatatcatatgatgataaaattgttgctaacaattgtgtagcgtgtttttatttgtagaacttgtcatccaaataattgaatttgtaggtgataatcacttcatcagtgtgtgtgtatatatatattatattgtttacaggccacatatatatacttcggtcaggtgaggtattgaatttaatttattaaagtgttaaagatttaatgactatttttttgattaattatcacatgtcaatacacaataattcaagcaatttaaaataaactgatcttgagtctcaattataagataattaatagtaaataaagaagatagagagaactatataaatttgttttaggcaatcaatacaatacatatacagactcaatccgggataccaaacgaatccgtatacaattgaatatgcttaattataattgatttggggagggttattttgatcttatataatgttattgattggtagcttttgtaaacactatgggtaagtttggttaaaaggaataaaaacaaaagaattagaatgagaatagaatatagatgaaaaaaaaaattgataaaaagttattattatttttatcttgcattggattgatttttcttttcattctgtcaccttcaaccaaacaaactcaaataatggttgcaaagaatgaaaacataaaagtagaactaggaataggaatacaatcaaatttattgaaaggcataaaagcaattgttaaaaaataattaaattttatctcaatttgcattggaatatctttcctttcgattcaaaatggagtagtcattccatcaaaatagttaaaaagacatttcaataccaaaatgcaaccaaacaaaagaatggaataaaaattaattcttttccatttcatgtcatttcattacttccaaccaa

SEQ ID NO: 197137 - DNA, 1170 bp, Cannabis indica
accaaccaaatcagacttagactacttgaatcaattgtcatgattattattattattattattattattaagcttttcatctaaataaattccctcttatgtatccagaattttctatcacaaagactaattaattggacaaatttacacacaagcttaataataagctaaactatatatataaaaaaacaatgttcaattctatgatcatcaccatcatcagggtctcaattcacaccaattttaatttattgaaaaaaaatcaggagccaatccactcaatattcacaacacaatcattcactttcactaaaaaaaaagttaaattataactaacctaactggttgtgtcggatcggatcggataggatcgggaagagtgggaatagttgtcggcccgtcaaccatcggagttcgccgttcattatcatcgatctggatcacgcgggtggtggagatccgctgaataggcttgttagtatgtggatgaatgagtatataatcgtcatcatcaacaaaaacaatatcatcctcattaaaatcatcatcttcctcttcctcttcctcttcctcttcctctagtttgatcccaagccgccagcgaccgtaatcgagaagagcatcatcagcaataacatcatcatcatcatcatcttgatcgatctcgctgagagcagagttgttgttggtttggggttgttgtgatgccaacaattgacaaagcttcctccgcttcctcctatcctctgccatcatcacattgtacgtaagaagccctaaatcatctgacattgttgttcttctctctttctctctttcttctttcaaaccctaatccttaataatcctaatccccctttttgtatatattaatatttttttttcctatttctattcgtattccttttttttaaacggtttctattcctattcctagttttatctttttgattttgggtaactatcttattataatgcactatcttaaggaattaaaacaaatgtactgatataacttctatttgtttcgtaccatttaaaaaaaaaaaaaactaaagttactacttttttttaatttaagtaaaaattaaaaattttcttaatacttaaaaaccttaaaactattttaatttcttaaatactatacatttctaaactaaaaaaactaat

SEQ ID NO: 197138 - DNA, 1915 bp, Cannabis indica
aaacaaccttaatatagaatcaacgatgactctattgcgtagccaaacatagtaaagtttactttcttagatttgcgtatactattcacatattaagtttctttatttgcaatttatttaaatgtgtttagaaaaaattaaaaaaaagagagatattatttaaccaaaagagcatctggatagagcctagaggcactatggaatcattctggacattgatggtttctaatttttttcaatattagaaagaaaagagtcttacaatttgtagcgttatcctcattcattcctagaaaaagagcagtgtcttggatgcttattgtggaataagcagactgcagcaactgaaacattttctttgtgtaaagctctgcaagatgttcagacagtcgacagttaggaacacagcatgaaaaataaaattacttatagtaatgttaccctacaagttcttgctaacactacttccggaaatcctaccaattatgtagacaaggaatacaacataccagcagcaaagacagttttacaaatattttcaagtacagacaagattccatgttttaacatcatttagtattagctgcttaggctctcttaataggattaccatactacgacaaatatattctattaaaacaatactcagcaacagttttctttggcacattcatatagaaaaaaaaccttaattataagatagcaacatcattaagatccaaatggccttattctcctagaacaatttaaataatgaactaggctctctgtcctccagaaaacataaaaataataaagaaaatctgatgtagaagatcacatgaaaagatcagaattgagcatggcagttagaaattatgtaagagcacatatacaggtataattagtaataaataatgtgatagagcactgatagattgtgtaaacattctttataatattataaacaagtaaaatcaggagaaaattcagcatagattgatcatcatgtgccacaaagaattcaagctgcacacaacataaaagtgtgttgaggtggctaaaagcaattaaggccaaatcataatctaatcttcgtctaaataattagtgtgatatttcttctcactggcagtagctatgtaaactgtaatagctctctaagttcaatatcatggattgcccatttagtctagcgaaaatcatgttgcaagaaaatcaattttcattaccacgttcccctcattaaacttgtagtagtcatgagaatgtatcaagaaatttaaaaacagaacaggattttatgaaaatgcctctccctttctcgccacccagctaattgtactctctatagtaaatagctcaggaaatacagaaaaagcacacaagtagaatgactgaaatttccagctccaggagatccttgagaatgacatggaagacaagctaagggggagataattttgtattatcacataagcaaagggactaaagcaaccatacgaagctgtaactaagttataatcaaacaagatgacatttgaaaatggtcattataatcaaaacaagcggtaactaaattaaaataatttttgtggttgaatattgaactgttggaactggttgtccggactcagacttgtaggggtgctggacaactaaatgaaaattatggcatgcttactttttaaaaaattataatagatgagatgcagatcccatagtctgtaagagctacataactagaatctaagtatttaaccatactgtaagtaagttacactagcaaattctacttcgtcagacaaaacaacctattctgaaaattcttcacgcttattatgaataaccaccaattataatagatgtgacacagaatccagagtctaaattacaaaagcttatatctaggatttaaacatttacccataatatt

SEQ ID NO: 197139 - DNA, 757 bp, Cannabis indica
aaaatattttgattgctttttcatatttaggtaaacaaattaaaatgtttaatttcttttccaaataatttaataaacaatataataagaattattattattttatattttaaattgtttcatttattctattgataatctgatttcgattaggatttagtaaaattacagtaataaaatttattaatatgtggataacattgtattacaattaattaatatcataatattttaataattaattaagtaataaatataatcaaatgtaatcaacaaatttgttcaaaacaatagaatgaacaaatgtattacttataatttgataattattatttgaatattttaacaattaattaaaaaataaagttgagtaataagtataataatgattattaattagaatgctttctcaataaccaaatattaattttggtccttgcaaacttttttttattttttattttagtgattttcagaattaataaatatattaattataatttggtattaattataatttaatttagttataccatatattgataggctaacataagttaatattgaacgtaacataatttttagatgtctcaactctaaagttaagtgtatttgacttggagtaatcataatctcttaagacgttttttcaataagcgtacgagtaaggacaaaatatgttgaaaacattatgttgatttgcaaggtcagtcgtcattttagaaagtagatagagtgacatacatgtatataagaa

SEQ ID NO: 197140 - DNA, 590 bp, Cannabis indica
aactttatacagtacttatcacacgaacgctcaaccaattttatagttgtcatcctacgtacattcacatttgtagaaaaaacgttccaccggtaccacaaaataaaatgtaaaaactttgataaactgtatgttaagttgtttctttgcaaagaaaaaaaggtctaaacaatgttttaaaaataactatatcatcagtcacaagtcaaatttattaaattcaggagctattatcttttttctttattttattataaaaacacatgcaatttcttaatttgttaattctaccatttaatatttgtcacaaaatcattatctttctatatattttaaaattatgtttttaatttcaatattattactttgtttataatatacatcaaaatatattttaaattatatcactcaataaatataatatatatgtataatttacaaaagttaggcaacaccgcgcttgcctaattttgaataaaatgaagaaggcaaaccttcttccctatttttctcttattaattcattgcactcatctctctctttctatgattctcattctctctccgtgattctctcactctctctctct

SEQ ID NO: 197141 - DNA, 1600 bp, Cannabis indica
tttgtaattacaatatgcatactaaaaaaagaaatattaaaatattgaatcaaatgaaaaattcagtaatagcaaatcatttcactgtgttaggagatttgaatctctttgacattattcgaagaatgaataagaacactgaaattgaaaaacagagagagagagaaaagaggagagaaagaaacacaaagatagagtgaaagagttcaattgtattcaacgagaacagctagtacagtatttatacaatggagctgaaagcaattaatcaagattagttacaatcgaaaagctaacctactaactgaaaagtacagactgttagtaaactaacttaagagactaactgttacaactgaattcccttaacactccccacaaactcagcattaaatgcatcaacaatggtgactttggatcaaaaactagagaagttttgattggaaattgctttggttaggccatttgccagttgatccactgctggaacacgtttgacaatgtacaaattcaacttgatatgtttggtgcgagcatgaagaacaggatttgtagtgagcaaaactatgctaagattgtcacaccagacagttggaggttggggcagctgtatgtggagcttagaaaataaggaatgaagcccaacaagttcagcaaccacattagcaaggcttctgtaccctgcttttgtactcgatttggaaatagtgtgttgttttttagaattccaggcaatgagatttgaaccaaagaagatggcaaaacctgaggatgttttatcatctgtatcagtgccccaatcaacatcacaaaaggcctttacttcaaagttttgaggcttggtgaaatgaagaccataatgaataatgtcagccacatatcaaagtattctcttgacagcaagccagtgattttgaagtagtttttgcatgaattgacaaaccttatttacactataagatagttcaggtctagttatggtaaggtactgtagagctccaactatagacttgtacatttgtcgattgggaaagacatcactgccataggcaaatagtttttttccactgatcataggtgtagaaataggttcgacatcatgcgtatctactctgaagaggagatccttagcatacttagcttgagatagaagaaggccactgttggtttttgcaacttcaattccaaggaaatactttagttcccctaggtcttttagggagaaagtattgtgaagtgaagtaatgagagatgcaattgttctggggtcacttccagtgaccaaaatgccatctacatacacaaggacaagtatgatggaggatgcattgtgtagaatgaatagggaatgatctgacttggatgaagtgaatctcaatgataagagacagtgatgcaacctttcaaaccaagctcttggaacttgtttcaacccatagagagccttgtgtagcttgcaaactaaattgggttgaatggtgatttcaaaaccaggggttgtgtcacgtagacctcttcttgcaatacctcattaaaaaaagcattattaacatctaattgtctaatgtttcatcctttagaaatggccaaagtgagaacg

SEQ ID NO: 197142 - DNA, 1451 bp, Cannabis indica
gaagctacacaatggagtgaaggggaaaggagagccatgaacacattttggccactgcttgttcgagcactaccgcctgatgtgatcttcatagctgatcccgaaggatctattataggtgctgggagttcaattgggcctcgatttgttggcaattctagtagcgaaatgagattggttggtgctctaagagaagttttagctggagggcaccttgggtttgaggaagttcaaggtgttttaagagatgttcttccattgaaaatggataatgatgatgcaatgcccagtggtgtaagtgcttctttgctttcggcttttttaattggtcagcgtatgaacagagaaacagaccgcgaattaaaagcttactgccttgcatttgatgatgaacttggtattttctttgcgtctttcatcaattttagaatttcatgggactgttttcaattgcttgttgaggttaatttgtttcatttattgattaacagggcctcctcctgttgctgatgttagatcattgacccattatggggagccttatgatggaaatactcgtttttttaggagcactttgtttgtagctgcagttagatcctgttatggtgaatcttgcttgcttcacggtgtagaatggttgcctcctaaggtcagttttctgtttaagttgaaagccaactttttttttcattcattactgcataaacaattctatttgatcccaccctgcatttcaactttgctattatgatataacattacgtattatgtgaaaaataactgtactctagccaatgaaatttctcttcactggtttagttacaatactcttgttatttttcagggaggaattactgaagaacaaatgctgaagtttatgggagccaatacgaatctgtctcccttgcaagcaaaaacacttatcgaggtgattgtggatccacatgtgtctttaagttgcttctctttggcatgtttctaatttatgatcttttgctatgcattttaacttttgtaattgttcaaatctttatccttgtttcaggacgaagaagtcggttttgcctacgtaagtcaacgtgaagcccggccatctctgtatgaatatctagccaaatttattcattttgatcttcctctttgcactatctgtttgttgagacattttcatttaaaccccaccacttggaatattttattatcgcaagtataggatgatgaatactgaattcagcatataagttttgccaaatagtttaagagtcacgagcatatgcgtatgctaggttttcgattctagcttgaatagatttgagcaatgagctatctatagattctagaatgacctgttgactggtttagaatctgccataattgtttccagattttggtttcccttttgtctacaattcattgatggactagtagacctggtattgctagtaattctg

SEQ ID NO: 197143 - DNA, 580 bp, Cannabis indica
tcttagacataaaaagtcaaattttcatcttgactaacactacaactaccgaccatttgttgttttgtcatattgttattttctgagaaggaactaccgaccatttgtactattagagcacttgctaaggtatacttggtctagtctaaggctagagataaaaaaaatctttgtagaaataaatatttatataataaggctctaaaattttgagtttgtaaccatagagtctataatttatgtatttttttttttatttaagcatttacatgtaatgtataagttgagattcgaattcaagattttcaatatatatgcattcttatagtcccttgagttaatctcaaatagttatttatgtattcaatgttagtaaaatgtaatttttgtttaattttataagtataaattctgttcgtattttaaaaaatatacatataagactcgattttaaattattgagcttaataaaaatatgtaacttgagttatttttaaattttcttgttagtaaaacttgaataaaaattacaattttaataccattagatacactccaatatttatttggcaaggaaacc

SEQ ID NO: 197144 - DNA, 656 bp, Cannabis indica
tttttttttttaacaattatattgttttaaataattttttcgtgataagaaaaaaatatattttttacttctttggagtagttgccgatttcaaagtgaaattataaaaatataaacaaccctaaaaatacatagtttggagaggaagaaaacgatgaaggctattatgaatccaaataagcattttctactctactaataatacaagaggaagaaaaccatgaaggcttatgaatccaaataagcattttctactctacaaataatactagagaatccagaggattgaatgtagggttccacatcgagtgggttttaataggttttgggtattcgagttttcaggttcacatttttcgagtttgggtttcggaatcttgggaccgaacttgcctgtatgaaaatcaagtttttcaagttttgagctggggtgggttgagtttaggcgggttgggttgggtttcgggttaggctagccttcttctttaaaaaaaaatatccctctttttaacaaaaaaaaaaaaaaaatacaaaataatacaattatacaatattttattatatatacatataacataaactatcacattaacaatttaacacacactcacaaattcacaattaatatatataatataagtatatataatatatat

SEQ ID NO: 197145 - DNA, 1367 bp, Cannabis indica
atggatcttacttgttatgtggggttgctctagaaactattgaacacatattttttggatgtgtttttaacagtgtcttaaagaaatcaaaaggtggttgggttggtaaggggctgcttgctccttaaaggcactaatcaggtagattttcgatctaagtgctctcaagttaaaaaaaaaaattattataacatgcttggtttatcaaattttgattaatcgaaattattttttttagaatgacaagatgcaaacagttggaagtagtgttaagcaagtaaaaataaatgtaaaacatagaattacaggtctaaatattatcataaaaataatagaagaaagagagcaatttcagtcattgtaattttttttattaaaacgtttatatattacatcatgcataacctgaaactcaaactcaggacctccaacacacacgcatctcctatggccacttgagctagccttaaatagttaaattcagtcattgtaattaatttcttttttcaaatctcttgttaagatgctatttaagttgtaaataatttatttttttgagctatataattttttgatttataaaaataaattaataataataataatattataatcagttttgatacaaaatgtttttacaagcaacaataataattgttccataaataaaattaagaaaaaaaactatattcaacatgtgaataaaatggtttataagaaaaagaggatgtgacataatgtgctttcagtaactaccgaaatagagcacttaaaataactcgatttgaaatcacagaattgttcataaacgacaacaaaagtgaaaaacgacaccaaaagtgaaaaacgacaataacgaaaaaaacgacaacaaacgtcaaaacgacaacaaaagtgaaaaacgacaataaacggcaacaaaagtcaaaaaacgacaataaacgtcgaaaacgacaacaaaaataaaaaacgacaatagtggtaaaacggcaacaaaagtgaaaacgacaataaaggtaaaaaaacgacaacaaaactgaaaacgacaataatgataaaaacgacaaaaaaaaatgagaaacgacaaaacgacagcaaaattaaaacgcaataaacgacaacaaaagtaaaaacgacaataaacgacaacaaaagtgaaaaacgacagcaaaagtaaaaaacgacagaaaaataaaaaacgacagaaaaagtaaaaaacgacaacaaaagtgaaaaacgacagaaaaagtaaaaaacgacaacaaaagtgaaaatcccaaccagaagatagaagaacaattgaatatgaagtctcctcccaaaatctaaaatctccactcagcgcaaaatgattgaaaacccacaaa

SEQ ID NO: 197146 - DNA, 1720 bp, Cannabis indica
aaagagccttacttcactattattgcttgctctaaatgtagctaaagttttagctcaaaatgaaatgaggcaaaatagagaagattttatttgatttgatagagcaagtttttaacccaatttttttaaattttcaactaaaaatgtattttacctcatttgttgaggatgctcttaaaattgaaatgaggtcatgctttaattattttttttttctaatatttatattcgaataattagtaattttatctcttaaacttttgacacatctgatcatgctccttaaaatatacgacttgttaaaaatttatcctgaacttttacatttatagaaatttagtcattttgttgggttctgttacattattctgtttaaagctaacgtgtctttgtaaattcacaacttcgccgttaaactttgacaattatcgcattgtaccccctctaaataaaaatttgaaagattcaacatttttttttttgtaaatcttaaaaaattaatttagatcttaaaaaaactatttgaatgattaataatttttttttaaaaaaaaaaagaaaatcaaaattttaaaaataattatgggatttaaaaattaattactttttattaaaaaaatctatttagatataaaaagtatattaagaattcaatttttgtaaaaactaaattttacgggaataagtttaagtctattttttctcaaaaaatctagatttatttaagaaacataatattttttagtttaatttctactttgtaaaataatatatatttttattaaatttctaattatttttccttatattttaatatatgtgtttgtaaatataaataagtttgattttctattcgcaaaatcttagtttgtttaaattatatattgaatttttaataattttggttcaattttttaaggtatgtatttattaataaaataaagtttaaaaattatttcttaagaataatttagattttctaattaaaattcatatttttttcatcaatttatttcttttatcaagttttttgataattttttttaattttcaaattaataaaaaaattataatttttaagaatgaactttttttaataaaatggggcaaagtttaatgttggtcaaagttaagggagtaaaaatactaatttttaacagtagaagaaacagaacctaacagaatgggcatgattatgtaactgttattttaaggagattttaaaaagtcatatatgtgagggtgcatgattaggtagtgtcaaaagtttaaggagtaaaaatgataattattctttatattattatttcggtggtacgtatttttaaaaggtcgcaaaaaatatattatatcatgaccgcgcataaaaaatataggttatgctatgtaacgccctaatgctaaggcacgctacagtacttttacaattacggtttgaaaggtatgaagcgaagtgagtaagagtggagcaggcaaggactccatagcacaattacggtgctgtctttgctaatcaaagatttttctcgaaaaaacgtgtcaaattaaaactttttataataaatattaaactctataatttacataattatttacaaacactaggatcccatttctaaacttttatacaaaatgtactaaaatacaattttcaggtcgcacatcgactacaaaatataatccccagatgtcccgagaccgaacactccaggtcacgctg

SEQ ID NO: 197147 - DNA, 1565 bp, Cannabis indica
aggtaaaactaaggtccctatctttgccaactttgcctcgtaaagccatgacagctttggcatatttacttctttcaatgacccactcactcatcatcaaattaattataaaaatttaaacttttaaatttacaaaaaaaaaaagaaaaagaaaagataattagtgatatgatatggaacgtttttttttttgaaggagatatggaacgtttttggttgtccaaaatcacattaattagaatcgttgaaattgaatggtttgatgattattatgatctaagtgaacttttagagtgctaatttatgaacttaatcacaatatgtaactaacatctcaaacattcatttttcactgtggtttgagttttgatatgatcttatgcatgtcttttgttacttattttatctcttatctaattatattaggtgagtttaaaagtgatgactcatctctcatataaaaaagaaaaaataaatgatgactcaagtttaaattcctctcagattcttcctaaacctttaccttccccaatcaaatttagaggcttcactcttcattctttacatcctaaaatagtaatggtacaaaaattccaatttgtctagattctttacaccatagttgaaatgggtgcaaatcttgggccactaaataaaataaaaatatttgtgtttaaaaaaaaaaaaaattaaagttgataagtattttaatttgtccgggacaacatttatactatggggctttttgtcaactctggttcagaatatactttgctttttcttatggtctatattgcttgcttttattctcttgtacaagaaataggtcacaacattgattatcttgttcgtagctttaaattaatttagtttaacagggtttaaatcaagggtaagaaatattaattagttaggtacttaatcatgtcttaaaaatcatccactcagatcaatagaaagatggccttaagttagtgctaaaaaaaaaaaaaaaggaagactaatttcattccttaatctacgtaatttaatttatatatattttcttggaatgaaagaaaattatttaattagacagtctcacttgctactcatcccaatacatttcaaaataagaaagagattttcaatctaagaaatgtttgttttaaaaatattgttttcttatagataaagttaaaaatcattattcattaatacatattcaaaattaatataaaatgaaaatttaatgatgaaattcaaataggtagagattgggttggtagggtagagaaggcaaggcaagaaaaaaggctaggtatgagtttaaggataaggactacgaaggttgactaaggcacaggtcatgatgatataatagtgttggagttttagatgggcaatttagatgatttggcaccacatattttattgtagataatatattcatgttatttacatgtatttattattattattctaatcttatcctgcccaattctgttggccttttttaataatttttatttttatttgtttattaatggttttacttacccactagatctgcatattttcctttg

SEQ ID NO: 197148 - DNA, 1972 bp, Cannabis indica
aatatatgtatatatctacatataaaaaaattttgatgtatatatttgagtgagggctttagcccacacatgggctaaagtccctccgtccctgacaaacaacccctaaaggaatacaatgatatcttttaccaagtgaccaaaataggtggatttgtgagagatttttgtaacttgggtatagctattgttagtctcatctagtgacatgttagatgttgcaggtttgactactcaactccgagttagttatttcagtttactaactcaggtacacctcatattgagttgcctctataaggctttgagttttacttctttaattaggtgacgatctaaaaatgaatttagatgattattacacttgtaatgagtgcgaagggttgttgaagagaatgtgtatgtttgatcacatctctcaagtgagttaatttgtaaggtgcaagatactattgttgataagattaactttgtattcttttattattgaagatccaataaagattagccaaatggtatgtcttggtaattagtcaccacaagaagagtgataaatctccttaaactttgtctctattttatgtagtttaatccgcatttatttctggtttatgtcattgattgattctgttattctagttctacaattcttgttttatttgattcttgtgttaatttacaacaaaatatatagctttgtaaacatgtaattttagtagattgagtacaaagattagaatcttttatttgaaaagagattgtaaggcttgtatgttgtgacagagagttcgagagaactgagtgagagaaagaaaggagaaatcaacagggaggagagttgttcttcaaaggatatccgatgtgttctccaccaatttcgaaggctttgttcaaggtgaaagttctgtactgtgtaacccgctgtgtttagatcaagttgtaatgtgccattgaaatagtgaagatcgaattccttggaaggagttcaagaggagtagctccaaattagagtgaatgtgatccactatgattttctttgtatctttcactttctgttcttagctttatgttcttgtcttggctttgttctttgtctggtttttcttgtgattgttttccagataaggtttcaagttaaggttgttggtaagtatattaattctcacacaaggggctgaaccataaaaatcagttatactactgtatatttataaatcaatactaaaatataatattatattctctaaaaaaatatatatataatattacattaatggacaaagttttgatttcatgataggtaactcttacccgtacaactaattcatccagcaatcatcctcaatcctaataaaagtattgattcaaaaccaagtgatttttttcacctactaaatctaaactatttccagcgttctttacacacacacaaaaaaaatatctaaactattttaaaatatatattttgttttatgaatacactgaatcttaataatacagtacaattcagtgaagaaaagcgaaaatctaagcaagtttcagataagtagagaaaacaagaaagaaagaaatatgaataaattctaaaatgagttgtcgaactgcatataaattggtccacattgctgaaaatagttagtgcacccactgacaaagtatcagactaacccttcggtacaagcaatttttatacatggtgggctcattgatgccaaaagctctacccaaataatccaatttgacccaacaaggaataatgacacgtccacgaccaaacaacaaacaatttgcattccctaaatattatagaagttgccctttagtgattatcaactgcacaagatccaatgtggctaatgtataggcaattcgagaaggcaccaacatttagtgctattacattttgattaagacttttagagtctataatttaaatttaatagtatggtttagtttatgttaaagagtttct

SEQ ID NO: 197149 - DNA, 1385 bp, Cannabis indica
tattttcaaaaaaaataaaaaatagtttgaaagttgttaaaaatttacaggtggtgatagtaaataactgtaaaataaaaagaaaaaaatgaactaagacttaccctatcttattttgcctctaattcttatctcattgtgcacaaagtcattactcaaaatcgacaactgcaccaaaagaggagaagagttgttttttttttttttgataagtaagaggagaagagtgtgtttttatataaagttgttttaaggaaatcttttctagtgggagacttatcttcctttttgtcttttgtgggtggcattgtattgaaattgtttatggaatcaaataatcaatagtttcaaatcccccaaaataataagagtatagtatattaccaaaaggggcggcaaacaaatgcaatttttactatatacactaaactcatagaacaattttcaatttaagccctcctaaagatataaattaaccttaaagaaagttatgaaattataattactatccttggttacaatgtgaaaatatgattgagaaagtaaaatgagaacactatagtaaaaatttgatgttttatctcaaaattaattggtgataaataaaatacttatagtattgttagtagtagtagattttcacgcattattaaagtaagattttctaacattcttcttaaaatggtacttggtttttattcatcaaccttatgcggctcgatcataatgattattttttattttttgcttaatatcctcgaattatgagtgattcgtttggttgtactttttaaactagttttaaatttagtttgaatattcattagaattttatttaattttgatataatgttgaagttgagaaaataggaatagtagaactctgataccacccttagggcaacttcgtgtcattgtggttgcaaagcttcgtgtgaatctttgagtgaggtgactaagaatttttctctctatcactggcattattgctcaatttgggcaactttggcaaaaaaattattctaaatattgatttggtctataaaaaatagaattaagcaagtagcctttccaattattctacctaaaattgttcctaaatattaacaatttgtctaaaaaaaataaattaagtatatataataattatacggattggtttggtttgaaccgctactgaaatttctaaaaccttgaccaaatcagagaatataaatcggtctggattgatcaaattatttacacaggatttatttggtacggtctcaaatagtttggttagaattggttggggtttggaaccacagattacgaattatatgaacacccctactcagttggtgattcagtaggtttagaattatgagaactggctctcttggcta

SEQ ID NO: 197150 - DNA, 1114 bp, Cannabis indica
acattggcctcttctgtgcgtccctcctcttctgctaatcattcgcgtgccaagaaaccatcatccttcttgctcaaattgtggaaaaccagaacatttggttgaaaatgcttcttcatccacggatttcccctagctatggagacaagaaaaaacaagaaaaaggaaaattcaatgttgattaagcctcaacaaacatcacttctgatgatgcatctgacaccaatatcaactttgatttgtctattcaatgtcagcacttgatttcacttctcagctaataattaaatcataatgcttctcgttcagattctgttgtgcctcctgctactttaaacatgtctggtaacaatcttcttacttcttttaggtcttagattgttgatagtggtgccacgcaccacatgtgttctcatatattatgctttacttctttctctaataatctatttcataaacatgtcactttaccaaattacactcacattccattcatgccattgaagctgtccaaatcaatcctttactgatactttacaatgtactatatgtcttaagtttcaggatcaatctttttttatttactgggtatgttaacagcactgcttatttggttttctttagacctgattcatgtgttctccaggcgcattatcaaaatgtggtgactgggatagctaaatggcatgaaatactttacctgctacatcaagaacatgttggtattgttaattcaagtcaatattttttacattttactcaaaataatgtagaccaatggcacaatcgcccaggtcacctatacatttccaatggatttaatgaaaaagatttacccctatttttctgttacatcagatcctcattgttctatttgtcatttagcaaaataaaagagactttcattcatttctaataataaattttccaataatatatttgatttaattacatggacatattgggacccttccatatagtcaatattgaaggatacaagtattttctcactatagtggatgacaaatctcaatttacttggacctatatcctaaaaactaaaactgaagcacaaacaataatatcaaagtttcagttttgataatgctaaaga

SEQ ID NO: 197151 - DNA, 588 bp, Cannabis indica
aagggtgtacccctagactaacctcttaggggataaggggtgtactcctatactaaccccatgtagatcattacatttgaggtaggggtagtagtatatatccctagttggtttgactcccgtagatgtgtggtgatcgtttatcccgtttacgagggtgctagtccactgtccccctgggcgtagccaccttgctcaagctagggggaaaggtgaccgtcagacttctcttccaatggtcatgacaaccggtcatgaccaacagtcatgaatttacacattcttcatcaatttagtcctagtatcctcatgccacgtgtcatcatttttaccttgttaaaatttgggtaaacatttatcccttaagtttttggcagtatgactatacggtagaaacttttggtgtagcatgtagttcaatttagttattgataacttagtggtacggtgccaagaatgccaagcttatactagaactacatttcaaactcaaaaataattctcccattttttatatttttacaacatatcccaataataatttttttcatttgcgagcagaagtaaattacaaggaaaataaattat

SEQ ID NO: 197152 - DNA, 1183 bp, Cannabis indica
gctgactttggatatggaaagcctatttgggtgagctctgctgacaggtgttttggtaacatatttgtgtttatggacaaccaaaagggtgatgaaatagaggtttatgcttgcttaagtcctgaagatatgtccaaatttgaagttgataaagagttcctctctcttttgtctgctcatactaagtgagaatattgcattggaaaattctaggatgcatgcaactcataaagtatgagtgttgatgcttcttttatgtttttcacatcaaatagttataattttaaaagtttggaattagtagtttggagtgtcgaaaaataaaattccaactatctgttatacgcgtgtacttagtttgttttatacgcgtggaatattgattgtttgaatttatatttaattagaagtaaatatcttgaatagctatactaaatatgccaaagatatgaaaggagtacctgaattgatacaactattttctaagggtgcacactattgtatatgatcagttaattattaaaactatatttgtgtgagaattattcgtttaaactcttataaagtgtggtttgtaagaaacaataataaattatattgtaatcctaatggggccgtatgcatgtctcttcaacaatattaatggttttttcttttttggtaaatgagaaagtattattgctacttaagaaatattcttaacttctcaaaccacaatctatcttttaaactaatttttttcttttacaaattgttttttttttttaaattctatttacaattgtatggacaatatatattttgctatcccaaagaacaatatttcttgcatcccaaatacaataaattataatatttacagttgctatatatagacctccctgtggaacatggagtgtctacttctctctatccatttcaaacaagtgccaagcttcatcttcttattatgaagcccaaccgagtcaaaaaatctgtttacaaatattatgactataatcaccagtgaaaaacaagtaggggtgggtttctttctcagatcacacaacaaacaagtatcaacttgtttcataaggaaattataaatatataaaacataaatatagtgtaccaaaaaataaatgaattggtggttactgatcgtgtttatatactgatcatctgacttcgctacctagctgaa

SEQ ID NO: 197153 - DNA, 827 bp, Cannabis indica
ttttttaaaatttatttgtggtaataaatatgcacataaatttactttagattgaactaaaaaaataataatcaccacaaaaccacaattaatacatacttgaacagcaagaatgccactaatcttctcaggcaccaacttgcctagggcaaagctttgatcaaggttatacaagttgagtttttcaagttcaacatcagcataagcttcaacaaaatcaacaccgcggttgttgcaccaaatctcaatctcaccaaccgagttgtggactagttcaccagctactggaaagaatggcactaacacttgagccaagcccttcttcatattcgtaatcaaagaaggagcatcgaggtttggcgtgtttgttacaacaggcttcttaaagacgaagaaagttgctacatcggtttttgataagaatagaaggtcgaggttggacaatggtaaccattgctctggcgtagaagctattggtgccacaacctcttccttccttatcttcactaggaatggtttagctttttcatcatctcttacaccgcccatttttttttatcaactatatattgatctataaaattagtcagattaattgcttactaattaattttcagggtgtattatatgtacctaatttatatatatatatatatatatatattaatatattatataacaagcattggttaatagtcacttccgatcaataccgtacctaactttttttctttttaatatttcttattaacttaccacaataggctatggtagctgcctaactttatttagtctcgtatatatattaggagaattattttatatac

SEQ ID NO: 197154 - DNA, 736 bp, Cannabis indica
ttagagtagctattgtgagtactctaaatgcatgtatatatgtgtacataagaacaaaaaaaatctttcaaatataaatataatatatatgcatttgtacgtatgtataataaatttgagttgaagtaatgataatcttttatataatcaattaaatgcagggagggattgatgatgatcatctgaaccactactcatcatcatcatggaataataaagtagtggaaattcctactaataatcatcaatatcatcagaggaataataatattattcatgatgacataaataataataataataatgatgagagtggtaattctatgatgatgatgagaatgtacgatcgtgattggatgaggataatggatgatgatgatgatgatgttgattgttgcaacagaaagcctctcaagacacttgaactcttccccatcacctctactcctaataataataataatctcaaagaaattaagcgtacggactactcaccactactttctcacccaaaaataaaagaaaatcattcagtactcaaaatatgaatgccttttctttctttgattctctgatctctagctagctagacctatatatagctagctaggatgacattatataaggttttaaatgtgtctgtgagttgtttattttcttgggtttctgctcttattattgtttgtctttaggttgagaaagatctcaattgtctaacgagtaataggttactgtt

SEQ ID NO: 197155 - DNA, 968 bp, Cannabis indica
gatattttttctcttctatttctcttactttgtgaaatagtttaaaatactatgattcattctcttgcttatttggctttatcgatctcagattagtagtctgatttaatatcgtcttatctctaattctgaactattttcatattaatctttacttgaaattttttaccttctaacaaattgagttttagaaaatcaaaatgtcttatatataataagaacattgttattaggtaccaataatacttaacaagtagctaacatcttttataagtaaaatacgataaaaaattattatcataatttaaacagaatatttaattacatttatataacacactaacaaataccttttaccatttctcatccaataattaatctaaattcaattcaaaaagtggttgagtcaaattcttttgtagctaaaacttttggacagtctagttccccacgcaattgtatgttaacttacaaaactagctcctctcatatacaaaaaactattaatatattattaattaattaataataaaatataatttatttttatctttccttaaaataattgatcgtgatcaatttgaacaagtgaaaacactacattattcttcttcttcttaattattattaataaaaattaattatttggcctcaactttgccaaacaaagctttttgttgcttcgtgttcttaagcatatcctaaaacccattttaaatattattatcagtttaccactttgtgatcttcttttcgaaaccccaatgcacctaattaaaataaagtcaaaattaaaggcttacccatttaatttcctgttctttgggttcaatggataactgtttatgactttattaatatatattattggaaattaatcattgacgttaggcactatgtatagccttaaacagtactactaatatatatttattttttcctattcagaaaatacattggtaaaaaat

SEQ ID NO: 197156 - DNA, 1089 bp, Cannabis indica
tccttgaacgtttctgctatacagcgcttgtatggttgttgtggcttaaaaagtgttgcatttggcaacctatatttcttccagtattcctcagatggagagccacataatttaaatatcttgtgaagttgttcaaccttatcatggaaacaaatttcaaagggtttggttagtcaagctgagaagtatacttttcaacagcaaaatacagttatgcaagtaaccgaaattggatgtagaaaaatgtgtaaagtagataagaccaaactccaaatgagtaaaccacaaaatacaaggctgagtagaattgctaagactttcaacaagaagaaataaatttcctaaagcatgtacttgagagtttctgtttatcccataaagaaaagaagaaaagcaaaatcttctatcccacccttccacaaagaaaagatgaatcagaccagatgctttacttcaaactaaaaggaagtgcataaattagtctttaaacgctactcaattatacagaaatcacaaataatttactgataataattcactctaggaaaagagtgcaaaaatatagagaaatgttcaaaacaagataaaaagtaatacctctgtccgtcctggcataattggcttcccagcaagtagctcagccaagatgcagccagcactccaaaggtcaataccaactccatacattgtggccccgagaagaagttctgggggtcgataccaaagggtgactactcggctagtcatcggttgcctgtggttaggatcatagaaagtagccagcccaaaatcagcaattttcaaaatcccttcattgttaagaagcaaattggaacccttgatatcacggtgtaaaacaccattgttgtggcaatgctcgagtccagaaagcaactgcttcatatagcacttaatctgaaatatgtaaaggtctaaaccatatcaaaatataagcagaaaaccacacacaatcacgtccctttcataatcaaacattaaatgctaatcttaatggctttggcaaatccataacaatataataaaacacgacatcttaattggccagtctccttcccataattatcaagc

SEQ ID NO: 197157 - DNA, 1884 bp, Cannabis indica
atatatatacataatatctatttggtttttgctggaactggctttgtatatatgtatatatttatagaactaagttggcttctgctcgctatgtcctttagtactttttgttttaagtagtccattctcttagctaatacaagtacattcttaaaagtacagatatgataggattctgcataatgcgttcaaaacttgatgatatttagatttgcaggtgatttggggcaaacatataattccctttccactctggagcattacattcagagtggagccaaggcagtcttatttcttggggatctttcatatgctgatagatatgaccataatgatattggcttacgttgggatacatggggtcggtttgttgaacgtagcactgcatatcaaccgtggatttggaacgctggaaatcatgaaatcgaatactttcctcatttggtaaggtgttaagaagaggtatttcaagtaaaactccttattataccgtgcttagtgctcaatgtttttagtctcatttcctaagaatggcattaaggtcagtcaaaaagaattttgttgctgtaatttcatatgcacttatgttttataccgcgctttcaaatctgctgatctacctttgcttttgcattaaaaaaagtggaaagagaatcttataaaaattaggtgtaccttaaacaattcttgttctgaaatctattaaccaatgtaagcctttcctatgctataaaaaatttaagcctttcctttctatgacagttgattagcaaacagacaaactacaagattcttaaatgactttttctttatatatattcaagtgcttaacaagtatgtgtgtataaatatttgtaggaagaagttactcctttcaaaaactatctcgaacgatacactactccttataaggcgtgcaaaagtagcagccccctctggtatgcaatcagacgcgcatctgctcatataattgtcctctccagttattctccatttggtatgcaactccctgttccttttcctacctcatcgcttttcattctgattcctaattggtcaaacactcagatcaaatgtttttctcctctcatattaacagtgaagtacacacctcaatggacgtggctgagagaagaacttaaaagggttgacagggaaaagacaccgtggcttattgttctgatgcacgttccaatctataacagcaacagtgcacactttatggaaggtgaaagcatgagaagtgtgttcgagagttggtttgttgaatacaaagttgatgtcatctttgctggacatgttcatgcttacgaaagatcagtatggttttctccatcttttctaactaaacaccgaattccgtgtgctttaaattttgaccacagtaaactttcaagcacaagaaataagtggtttctttactcaaaatttatctggtgttcttattgatgaaacaagagagaactcaaagctacatgggcaaacatgtttgtacttgactcaaactttttgatattcaaaattacattgttttttatgtcaataaaaacacaacaagttgctttgaaatattagaacgtttagagaactagcaattttagaaaaggaagaaaagaaaagaaaacaaatcctcttttttatgctgctagctctttgttaatacatgaacatggttatgttgattccataataactttcttcatttggctaatattgtttccttttttctttttccattatttttcagtatagaatttcaaatattaggtacaacattacaagtggtgatgcttaccctgtacctgacaaatcagctccagtttacataacagtcggtgatggaggaaatcaagaaggtcttgctgataggtaaagccatttttc

SEQ ID NO: 197158 - DNA, 1229 bp, Cannabis indica
aaaagtgtgaaagttgcctttcaagaattagaaagcatccagtatattatgttggcaagaggcttatcgatgtacaaagtcgataccgtccaatcgaaaagttaacatagtgcttgctactagcttcaagaaaacaaaggccttacttttaagctcatcccatcacagtatacaccaaccaaccactacaaaaagtgctaaagaaacgggaagtgtctggccagttacttaaatgggcaatcaagctgggacaatacgagataacctactagccaagagtagaaataaaaggccaagccctcgctgattgtgtggctaaatgcacaaatgtatcccctaaggactctgaacaagagcaagggtagaagaaaaatccaaagaagaagcaagagcaagagcaagaaaatttggcatggaaactgcatgtagatggttcatgtatgatcaattatctgtcataggaattgccttcattacacttgggggcagcagctgcatggtgccataaagtttggcttcaaagcctcaatcaatgaagctgaatacaaatcccttcttaccagattgaaattagcaaatgaagtctaggcagaatacctagacatatacaacgactcccaactcgtggtaaatcatgttctaagtgaatacactgtcagagggggaaaatgatggcctatctgagaaagatacaagaattactatgtcagttaaaagggtacaccatcagacagatccctagagaagaaaatgcaacagcagatgcccttgctcgactagccagtaggacaatgacggacaagaccaacctagtctctgttcaatacttaccagatcaaagtatctttataccgtaagaaatggatgtgttggatgatagtccaacctggatgcaccaatagcaacataccaccagttaaaagtcctaccaaaaaacaggattgaagcaataaagataatgagaaaagttgcccgttatctaatcctagatagaaatatgtaccatcatagtttttcaatgccattcttaatgtgagtcaccaaagaagaagttgcatggatactactcaaagttcacgaaggtttttgtggaaatcatgctaagggcagagtttgttaaagaaaatactcaaacaagggtatttctagcctacaatgatcatggattcaatggactatgtcaaaaaatgtgacaagtaccaaaaattctccaagatcccaagagctcc

SEQ ID NO: 197159 - DNA, 1236 bp, Cannabis indica
accaagtcatgtgtcaacctgggtactgggtgcttcccaagtgccttctcagggctcgttttgatacttctatgaaattcgatattgcaaatgaggtctcctacctaatttttgaccattttaagaagaatacccatagtagaatttatatttgaggagggaaaacatgcgaacccgattgcacgtcaacctgggcgcaaagcctagtgccatgtcaatcagggcactagggccctattctagttccctcgaaatctcgtttgctccttgagatcacttgcatccttattatttttatgacagaaaaaatacccagagcacttttctagaaatttgattggatatagtgccaggtgtcaacctgggcatcgagcctagtgtcaggtgtcaacctaggcgctaggtctagttttttgacaccaaatgactccgtttgatttccagaaaaacttgtaccttaatctttggcgaaaacgaaaaatatatctagaagacttcttagaaaaactcagttgacaaagtgtcaatttgggcactgggtcccaaatctgaccccaaactacttcgtttgtttctcaaaggaactcaaatattaattgtccatgaaaataaagaatatgcgcagaagacttctcctgaattgctgatggaaatggcccaagttgataaaagtgtcaatttgggtgttaggcccatcacctagttcaacctaggcgttgggtccttgttttggcctccaggtcgatccgtttctcctctgaaagtacttgtttcctcattttagatgaagacgaagaaaatgcttgggatacatcttcaataagaatttttaaaaacacttaccctatagcaaatctaaaaatatgttaaaatctgtatgtcgaaacaaataacggatctattaaaaacactcagagtatataatagacttatcttaatatatatatatatataaatatatatatatttatatatggtggtggtagtggtgagccatcccttatagtagtggtggcaaacaaaaattaaaaaagattttttagtgggattaaaataaaaaaaataataacgaaattaagaacacaaaattaaaacagatcgaatctcgtaatttaatgtattggacttcatgcatattctttattattataaatttatattatttaacgtacgtactttggttaatttttttatgtacttcgatcaacataattatattattaatctaacggttgt

SEQ ID NO: 197160 - DNA, 1257 bp, Cannabis indica
ttatttgagttataaagttattagagttataatagttattttaatacttgttgatttactataagcactaattactaattgcatttgacaaaataagtcattttacatttttcttatagtttttctataattcactactttctttataaggactattgttagtattttttataaattttatctattgatgcttattttgtttatttgtggtgaaaataaaatataaatttgcaataatatttatttcctcattatttttatttttcatcctattaatgtatagtactttatgtgtagttaaaacactattgtcccttcaagcttttagagaaatgatagcgagtttttaaaacaaattatgtgacgctgatgatgacaatggattacagtctattaccaagattttacaactataattactttaactactagagttttctactcaaataattttatgatcattattagaagtttttacaagtttgttatccatatttctaggattatctctaatatgtgttactcataaattaattgtgcatgtccctcatatgaataaacaacttgtgttggctagatataaatattcttatctttgttggatatatttattctgattatcatgtttaatatttatttgatgaatataaaatgtatagtatttataattacacatatattatatttttaatgaatttgtttattgttttcaaaaaaatgatacaaatataatagaaaatgtacaagatgttattatgaaaacaacaattcatattttttgaaaaaaaaaaaaaaaggcatttttgtgagaaaaaaaaacaaaaaaccaaatccctaaaaatacttattaaaaaaactgtacattcatattttataatgaggaaattacactctataccctttttatattgtcctcttttatttttaccttcttttttaaaatctatcatttttacctctttttttaaacattgtaccaattttgcccctgtcacttcaagatactctccatgtgattctcttatgtaagggtattttgggtacaatacatataaaaagaggtatgtttcaaataaatataaaattagaggtaaatttgattaattgatgaataaaagaggcatttttcaacttaccccttttataatgggaaattttatttacaccccaaaaatttctaagtacaccccattttaataatttttattttatataaattttatatctttaatggtactagtatttttaacttttttc

SEQ ID NO: 197161 - DNA, 1136 bp, Cannabis indica
accctaactctcatataccattcttatttaagtgtgttgtgcatcagtcacaattttattagcctatcatttaaatgttttgtcggtttaattaacttgcatataacaatgaagttttttaggttgcataatgagatttgatgtttagtctggataagttggttgtcggagatatttgcatgtgttttgaactatcatatattcctgactgtcatactgttcatttttcctgatttgatctattaaatgctgatcaaattaaaaattggatcacattgtatgcttctttttctatacctttcattttctttattggctgctacaaaactcagggaacttctagaccagcacactaccatgtccttgttgatgagatcgatttctctcctgatgacttacaaaaccttatccactccttatcttatgtgtaagcttttattcggtttttttttttaaaaaaaaaaaataaaagaaaacatttgtctatattaccttttaacattacgcttactgaacttgtttcaggtaccaaagaagcacaactgcaatatcaataggtaggttgtttgggaatttttttttcctcctaatacatgcgcaatacatatatttttaaatatcttacatacactgctcaaacgttcattttcattttccagttgctccaatatgttatgcccatcttgctgcatatcagatgggccagttcatcaagttggacgatttctccgatacttcttcaggacagagatcagttagttcttcgggtagtattcctgttccagatctccctaagttgcatgacaatgttaagacctctatgtttttttgttgaggtgctgtggactggatagcttttggctgacatagtttgaatttcttttttacactgaagaaaaggtctttgacaacgtacatacatagattaacaaaaggacagatggattttagccttttaggtgggtaatgtagtgacatagaaaatactggaaaagaatagtttagttcagttatggaatctttgtgatgcacagtacttttaggtcaacaatagttaacttcattgtttaggaattgagttatctggaaaaccaattgctcgggaaaagctgtaaccatttatatatatatatata

SEQ ID NO: 197162 - DNA, 1790 bp, Cannabis indica
ttagaaatggaatatggatagtcatttgatcaaacgtatcaagtttctctacttaattaaacacatcagttttataaaagcttataacaattgttaatttgtaatttcctctggggcttcactctctggcctaacagcttcatttatatcattacagttggacattctatctttatgggttcactgtataacagccaacaagattgaatattttatttgtaactagaaagcatattaaaatattttaatccaattactttattagttaaaactaactagtgaaaatttaattttataaatcaatttagtctgtcattgtgatttttaaactttgaatgatgaaaacaattttttttggaccttataaaatacagtactttgataatttaattaggacttttcaatttttctgaataaaatataataaatagtattcaaaaaatggcctttttaaataaataatgataaaagtttaaaaatagtatttttgaaaaataaataagagcttttttttttctaaaaaagtttttgaaacagaaaacattgtcaatcttatcaaaagagattaaattattattaaattttatataagggtccaattaataatttttaagagtcgaaaatgatatttattaaataaaaactaaacaaatttgtattccacactgattaatttaaaatgaataaaaaaaaccacttcaacaatgaattactcagtagaaaatcataaactattacagggaaattaataatattaattaattaattcaatcaaacaagattgtataaagcattaatcccttgaatatcatcaccatgcaaacctttggtgattccagcaccaatctcaggatacataatggccccttccaccgagctatgctgaagcccaaggatatgcccaatttcatgcaaagcaacagtctcaacgtcataagcctcagcaacaggcccaatagcccaactctcctcagcatcgaaatggactcttccatcgggtggtgagaaagcgtgtgcaagggtcccaccagccccatcaaatgggtccccatcaccatggttccttctctcaaaactcaccgttatatccgccttttcattgttttgggcctcaaagaatctgaactgagtgttggaggcccaagtattaaaagcccggcccactgcggacacggcttcggttggagtcccggagaggaacgtgtaggtgaggttgaactttgtggctggccactttggctctccttggaagaatgagtagtgagacactatgtgatgatgacgtggcgtctttttattggctgagcgcattcttgttttatttttggcaaaaatatctgggactccacaacgaggcttcatcattttgaataaggtttttgggtctaagattcctgtgggtttgaggttgtaattgatttggtatgttttaatagctttttctaagccatagtcgaaatcatcatcatcaatatgattaatattattgttgttgttattatgaagaagagtagtagaagtagttgaatgtttagtgaagtaaccaaagtgtttgaggtagtttttgagatcacgaatgccttggacattgtcacctttcttacaaccttggagatttttgagaaaatcaaaaggtgatgatgatgatgatttgatgatgatcatattattaatcatgatcatcatcatgatgagaaaagctagtaaggatttagaagaagccatatatttgatatgattatatattaatatagtaatatacgtacgtataatatatatgaaaactatat

SEQ ID NO: 197163 - DNA, 546 bp, Cannabis indica
gaggacttgcatccatcttcaccgcacttcaagcaagggacttcacttagagtaactggaaagtaagagttctgattctttttagacttgattctctttcctgtggtgtgctagattttcacgttgaattttctgcttttagtgttgaagtttaacaaataatgttgaatttcccctaaaatttgtggcttagcctgagtggatagtgttcaggaactttattctttgctcatgctctttcctgttaaatctatcagagtatgggggctagagtagggaactaatgtttctccattgaggtgtttgatgagattctacaagaaatggaggtggatgggatgcttaaaaaataatgtgggtaaactagaattgacaatttccagtaatgttgatggcatttttatgagtaggatgaagtagtttttttttttttttttttactttttaaacagtggtgtttttgtatagatataaagttgtgaaggtggaggcaaatgacattgaagatggcgaggtaatgaaattggatattaggaggagaattga

SEQ ID NO: 197164 - DNA, 841 bp, Cannabis indica
tccttttaaaatttaaaattaaatctatgcaattttacaaatttgatgtgtatgaaagttgtgttagattaatgagattgtgagattagaaaattaattttattctccatatttagatgagttttgcagtttaataaatatgaatcaattctatcacaaatataaaataaacataaatatttaagtttaatttttacggtaatgatacttaagctatatttttaaaattttaattagaatctgaccattaaatgttaagtaaataatcacgtagcagtttttgattagtctaagtgattagtatttaattttttatttaaaatatatactaataaaaaatgacacgttgataataacatgacacttaacggtcaagtaactaatcaaaacttaaacaaatatttatatgtaactgaaagaaaaacttaagtatttgaatcacatattactataaaatattttatgctaaaatggatctaaagatgtttttgacttcatattatttatagccttatattatggtcattttacaaaataaataataataataataatagaaaaagtgaatagattagatctgaatctattttttgtagtgtatgattgaagttacttttttcagagtagggtcattttcataataaggttaaataaatagtgtttatgtactattgagaaattttagtgtgtgaatatttattggtatttagataataattatattatttttttaatattatattatacatcttaaatatttaccttatcatgcaaatttttaaagaactttaaacattttaaatcatcaaaaaagaatatttgaatcatatattttatttta

SEQ ID NO: 197165 - DNA, 1469 bp, Cannabis indica
atagctaagcttgttgcttgtggaggtcgccatactctggccattgtccaatggcagattcatgatgaatcaaaccagtgatcaaatcaaatcaaacccttttctttagtggagaatttgttcaatttaactactaataaccgcagtaaatgttggtcaaatgggttttagaagaatatactataactctagtgaacacttcagtatggaaaagaggatgcaatcataataatattcttgggactatttttaagcatgcaaaacttgtacagttggtttgttcctctgccatatactcgtactaagcaaaatgtatatgtatgcgatataacagtatatagttttcttctaacaacatatataaaaacatacaacgaaaaaacatcaaatatcagcttgatgtggcaggtttctgggggtcattgcgataccctggacctataagtactactgtacaccccaccgtggagaagcaccacataaagtatctgactcagcagtgatatcactatgaaagcctaccaatgtttgctgcaaagaagaagaagaagaattaagaaccaagatccttttttccactcagaatttggttcaaaaaatactgttacatctttaccaagcgttttcctctgcgtcctcctagtatcatttccttacacacaagtctgcaacaagagaatttatttggctgtaacttctcatgaactaatgtatgcatgtaatgtatgtatgtatatatatacgagtacccaaaagcaagagctgttagagcccaagcgatgagagctaaggaagaagcagcagccaaactgtcactacgccaagtacgcagatggatgagccctgaaatgagagagcaagcacccactaccccacctaccagagcaaacaccaacatgaatctagttgatggattcccacctaaatctgccattatcaacacaagatataaaataaaacacccgtttctcaaatataaccaaatatattatacacataaatttagagagagaagagagtgagcgtacggggatggttttcctctccatcgatgtatttgtcaagagaccatccagcgagtccaagcacaattagatgaactaccaagttagcaacaataagaggacctaataagtctctaacacctctcccactcgtagtcataataaccaattacaacccacaataagctcaacccaacatagaatgagcagcacaaataaatggatctatgtatatataggctatatatggatagtttctgaggttggttgatgctctcaaaaagagttattcaaagaaaaagaaagaagtagaagaaaagcttttgctttagtttttgattacgtggagtcttgttggaaactcgactaaataggtgtggcatatctttcgcgtcccctgaaagattatttcaagtcactttttaagtgaacaaaataggccaaaaacatgagaattttaataca

SEQ ID NO: 197166 - DNA, 913 bp, Cannabis indica
gtatttttgtaaaaaccttttattattatcatataaaaattttattattaaaactaacgtgaaaaggagtgcacccctaatatatattatctttatttttttaataatgttattctgtattttttatgttttataaaaattatttattagactctctgtcttgttgaatatcaattctaatcttatgtttttaaaatagtacaaattaaaattaactctacgcttactttttatcaaattcaaatttaataataccctaactttgaggtgttatagccaaactagttatcttgttttgtctctgtttgtactaaaaacttaattcaggttgattatatttaaaaagaaaataaggctgggtcatttttatatttcaaattattatttttttttttgtatttttaagaaactttacataacaacccacatagtaaccaacaaagtaatctaaatcgtaattgaaatctatatagtaacctacatagcaattatcgaaacaatttaaattgtaaaataaaaagaaaaaattaaaaaatagtagatatagtgattttccaaaaaataattaacaaaaattaatttaagtgcgtattttgttctattttaaaaactataaagtctaaattgttatttatgaaaataaagagtctaaataataattttttaaaaaaaaaattaaaaaatgatattttaaaactctaaagtaatatagattatcgttatcgtgcataacaattccaaatcaattcttgtggtccttggtcggtgttacgtggcacgacataatttgtcaactttttcaaatgtcattctggaccacaattacctctcaccgttctttttggagtacacggtgcatggtcaaaagcttatgtatgcacctcacataaaataacatattaaacaacaaaaa

SEQ ID NO: 197167 - DNA, 1091 bp, Cannabis indica
aaaaactttgaaaaaaaatacagggtacattttactatttaacaaaacagatgatctaattaataatttttgcaaaatacagaatttaaaataatatttacccaaaaattatatatttttaaatcatttactatcatttttataaaaactttttcaaacactgtagctatcataaagcttaaaagctgtgccaaaggtcctcctgagcctgagccgttaacaaattaccatataaaactaagccgataagataacaggagctgagtcgtgtgtcattttttatcagaagccgagccgataatgctaacgtcatcagccagctcagcaccaccactcacccgtcagattctttattctctaattcccctctgtctttttctgatacgagcactcctcctgcgaccacaaccacaatttcacacctcagccactcctttctccacgtacaacaaaccacagaagaaaattaatttaatcacacaaattactacgaaaacaccaaattacccctacaacgccgtagaccaaccgttaatggcaagggtataatcgactattcaccaaaaccgtcgctttccacaaaaagcttgcattgtccaagtcgagaggcccgctgcgagttaatgacagttgttggtacacactgtgccccagtccccactaaggcagaggctattttggtaatatcgaaacactttttcttattaaaatatcaaagaggcgccctaatcaaaatctggtgctatttattatggcttgatacctaataagtatttttccatttttctttcttccatttttgtttggaatctttttttttttttttttgaagaatttcgagctgaggagaaggaggaggatgtctactgggctttcttctcggatccgaaggctttctaggaattttatgtaaagattttcctggtacttcttctgtttgttcttttcttctttttacttctcagttttttttcttaaaaaattaatttttgcctgaaactttgtagtgtttggtctttagctatggatagttgtcctactttattgagatgatgactgaattttaggtatatatgtattttattttattt

SEQ ID NO: 197168 - DNA, 769 bp, Cannabis indica
accggacagaggacagaagggatcaatataaatctgcttatattgtctctagttaacagctgatcattaacaatttgccatccaatgaatttatgttttggcaaaatcatcctattgcgtatgttttttgcatagccaacattgtgagattgaatgaacgaaaaatataagagtttggctttaaatttacctcttttcacagcttccttgacttcatcttcacccacgcctgatcggagctgaagaagtttcttgaaataccagcttgcgcctttttcaaaattagctacccaaaaactctgacccttcaagtaaatggcatcaatccaccgaacccataggttgtcttgtttactcgagatagccgaaatatacttggccataatagaaacattccatttcttaccctcccgaaatccaatacctccaaatttctcagggaggcaaactttctcccatgaggggatgtgcattttgcttccattaccattaaagcccaagagaaagtctctgcaacatttatcgattgtcgttgtgactttttgaggaagcaagaacagactcatccaatagtttctaactcccaaaagaactgaatgaatcaattgagccctacctgcaaatgacaagttcctgctagcctagttatgcaagtgttatggatttatcaatcataattccaaaatttgaagaacgccattttgttggtctaagataaactccaaggtatttgaggggtaaaacgcttccctcatccatctgcaggaca

SEQ ID NO: 197169 - DNA, 678 bp, Cannabis indica
aaatcttatctttggtttcttgaaaatggaggtgaaatctcaaatacagattccgagagtaaacctcggcagtcaaggattggaggtaggcttctttttcttctttcttctccaacccatatttgtattagaaaaccatgagcaaacccacataactttaactcttaaattaagggtagcactaaatctgctccagataactatatatgtagcataatcaattgtacaagtacatgtatgaaaatgaatacaatttgtgaatttgactgacgtttatcaaagtactgatataaagtactgaatatgatacctggcccttcattcatttagatgaaaacttgtacttttcttgtatatattaacttggcaaaaaggctgaagttttatattggactcagaacagtgatttaagtaaggttatagggaaaagtattacataaatagatttgattgttacaaaacaaacaattgtcatcgattcagtcttttatttttatgggtattttttttatataggtgtcagtattgggttttgggtgtggaggactgtctggaatgttaaacgctcctctgcctcatgaagccggatgtaacattataaaggaagcttacaatagagggataaccttctttgatacggctgatatttacggtgataaacatcacaacgagatcatg

SEQ ID NO: 197170 - DNA, 1915 bp, Cannabis indica
tataaaaaaataaataaagcatatgtcatcggtaaaattcccataactttttaccctattccatcacatatagacaacaaaagaaatacatgtgaatatgtaccccacttaacagatgatattttaattagatttttcaatattcaaatgtaatataatacaaatggaccaaccacatcgaaatttcccattaaataaattcaaagaaaacccactaccaactacccacaacctaaaaagttaaatccctacaataattgtttacatgtttatgaggaccatcttcttctttagacaaagtaacaaacgagcaaatgccaaataacttttttttctttttcacaagatgaaactcaaacatctttgaaaccacaaaaccgttcaaacaaagtaacaaatccttaccgtaatcagctggaccatcatcttctccacgtgccttcgacattctaatggagtcttcgaccctctgttgcgttcccttcttcttacggatttgcacaatagggtttttttttcctattgggacctaattaagggtttattttttttaacgattaatttttcatttattttctttttattatttaatattaattgatacatagataatttaatttaacatgtggcaattttttactgagttggatatagcacttagacacataacgagattaaactaagtcaactgtaacattgcaaacagaataggacttgaaggggtatttccaccaaaaaaaaaacaaaagggaaattaactgtatacaaaacgagacataaaggggcttcaccgccaattacccaattttttttacttaattggggtcaaatgcccattttgctcttagggccaaaaattaacatactttacatacaagggcataaaaatcaactccaatcacacacataattcttaaatcatcatatatatcgcacattaatgacatatcacattattcataattttggaccccaaattcaattcaagccaaaatacccatttgtgactgtcgcggtaacttatcaaaaatcacatgcaataagaaaatataaacatactatataataatatggtctattagcacaattaatattaaaattatgattttatcctttataagtcaaaattataaaaatacccctaattcataaatggggtcttaaatacaataattcttaaataatttcatataactaattatataataatataattactcaattatagttaatttattttaattagggatgctaatctatttactaatcccatgatattacacgattgacgttgctcaagctcctagccgaagctcatggttattcaagtcctcccgtccgaactgtctacatcgttcaagccctctcatcgaaagctcctggttgttcatcaatttctggctatggtggttatggaggtaagtaaaaggaagagacgaagggggatagaaaagaaagggtcagggtggaaatggtgctgactttggggtgggagttcctggtggtgggtttttggggtcggagttccttgtggtgggcagcgagaagtagaagaagaagaagaaagaaaataagaaaaagaaataaaaataaaataaaataattaattttttatttatttaaattaaaaatatgatttgaccaataagttgtcaacaacacgtggcatctttaattagtaaatggatctgttagaaaagaggattaacagacttactgaaacgtgaccttaaggactatttccgccaatttttgaatttggagactaatttttaccaaccttaagttcttgagaacttttgccgcaattattgctcaaataaataattgatggaagagatagtagaattttttaggaaaatttacctaaattacttaaaatcttatttttttttacaattttacaaatttttta

SEQ ID NO: 197171 - DNA, 663 bp, Cannabis indica
tgtccataaattaatatggtattattaaaaattcacaattacaattttactttcagcccaatcaactatgagcccaacaaaccaagtcttaccaattgaatatggtttaagtaaaaaaaaaaagtaacaataaaaaatttgatgattaaagaattaaatacatataacttgtaaagtagatatgctctttttaggatttgatcccatgatctccttaagtatgacatgtaacttaaccattaggtcaaaacttgtataatatttaaaaatatcacttttgtttgaaatatatatatattgactaactaaaatacatatacaattctactcaaaaataaaaaaaaaatacatatatagtttttctcgattttctttttcagggcgactgtcctacctcgcctcaatgtgggtccgcccctactaacagtcgcacaaaaaattctagagtttcaaaaatgtttcaagcttcttctttttctggcaggattaagtgttctaaagggttcttttaatcttcttcttttcctcttcttctactaaacacgggtaggttaggatttctatagttttgttatttctcttttcttcatagccacgggttcagggttctatgggttatggttcttagattctatggttctactcttctctaaacctagaaaa

SEQ ID NO: 197172 - DNA, 2476 bp, Cannabis indica
gaggttaagtgagtttaatcccatcataaactaattttataattaaaattttaaaaatatttaattaaattaattttatacgtacaattaaaaatctcaaaatataaaaatttgatctttaatcaagaattgtcttataagctcaatgaaattgactcgataccaaccctaaattagcgatcaattgtaaaagaattttattatggaatatttttttaaaaaaaactatgtattttacttgtatgcgctcatgcatcacatttacaataattccaaaatgatatttattattcatgcataatcattatgttactttatttatttcagtcatgtatactatgccaaatatcatccgtactttactagcactttaaaaaattaaatggtgataatttataaatagaaatcaaatctaaataaatgttggtttgtgagaatcacaaatttgtcctagctgaggagtgtcttgaggagcccgatgccagtggcttaaaaaaatatttgggacagatatgatgcttggattcaatccaataacaaggccaaaagtttcacgcttgtaagcatggacgatgttctacgtaagatgcatcaaaaaaggagaatgcatctcaaataatgaattctctacaggtcatgtttgggcaacaatctaatcaaacaagacatgttgctattcgtaactacatgaattgtaagatgaaaaaaggtgtccctgtttgatcttatgtattgcacaagattaagctaatgcatgaggcggagacacatgggactatcatttacgagaggactcaagtgactatgatccttgagtgactatctccttgcttcaaggttttcaccacactatgtgatgaacaagctagagttcaacatgactcaattgttgaacgagttaaccgtgtttgagaaccttaacaaggataagtcctagaaaggggaatcgaacatcgttgaagaaaaatccagctctctttcttcttctgataagaaaagaaagtggaacagtaaggacaacagcggtggcatgctcaaaggcaagaagtcacccaaggccaagatgaacaaagcaagccccgagtccaaggacaagaaggctaaagaaaagtatttttattgtggcataatgggacattggaagagaaattgaaacaagtatctttctgagcttaagaaagataaatattttttatttattcttgaagctaacttagtggaggatgataaatccttatggattgttgattttggagcaactaatcatatttgttcttctatgaagatacttgaatcgtcaagggagttggccgatggggaggtgactatgcgtgggggtaatggagcacaagtgtctaccaagggtgttggcaaagtctatttgaaataaaataatatttttttgttattgaacaatatttattctattcttaaatctaccaagaatattatttctttatctcttttgcatgaaaaatttttcaatactaattttattaataatgatattattatttccaagaatggtacgcctattttctgtaaaatagagtaatggactttatgtctattatcctaaattttgtccacatgacgtggcatgtccatgtaagctaaaagacagagtaaatgtggaatacaacccttccagtagcaaaacaaggtctccatgcaagatatagcaaaatcttcaagcaacaaatgaatggagtgaagcgagccctcaaggagctgtaccaacatccatggcaagccaagagaagcctacaagctggccaaggtgaacctaggccggccaatatttatgcacaagctggccgaccatgaagtgacttttggacccacgaccagctaactaatttggcacccttcactcaagtaatgtatggcctttttggccaaggcattgcactcatgagtaaatcaggttacccctcactattggaaaaaattcaactaccagaactctgatggcgcagtttgtcgtaatcgatgttccctcagctttccatgccgtgataggtcaaccagccttgtatgacctaaaggcagtgacatccatctaccacctttgcctaaaattctaaacaaggcatggagtaggatgtttcaggggagaccaatagtttgcccgtcattattacaacttggccttgtcaaagccaagaaagaaaagatgtctgccaaaagctctgaagaagagcccaacaaagggtaatgaagtccagtgcaaagcggggatgcagacatagatcctcgctttagggatcctacagatagctttggacctgtagaagagctagaggaaatggaggttgatcgcagttttccagctagaagactaaagatcgagaagggtttagcgccaaaaataaaatttgtacggataaaatttctaagggaaaatatggaccttttttgcatggtcacgtggagacatggaagagacccctctgagtgttgggctttgtgccct

SEQ ID NO: 197173 - DNA, 1154 bp, Cannabis indica
tttgctgtttatattctattaatcgcattgttattttaagtattcatcaacgtgagtactattcgcagttttgtacataagtatttttgattagtttgaatactcatattttttttagtgttatctaaattgcttcacaacatttatgcgtatcaatatttctagagaagtgccaaagaaactcactaaacaatgatctcttttgtactcttttaatttaatctatcataagaacgtgcaaaatagagtttgctacgtattaaatcattgtttttgattttatgaaaatagaaagaaatgaaatctgtttgaggagagttgttgagagtgtgaacttcccacacgacaagaaacgagtggtgagttggtttgacgagacgcacataactgatatataatgctaaatttgacaaactttgactgttttgcatcgttcaaagtcaaataaaggcctttagtttagtcatataccaagaagaacatggaactagattaggattgttaatttaatttttggtatgtttaatattacaaatatattttgatttgtagaggtaagtgtgtccgactttatctctgttttcaagtcttgtaattgtattgagtattcaatcaagtttacaggagaagaacaaaaagtataaagcctttagaaggttcttcaagctttcgggagaagatggttcaagtcttgcttgagaggaaacaagcattttttctagcagaagcgcttcctaatgttcttggctctcgcgagtggtgaccctcgactgtagtgtggtgcttaggagttttgtgatgtttgacaatagtctggtgcttggttcattattggtgtgccccttgtgcttagtcttaattgtttaagttagtttagttttatgatattttacattagtttttttattgggtgcattaatgtttcattgattggatcaaattgttttagtgggagtgaaattttcctctttcttggccaaatctatcttttggtcttgtgtttcatggggttaagttcttttggacgccttgccatagttggttgaattattttccttatttcgtgcgtgaataatgaggttatcgtgtcacaaattttgttagaagatcaataatagtcattgatagattgattttgccatatgtttatgtgg

SEQ ID NO: 197174 - DNA, 711 bp, Cannabis indica
atttttctttttgagaatatggacatttgtgcataactttcgagcaggggacattcttcttacttaacaagttagcatcaaccgtacatatctataataaatatacatatatatatatgtaagtatatatgtatatttatattattcaaggtagctgccatataaattatgaaacaaaaaagatagatttattcacgaaacagaacatgctatatagtagaacaaagattataattagaatttagaacccaactaactatttaattataacaaaagcaaatcaacaatactttgtatatataataaataatatatatatataagtatataagaacatacccagaaactggttttgatgaaacaaataagttgactaagtgcccagaaagcttttgaggatctcctcaaaaagattgggataggttataaaggaaagtgagaaataaagcttaagaacagatcttaacttagaaaacttagaaggaagaatcgttataaatagagaagcaagctgagcaacttagctgaattatcaattaggcctcttaattaattaatatattttaattatttgccttattgatattattattatgatttggtgggaatattcatcaaataagtactaatcaaattaataaactaatattaacttgcatataggaacctagctaggagatccatacaaaatatataaatataattttattt

SEQ ID NO: 197175 - DNA, 1209 bp, Cannabis indica
taagtctccagttcacgtctctcatatccccgtcttcttcttatcctagaaaaactaaaccattctttctctcttttggaaatgcactctcgagctcagctcgtccgcacacgagcgagcatgtttcagcttcaaagacccccacaagctcttctatttcagaggccgccaagttcctccgtacctttatgtttgtaccacctggagttgatccagaggaggtgacggaggacatggtcctagcaggttctaatattgtaattggaccttatgccggcgattcaaagattaaggaggtagagttcgtcaaaagcagtggtaaagccaaggattgccctaaagataacagacctgaatttgcaattctgggtcgatccaatgttggaaagtcctcacttataaatgcccttgttcgcaaaaaagaagttgctcttacttctaaaaagccaggttttcattcccactttttatatattttattttttcaatgaaggtatatgtttaatgttaacagataatgaaaaatgagtttgacattgtgcagggaaaactcagcttatcaatcattttttggtgaacaaaagctggtacattgtggatttacctggttatgggtaatgccaagtctcattctttttaaattgttaagttgtgtttaatgcttatggtttgttatgtctttccttaagtttaaagcttggagtgagataattttatcgttggaccatttttttttactgactgcttctgtcagtatttgttaatagagaaaagagcacgttcactaaagattaagttactagttaaatttctagttgatttcatatttctcagctgagatagatgcaacaaatttcatgtggaaaaattgaatggtgcaatttattttagtctgtaactggttaaaattggggtggggaagggaagtgggtgaaggatagacttagtctctgatagacaaagaagaggatgagaaagccactgaggctatctcagtagttggagggggaaagaataaagtgaaggttggaggtttgaactctcgacttctttgttaatgttcgtctagtgtattaaaacaacatgagaacgagataatgtaaaaagcacctagtgtgctgtaggttacttgaaatattccacagatatataacattgttgatcttatgtttatggcttgttagtttgtgacaaatctacatacggaat

SEQ ID NO: 197176 - DNA, 1888 bp, Cannabis indica
cgagttctgactttatcacgaagatagccaagcaccgtggttttgtttctactaatagtactcgggagtcccaagtagaagcttccatcttcagcaatagacatatcaagcatcgaacaaatctgattacggactgccaactcagtattactgctgaaaaagattgatgattttgcaaaattcaccctctgtcctgaagccatctcaaactttctcagcaactcttgaatacgcattgcttcctgggttgtagctttacaataaaggtagctatcgtctgcaaaaagcatgtgagacactcgaggcgcaccattagctactttacaaccatgtatcaacccattacgctcatatttctgaagcaaagccgaaagaccctcagcacaaattataaacaaatatggcgaaaggggatcaccttgtctaatgcctctggttggaatgataggacctacttcatggctgccatgaatgatgttatactttgccgaagtgacacaagccataatcaagcgaatccaatgctccaaaaaacccatcctccgtaacattgattccaagaaagcccattcaattctatcataggctttactcatatccagtttaagcgccatgaaacccaatttaccttgccttttccttctcaagtaatggagaatctcgaaggaaaccatcacattgtctgagatcaagcgacccggaataaaggcactctgagaatctgaaattattgtatccatgaaaggcttcattctgtttgtcatgaccttagtaaccactttatataagacattgcacagagcaataggccgcaggtcttgcataacttgaggagactttttcttcgggattaagaccacatttgcatcaccacaaccatttacgaaagacccagaagtgaagaattgttgcactagatcaataacatcggtttgacaatatgccaacatttttgatagaaagccggggtcataccatcaggacctgggcttttatcggggtgcatctgaaagaccgctgtcttcacctcttcctctgaaacaggccttgaaaattccaaattagcagcctcggggacaactctcgaaacactatctatcacttcattacaattgctattagaggcagtgaacaaggttgaaaaataatcgtctattaaaccagataaaccattctcccaatccacccaattattctgagaatcttgcaatttgataatctgattatggcgttttcgcttagtagcagataagtgaaaaaacttactatttttatctccacctttgagccaaaaatgtttagctctctgcttccaaaaagcctctctctgttcaaggacctcaaataattcttttttagcttcatcataaagttgtaaggatgccgagtcacggttgcctttgagtaaacgtaattgatctttgcaaagctttattcggcctttgaaattcccagtaatttcctttccccactggtccaacatagaagcacacaactccagtttattcatgataccaccgcttgtagtttcctcccaacaactttgtacaatctggtagcacataggttcccttagccaagcattttcgaagcggaaacgatggaaagctgagaatctaggctgtgccacaggttctagaaaaatagggcagtggtccgatgaagatgtaccgagattaacaagcttagaagctagaaaaatagctgcccacctactgttgtatagtactctgtccaaccgaacttccacccaaagatcagtacctctgcttctttcccaggtgaacgggtagccaagcatctccatgtcctctaaaccacaatcggcaaggcaattgttgaagccttctaccaaccgtctcggataggcatgaccgcccctttgatc

SEQ ID NO: 197177 - DNA, 2173 bp, Cannabis indica
tgactgttttggctcatctttaaggaccggcaacacttggctcaaaacatctctctttcgctcaataatctaagcggctattttagttgtctttttggactagttattggatttaaatcgactactcattagatttttatttggctctaatactatgttagaatttaaaatgaatgcaagtatggtaaaacgcatggaattccatttcaaaactaattagctatgataaaagtaactcatacattattatgttcccacacactatcaatgtgagactacgtaaaagaataataagaaaaggaggtttaaatagccccatcgtaaaaaataataataaaaaaataaaaccggggaataaagaagaagtcggctttagctaaaagcagttaatggatcacattctatcatgtagttctagtctaaggtacagtttataattgattagataatactacagtctacttcgtcactagatgatgtctattatcaagggcaaaatgatcccaacatacatatacattttcttctactgagaaatgcaaacctataaattaacaacagtaagttcttactttaaagcaggtaattgagccaattgttgcagttgatgaacaacatgagacattcttgggcgcattgatggcacattctgagtacacgcataaacaagatctactaccttttgaatgacaccagcctcaggaatatcagaagaagatgctgttatgtgcggatccaagagctccgggtagcgatgagcctgcaccaaaggtgtagcccactcaaagatactttgcaaacctactgaatcaactgcctgtgcaggcctacggccgcttactatttctagtagcagcacaccgaagctgtacacatcgctcttagttgtaagctcatttctgtagacaaactcaggagcaaggtatccatgtgtaccgcctgccatcactgttctttcatgcattacttcgtaaggaacaaattttgacagaccaactcccataagatgtgctccaaactcttcgtcaagtagaacattactggcacagatatcacgatgcacaacatgtggtttgaccttgtcatgcaggaacctgtcttcagaaaatttcaaggaagtcaattaaggcaaaaagtacaacacaaagataggctaatgatgtacagccaaagaacttctaaaaaagaaagacggccctacccacaaaagaaaaaaagaaagacaaaatagactcatcctacaagctttcatttggttaaagccttgagatttttccttttttgtaagggttaaagccttcagattttataatgaagtaatgatacaaaaatgcaatagctatttgctcttaaaaaaagttaaggaacgctttaacccttaagtacaaataagtaagccttgttattttagactgttaagtatcaaagagcgctaatcagcaaacagattcatacctatcacagtgctaaagtgctaaatattaacaaaaaaatgcacttcacttgcattaaaaagatagaataacttatctttctcaaaaaaaaaaaaaaaagatagaagaacttaaaaacatacgaggattagatatcaagcccataagtttattctacagagagatttggggttccatttcttaagggtacacgcctatgaatttgtcagctttttgatggcaactagagtggtcgtgggagggtaaagtgattaagtaacacaggaattgagaaggaatgagagggatcatgagaaatgtattgtaattaagcatttgtccttgggagagttgaggtctcttggatacctcactcttctagtttcttcttatcatttcctttattcaatatcacatactagatcggccacttattgcgttagaaagcgtcctaatttaaaaaaaggcacattaaacaaaagcttataagttggatcttgtttatttggagacatttatttttttttcactgacagtttatgctttcttcattcaaaaggagaatatacaagaaaagggatagatacgtacgtcaattccttgagcaagtgttgtggcaatttttcattctcatggcccaatctaaactccgaccacctctggtatgtggtgcagccatttgtccaacggcccattaactataaactcgtaaacaatgtagcggtcaccatgattgtagc

SEQ ID NO: 197178 - DNA, 1065 bp, Cannabis indica
gtaagagcctgcctagagtttttttcctattcgtggtggagtgattccagcagcagctggatcagataaccacgaagcttctcgtaacctaaaccttgagtgtctttgagtgctatgatgttggccaaccaaaggaacaaccgtgacagaaattgctctatggtcagacttgaaatagtcaaggtgatgagttgtaataggttcaaaattgcttttccattgatcatttacaaagcaccaatcaagtctttcctttgtagcattaacattgtgacgtcccttgatccaagtgtatggatccccttcaaatggctgctcataaaggtaacaaatatccaacacatttcggaagttatccatttttgcttcacttcgtaaggctccaccaagcttgttttggttagatagaatttcattaaagtcaccaatcactaaccaaggcattaaaggtgcaacatccttacatctttcaagtagtttccaagtgtggattctattttgaatttcaggtgcgccatagaaagcggagaagtgccaagatggcccattatcacacttcacgtaacaatcaaagagatttgcattaaaattaagaagtgttacatcaacattgtctttccataataagagaagacccccacttaaacctaccctagggacttcaagtccattattgaaatttaaagattgacgaaaacgagcaactgcattacaagctaatttagtttccataataaataaaacatgaggagttttctctttgacaagcaaacgaagttgtcagaatgtgctaggattccccaatccacgagcattccagctaactattttcatggcaggttgcggggctgaaggacagccaccgcacgttggtcaatagtaccagttggatcaactataatttcagaaacattttggttcatctcatcatcagttgacaactctaaagttgagagggtaggtttgggtcccctacatcgctttagtgccttttgcaatgacattttttcaggaagtctcttgcccatccgatttggggagttgttttctttatcacaatcagca

SEQ ID NO: 197179 - DNA, 1761 bp, Cannabis indica
aaatggtatttctaacaaaaatcgtaatttgttgtgcgactaaatgtgattttaatcgtaatatttattataactaaaattaaattagtgataatttatatttaatactatgttttaaattcaaataatttttgttctgactaaaattcatatttaattttaagaaatttatgttgtaaccaaaaaatcatttagacttcttttgtagtgatattttagtgttacccttttcccaaatttgttaaccttatctatactatgtttacagataattaatttataaatatttttcctttagaagaagaggttgaggatcgaactagtgttgtgtgttacgaaattaggggattgataaatattgaaagaagacgaaaagaatatataggtttggtgtgaagtcattttcaatcaaaatgatataatttttggtatcttattactgctgttaataatatatataaatatttatatacatagtttgagttgataagatgggatatgtacttaatcaagacatgaaagacccacacgcaaataaatttaatttctatgcttacgcaagacatgaattgaaagtgaaacaaatatttttctcttaatttgatctgttgtgaatgatttgcttggcatcttattaatttaattattattatgatcatgtcattcggtccattaattataattatgtctattagacacaaatgatcagatcatcaagtcatagcttgaaattaattaataaacttaatcttcacaattaatgttaaagtttaaccgaaatgctatgtttaatcgtagcaaattgatcttatataaataataacttgtaattgttcctaattactctgaataagtggtctacgaattgagttgtgcactttgtcgtcaaaaattctcttttgctagctgatcatatgtttttgaggacttttgtttcgcctgactcattattcattttaatgagcaatctaattaatgaagttgcgaatttggttttaaaaaaattataattaagatttttactgttgctccttgacatgtattaaatcatgttttttgaattttgaagattgttaaaaaattactttaattaagattattaaaatttaaaggatataatttagtgttacgttaaaattcaaaaaaacaaaaattttaattatatgtgtcctatagacacgtgatttattggctaaactaactgttttttaatttttcttaaaaaaatgttatttttcttcttttggaaagataaaacaaaaaaggtaatgttattaactccatatcttaatgcttacaaggcggccctgtcaatttacttttatttgaaaatttctccacactaccaaaaaataattaattttagtgataattttttgattacaatataaatttttatgattaaatgtaatttttaattacaacaaaaaattacttgtaactaaaacataatatttaaatgcaaattgtcactaacttattgtgactgaaaacatattaatattgtaatttctacaaactttttagtcacaaggaatgataatttataattagttataagttatttacttttaatcgcaaattttattataactatataatttttttgtagtgcctatttttttcactcaaatattttcatgaaattattttcttgattaaaaatttatatattttcataaaaatccatcataattttttttcctaaaattcaaacttcaaacaaaacctaaaagaacaataggtttagaatttagaaaa

SEQ ID NO: 197180 - DNA, 1272 bp, Cannabis indica
ttgtgttttgatcaagtacagatagatgctcatcgttctccgctggctgcgatgaccctttcttccaatgggatgtacatagcaacagcatctgagcagggaaccataatcagagttcatatggtttctgaagcaactaaggttataaatcatgtttcaaatttaaattctaaaccagatttttctacaatggttactgaggactggtctggtctgtcatcttctcgatgttgaaaataggattaattgctaaagtctaatggatttttctgtacagtcttacagttttcgaagagggacatatccatcaactatattttccttgtcatttggaccttccgcagagcagatattcttgtggccacaggttcttcagggtcagttcatgcgttctctcttgggtttgccatatgccagaggtgagaaccgtgactagaaattctatgttgtgacacattgctatttcactgtatgcttgttgttgataactttatgaagattgttgattgctcaacttgttataattctctttatttagttgattttgtcttagaaattaagaaatatcagttagccttatttctattccattttctctttacagaagcagaagatcaagtattattttgggatcaataatgcccgactctttttctgatgcgttggatccagcacatcacggtgttcttcatagtgctgcaccagctggagttaaaaggttaaaaaatttcagattattccattgactttgagattaatttttctttgtcctactttatcatattatatctaggaattcattgatattgcagagggatttagttactagcctgcatttgttttttatgaacgcaatttgtgatcatagtttcatctgaagtaaagttattctagataacaatccatattatctttcaacatttttatacactaagcaattagttcgtaaaaattggtgacatttttcagctatgcagtagttaggaaggttgaaaaggttaccaactcgtcaacatctgagatcatagcatgccggtaagttgtccagtttcctctcacaaaaccattttctttcttcattctcctcacgaacttatagatattataaatctttcaacaatatccaaaacaaattgagttttttagattttggcttctttttgcaaagttatataatttccacctgggatttttttcagagccactatttctatggttgcatacaatggttacttccaagagtacagcttaacaatcagtagccgggacgag

SEQ ID NO: 197181 - DNA, 578 bp, Cannabis indica
tgtatgtctttataagaataccaaaaaacacgaacatttatgtacagaagtaactgttttttagtatttcataatgagtaggagttgctaaaccatgtagtcgatctgtcaaaacaaagtatagacttttgagcctgttatggtgtggaagtttgaaaagccactatacaaggaatccaactattgttttgtggaagttcacattgctatcttgcttacttgcactcaataaattatctagtccctgaaagtattgcaaaataactatacttaaaaagcaatctataatctgttctttttgtatgtttgtatttatagtttctatgtcataccaaataatcattttatagtgtgacaaatggacataatcttttcaagtaaagttcttgatttggttggactttttctgcattggagactcaaatatctattaagtgctattttctcactcttgtatgaacattgcttttaggttgtcttaacaaatgatttcctaagataattcaaatctgtatgcgtttgcactaaacggacattgaagtgcctagtcaatttgtagtactatccaaacttatctc

SEQ ID NO: 197182 - DNA, 2807 bp, Cannabis indica
cattccatcttcagcaacccataagtagtctggaattctagcaaggtgttttttaaagtaatttccatttggatcttcaacccaacaagcaagcatacatagcaccttttcatccacatgtaattattaagcaattatataataatacaagtatcctgcattgtatgaaaaatatatattcgattaatttttttattattatttcaaatcaccttttccacacatccaattgtaatgtatcgactgttctcatcttcataatgaatatgctccattgttactttcaaggctctctctctcaaaaattgttttaagggccaacgagtaagaaaaggctcagtgcatatatataaactatcccaaagaagatcttgtaaccacggatgaggataatacaaatcctcctacaacaaacatggacaaatgtattaatatggctaactaaaataatgtatatacatgtacacatataattttataataatatagataatatgcaatatttaattcaccttagcacaaaaatgtcgcacttgtttccaattaatttcactataagattgagtatgaagttcctctctcaactttagaatgagaggtgtgattggaccaacaaatctttttccatatagataagacatgggtaaatacaccaatcgactatagcaccacatgtttgctacataaaagggagaaacaaattatcttatacatctttctttacgtatataatttctccacactataaaatacaaaattttcaaaacctgggtacacaggaagaaaggagggcaacatccaaaactcagggggcatggggttgcttccagcccagtccaaaagaccaagtatctaccattaatccaaaaatataatatgagatataatgcaaaaaaaaaatatataaattattgtgtatttactaaatataaatttgtaagctcgcattataatggtggattcatactgaaagccacgtctttccccaagagggtatgtatgttataccaccatggtccaggatccattgtcttgctctttcacatgaattgtcttcaccaccgtttggcccttctcctaatattcgcatacaaatatagttgaggcttgtactaaacatagtactatgaccttcaatgtgcaatccccatccaccatctttgttctaaacaataaatttcaatatatagtatactatatatgagcataatggtacaataatattaattgattcaaaaacaattgtttctttaccattaaaaaaataaatattaaattataaaaggataatatacctgatgatagtatatatagcgaagaatttctttacgatattcaactgtgaatatggtgttaaggtgacctgtaatgtacaagcacatgacctacatgcataaatgagaaaattggtaattatgtttacttgtgacaaattttattgagaagataaacataattaaatatttgctagaagatatatgtatataaaaaaaaattctaaattgaatataacaatatacaaaatattaaaataggattaatttaaaattatgatacaagataggttttaaattactaaaatatatattatcaactaaaaaataaattgcacttcttaatatcttagtaatcttatcaagtatattttatatcaaaatatatattattaataagaatgataatataacctatagttgatggtatcttattaaataagaatagggtggagaaaaattactatgatagttacatattcaaaatcatcaaaattaaaaatcatagagtttttggcagttaaaccctcaaaactatcgtttcacttgcacttaactttccaagctcaaattttagcagtaaaaccttccaaactactatattgttaacaaacttaaggtgtcatctagttaattgtcattatggactgcttatgtatacagtctcgtatacgtggaacattttttttttatgaatcaggaaaagtttgtattgctcaaaattgatttttagaatctaatagcacccaaaatgggccaatactgaagtatggaagtgaatctatggtatatacattacccacccaaacctcttacatacaaatcaaatgtctaattacaaactttgaaaccacctactgtcagctgccttaactttcttaggccaacatatgctaactctttgtgtaacattcttctttaattcactgattaatacttctaaatcgagttttgaattttcccaaatgctggcattttgagctctccataaagcatatacttgacatgagagagcagttgcatatacctactttttgaatttgctaagtttggacctaccaatccacttagtaagacttggcaatgtaatagctgctgcatactattgtaaccaggtcttgacatcctgaagacatgatgctgcaacaggacattcaaaaaatagatgagaagttgtctctttatgctgggaacagagcacacaatgatctgttatccccatttttaacattctgtctctagtcttgagcttttattgtattgccaactaggtaagaaaactgtattttagtgtattaaacctcccccatacctgctgacaccagaaaactttgttttgatttggacagagtagtgtgtaacccttggatacactgtatgcctgcaacaatagttgctgccctactactaaatctctgaactgatcttttaaagctgtaagacttctccagtaccaactgccttgtactggcgccttgtagctccaccagtcacctcccttgatgtatacacagtgtatccatctctgccaca

SEQ ID NO: 197183 - DNA, 1821 bp, Cannabis indica
aattataataatagcaataaatgacgaggatttttatgtagttcgaagttaattcttcatagtccacgagtccatcttattctggattaataaattgtatacgtaatacaataaattattttactaaatgaattatagatacaattctctttctttttccaaaatggtcttcctttgttccctgggttctgtccatatttataggagtctaggatgacaattattcccttgggatcttatcacttgtaaatgtccgtaaatcgtggacaatccccacgttttatatttacgcacatggaataattacaagtaacttcccataactgcactcttaactttatccacaaatggctgtgttgattatgcttcaaactcctccaagtgtgacaattatttttgacaccttatcgtaagcaaacgtctaagtatatgttgtaacattcctcgcgttcttcttttaatgttgagtgaggcacatgagagacgtttgtcacaccaatacaattgcgaggtgaatcatgttgaaggtgttgtatttattctttcaacatgctcacgtgtataggttaatgagctactagctctttggataactcattatctacctttccaaataattatgtttatgtattctgtatatcccaagatgaactttctttgttcatctcgctagtctcatcaattggtagttattattcatgcctccccattgtctttaagagggtgagtttgaatatttctgccaactatatttctcgaggcgagttgtctgaatgcatttattattgtataatttgggttggtttatatttcaactatattacacatgtcagcaccatattgttactcaaaatatgggtataacaatgtgtttgatttattaattctcaaaattaatacatataaccactttaacaattatggttactttatttataataaaagtctcaaattataaataaatttcccgtcataatcattaaatatgaagtaactctttaattcataatttaaaactattttaaattaataggttaattttaaattaccaagttaattctaaattaatcttaaccagtttacatgctttaggtttcaaaaatgataaacacataaacacataggaaaatcttaatatatcatgtttctactatgagatgcatgataatatataatagtgtgagatttctatgtatgacatattattcactaatgcatgagcattgttatcccaatttttttcccagataacatggcatgtccatgtagccaagttgatgccacatggaatacagctgtcagcaagaaggccaagtcaccatgtacaacatactagttgagaaggagttgaaatacttaagcggaacaaagagataatgaattggccaaccaagggagtctggtcggaccacccctggctgaccctatttctagcataggtcagccagcctccagcaaagggagggttgaccagcctctctcctggcaggcactttttgtgcctctgtagcttttaacctagacaacacttccagttacgaattaggcttcaaaaacccatgaaggtaggagataaactttagttatttacctattctttaggattaattaacatattatttacttattattttaacgtgtaacaaataggtgatatcttctcattttaagggatatcaacctatcatctcctataagctctcctatataaaaagcactaaacaaaacctaatctttctaagttctatgcgctaagttttaggctctatcctcttaagttctaaagccctagcgctctctctctctctctctctctctctc

SEQ ID NO: 197184 - DNA, 1003 bp, Cannabis indica
gtaaaaatgaaaaaacccctattctttttatgtatggtataattattgttatgaaacaaaaggtcaaatatatttaactcccttgactattggtgattttgttacagctattgattacagttaattgtgtggcttcaagagtgtgatttgaacaactagaaaatcaaatattggatatggctgatgtcaaaagaaagagctatgtgatttgccataccagaaatcagatctgctgcatcagattaatcagcatttattttttattgataaatactttaagaatgtctttgttgcagctgtagagtgataatgttgaatattgaagaaagaaaatagaggaagaaagaaaaatagagtgtgtttgaaagcaaagaaagactggaagctcattgtctttattgctcaatcaagtgtatttatacactaattacaactgaatgaaaacaaactcaacaagctaaaccaatagcttaactaactttaactaattctaaccaactcacatatctgttaggtggttatcatccccctcaaacgaaaaagaagaagaaataatttggagttgtgtgttttagatagtgaaatcgatctttaggtagagattttgtgagtatatctgcaacttggtctacagatggcacatatcgaacaaacactttattattgagaatctaatcacgaacaaagtgtttatcaattttaatatgtttgcagcgagcatagaatactggattagctgctaaagtagcagctccttgattgtccacccaaataatgggaacatcagctagaacagcttgtaattcagtgaagtttgaatgcaaccacttaagctcagcagctgtgtttgctaaggcaaaaaattcactctttggaggatcgtgtaccacttgttgcttcttagctgaccaagagatgagattgggactaagaaaaacaccatatccaccagtagacttgcaatcatcaggttaagttgtccagtcagcatcagaataagcct

SEQ ID NO: 197185 - DNA, 1233 bp, Cannabis indica
tgtgcaaaatatcgcaacacccatttataaacgggtttcattttcagacacaattattaaacgggtcatgttcgggtcgagtatatacctattatacatgggtctcgacacgacacgaacacgacctgcgaacacaaaactttaatgaatttaatgaaatgcaagggtcgtccagtcagaaacattaatgaatttaatgaaaaagcattagtctttgagcggaagcaagaggcacgaaatgagatgaaaatgctcaaaacagggtcgagagacaaacccaactcaagtactgcaactacgagtactgtgacaacaaaagtgggaaattcgaatcacaatgggtcaaacagaaagaggaaggatgaatcaagagattcatcaaaagataagaaaaagcagaagaaaaatgagaagtatgttccaatatactcagtttatacgaagctaaacgagactcttacgtcatcattgccttcaacataccatcagggtcggaccatcaccaaaaccatcatgaaagggcatttgtgctacaatgtcagctgtcggcatcgtagtgtttaattcaggtaacacatcaactgccaacacctctaaattcatttcaggaacgaaactcctaacctcgctacgagtatctttaacagtacttggtgtaattagaaccgatacaaacattcttcttcaccaaagtcacaaacaagggagtaaattcatctggctcttgcaagcataaacaaaaataatcttggacgcttaccattttaataatttcagggcaatacattaataagtctttcatgtacttgtaattcatttccaattttaagtcatattgcactttgtcaacatcgagttcttcgtacaaaagatcaaccaaacgtgagtagtttacgtttgtatcaatcttgaatgttaattttttagctcggttataaatccaatctctaccctcaagctcccaaacaccattatacataacaaacgcaaaaacagttgaacatgtcatccacagacatttaaacataattaaatttagaaaaaaaaaaactaacataaaagtgattaaaaaaatcctcaaaaagccataaatttgtcaagcatcagacatgacatcgaataaggcatataaaacaaaattctaagtgacatcggacagaccatcgagacactaacacggcatcagacctatcgaactatcccatcgggcctatgtagacatcatccctaacc

SEQ ID NO: 197186 - DNA, 772 bp, Cannabis indica
taaaaaacaactaacagatgaagtttaagtttaaaattaaaaaaaaaaaaaagtgaataaaaaccaaataaaaagaattagtaaaaaaaaaaaaattataacttaaaaaaaaaaacgaattagcaacatacagataaaaatacataaaacctacaaaaactttcctttttttcacaaaatgaaaataagaaacacaaaaaaacccaaaaaaaaatacattaaaaactaaaaaaaacaactaatcagaaaatttctttttttaataaccacaagcctatggtacatcagggatattagacattctcttcttttgcaatacctttcatatccatttgaggatcactttcaatctttagtttactagatttcgtaagagctttcttaagtttcttagcaatttttacagcaggagatggggacatcgaatatgatatagtggtgattatttatacaaagcaaaacaagacagttgagaaaatagagaataaaaaaaaagacaagagagagagggaggttatggctgagggagaatcgtgactgaaatgggtagtgaggaagagagtgggttagcgaaggagttgttgcggtttcttaaagcaaacatggatcatacagaagaaaaatgaagagagagggagagggagagagatcaataactaaaagtttttttttataattaaagaattttttgaaaaataaaaatgaaaaaattaattatagtaaaaaaaattcaaaaacaaaaagtaaataaaaattatagtttgaaatttta

SEQ ID NO: 197187 - DNA, 1100 bp, Cannabis indica
ttttaaaactagaacaaatagtatttcatttttttcattgtgactaggattttttcctctaaattattattattgtaaaatacgaaaaaaaaaattcttgtttcgttgcattttgcttaatttttgagataattaattcacgtaaccataaacatgcgtataatatttacaatatatgagaacttatttaattaatttaaattgactggaaagtataatgtccttaaatattcaaacattaactctaaaattacggatacaaatttttagattttatcagattactatttatctatacagttatttttagttggactctcaaattacagtagattaaccttggatcactcgtacggtaagaaactatttgtaaaaataaatgaaatgcaactaaatgggtaaatttgtaattatttttataatttaaggagaattttttataaaaaaaaaatggaggatagtatcatatttatttttaaaattaattaattagtaatgactgaaatagcccatgttgtatatttaattaagctctatgttgatgacattgaacaatttggtaatccaactctatacaacaacataattggagcactatagtaccttgtattgacagaccaattcgattatatgtcaaaaacttagtcaatttatgcatgtcatcaaccacagctcattgatgggcttgtaaaagggtgttatggtatctaaaaggctatacaattagaggacttgtttttgaaccagcctctcaagcttattcaactactagttttggagtcactcttggaggttacctaatcacatggagcatttaggaaacaaaaaaagttgtagccatatctagtactgagttagggtagcatttgcattagattatctgcaacaataatcaaagaataaatacaagataattaattactaaatttattttaatttgtgaatactgatctattagttttacttaaagaatcatacaaatagagatgcaattatacttattaatctcattttatcttcatttttttaattcatgtagtactttactctaagaccgaccaaagtggtttgggggcattgggcgaaaaattaaaattgag

SEQ ID NO: 197188 - DNA, 2352 bp, Cannabis indica
attgagattacgagaagtttgtgtgttagtggaattttgagataaaaggcggtttctactatatcgcctctgagttgggactcggccaagccatggcttggcatttggcaaaacaaaaccgtctcacaaatacaaataataataaaatatactcttttaattcgtcactgtccaaactccaaaggaatccttcattcctaacctagtacacatgaaaccattagaataagagtatgataaaataggtgagccaatttataatatgttttaagtattttactttattttatttattttttttagaataatctcaactattattataaaagaataattaagagtcatttacaacaataaaaaatataaaatgaggaattacactcatctaacagacatctttatctaactctaaagtatatttagctaacccatgtgttgcttggttagcatgtctccgaacatttgagacaacaactttagataaagaacatcaaaaattaaatttgaaaaagaagacaaatctaagaatgtaattgatagcacattaaagactcttaaagcatttgtttcaatgtttgttacagggatttgtagttgacttgcccagttgatgctatgaaagagagctttcgcttccatctcatttgatcgaaaatatccttggaccgatttagaaatggtaacaagaacaactccattatgatctcgaataatcgttccaatacccagtgtttttgtcatttggttgatcgccgcatccacattaagtttgataccattcagatcaggtggcctccatggaactccctccgttggcttgtgatgttgttcagttgcagttggtgcagccatggcagtaggcgctttagcccaattgcgagtggcaaggaagtttccataatagtgagttgcataggaaacaatataggatccatctcgccttactccaccatgtaaaactttattttttctgaccaaatagcccacataatacaaattagagtttcaaactcttgtttcgagtatatcgatgataaatgaatcacataatctccatcttgcatatgatgagccttctagtagttaattgtgatttgtgctgccttctaaactgattttgcataccgacaagtgaacaaagcatgtcctatagactcccaagcatggttacacagtgaacaagtcgctgagtcaatgactttccttttgttcagtggcagcaacaggcaaagcgctttggataaccttccaagcaaaaaaatttattttgggaggtaacttaagtcctaaaaattcttccaccaattaccacggctgttagatgtggaagattcatcaatttcagccaaggagtcagctaaatggaaccccgacttgaccgtataagcaccagtagtcgtatggtgtcatatgaggttgtcatgaatttggaagaaactcagtgggattgtaaggatatgatcaacatcaattggagcaaagtgatcatttagcagagtgaggtaaaataaataaaatgtataaattttacttttcgacaatgtaaattattcgaaaatttttgaaaatatataaatggtcctaaattactataacatacacgattatgaaaaaaaaattgaactactttttttaagtgttaaaacaaataggggatctattgaaacacccctttaagggagtgtactgtagacattccctatatctttagaggagtgtttggtatattttatcactatattatctatttttaatatgtcatttatgtacaccatccgcataaaatttatgtataatgtatttgtatgttattgttaataaatcataatattaatggtatttaaatttatttattaattaaaaaatgatattaaaattaatatactcgaagagaataattcaatcccaccttttttaaggtatcaatattaccatcctcaaggatagttatattactaaagaaatactattctaagactgacctcaaaacaaacaaagtaatgtgaaaacattatcattctcttgctagtattaacccattctaaacaaccttagagtcatccaaccacattaaaaaaagttattgcttttggcttttagctttaagcaaaaacaaaaatttagtcagataggactatccattgtcagctaaggtggaaaggaagtggagttggcggggtgagacgagtaaggtggaaatgaaaaggaagccatccattgtcagctaaggtgacttgtattgaggttatctgatgatcaattcgtcgacaaaaattaacgatatcatctcttttgactacttcaagtatttcttctaccattccttctttaatgttgtgacgaaagacgtgt

SEQ ID NO: 197189 - DNA, 1224 bp, Cannabis indica
cagttgtagacactcttcttccttcatttagcctcttaatcgtacatgcatgtaaaaggaatagtgcacacacactctatgcaaggcttggttgcagcacatgatagacgctatcagatacttatgatatatcaccttattctaaatgaaataactacctgaaatcaacagtggcagaacgagaaccatgaattgaaccacatcctgccggcattaatgtacttgaatcatatgatagagatgaaggaacccctcttaccatctcatctttttcaactgcaagaccctgtactcatcttagaatcaaaaactcctactacttacctaactacagataacaccggaaaaataaaagaggcgcaaaagtcaaagcactaaccatagcaaccaactcaagaagtctattagccggggcttcaacattcaagggtgtcattgttgcagaagcaaccgcacttgcagcctacaaaacaaacgaaatatcaaactcagactcaatcgcagcatttgaatctactggtgggaacaattgggttgtatgctcatcaaataatcgatcaattatattcggttaatgaagtgggaatcgagatgtgtaaatacaagtcgagttatctaattaccatgataatataaatcagactaagcatacaagtccagttatcttatttcttccccaaatttaagattatttgaaacaacgtaacataagagacttaactatttattcctcaaaacattcagcgactaaaacacattcatttctaagacaaattaagaaggaactccactaaatggatttacggacttagttaactcaatcaagaagtgtcaagaaaaagaatgaatctaattacattgtaaaactcaaatgaacgttgttgttttttacaaatttttctcaggaaccaaacaaaaaacaaagcacctgattgagattgttgtggcgaaggtgagccacgatgagagaattaagctgtctgtatagcttcccatcttgaagaatgttctccaagctgctatccatatctctcaaagataaaaataaaaaatccctgaaccccaaaacccttgaatattgcctttttattctttcagggtgctattcatttctctaattcttttagttgtattttaggtgggtgtggttacaaaataaaatgaaatgggattgggaattaatacctgaataagaattattatggttggtattgtatgtgttat

SEQ ID NO: 197190 - DNA, 748 bp, Cannabis indica
ataatatatatgttaagaatttatgttacaaaatcttagtttttaaacagaacaagtagatggaaagattaaaaggacaaacaatatgctaataatattataagagattgatgatttaaatgtaaacaatttaaaattggggaccttatacaaaggtgggttaagtttagagaattttagtgcaaataattaagtcttcatgaatcatatgtagtaatgaatggacccccttttgtcttgagccgtcgttcttttgtatcctaacccacctcttgctttagttaatggtagatgtatactttttttaatattatcttagcacacattttaaatgttaattacttattatcttaatttggaatcattaatacttaatcaaataaaaattattccacatgtactctctaattgaatgctacatattcgattacttattttgtcttgtattatccctttctttcttgattatattcatgggtgatctcatcatctcatctcatacattatgcttcattattatatcagttaagagaatcgatatatgaacaactttcaacactttttattttttatttattttattttttttggtatgtaatatatgtgaaaattcttagttaattagaatcttattgttatcccaaatgttattcacttgacatgtcgtgttcatataagtcaaaattgaggcgcgtggaatacaaccttgtcaataacaggacataatctccttacaaggcatgacaaa

SEQ ID NO: 197191 - DNA, 1251 bp, Cannabis indica
tgtgtaattgaatatctaatttaaaaacagatcctgaattagattttgaggtctaattagattggatcggataataaatttttaaatccaattactaaataaattggatcagataataaaaaaaaaaagttaaattgaatcggatgcacacttctaaattattacaccatatatgaaattgcagctagagcaatatcaatattgatgaagttaataaaatatatagtgatcaatataaattatacatactataagccatattatcggattattttatttttaatatttatagggaatattttatatatatatatactagcatattgttacgtgcgatgcacgtatgttaatttttatattaggtgatttattattagttttaaaagtaataataaattaaagataaatgattgttttttttaagtaaattgttatgatcaataaataattaaattgttgtgttaagtatcttgaactattagttaaatgactaatgttagtaaaacatattgcaagcaataataatgaagtggtgatattgaaagcaaaataacgtattcaatttgaaaactttttatatttttttaatcaaaatataggaacattaaaaatattattgtaacataaatctaacaatctgcttaaaaacgaacaatctaaactaaaacgaaatatcaaactgaaacagaatactatacagtgttctaaaaaattaatgaatattaaaaaaaaaaggaaatagatataatttacaaatcaggttaataaacaaaataaatagggtcatcaatatttaaaagtactacttttagtgttaattaataattacatatgagccatacctttcaagtggttattgaataaccaaatcttctaaaatgctcctatataacctttactttaaataaatataactaattaacaaaaaaatctcgttgtccactattttctcccctgtcgtccatgctagcgtatcatttaggcatcctaaaaatgacaatgattataagttttgtactcctcattatatgaagaaaaatttaaaaaccaaaaaaaagaaccattatctatctctagatgataaaaataacaaagagtaattgtgtaagtgtctagacaaagtgattaacaagagaaacatcatctgctagttaaaccaatttcacaaaatcaaactgtattacactcttcccaaaatgccatacacaatcctaaatacaacccaaatatataaacatttcttcctctcac

SEQ ID NO: 197192 - DNA, 884 bp, Cannabis indica
agttcatcttgtcttactgtacgtacaacactacctcgtctactttgaatctcaacattgctctgttcattaacgccaatgctctgtacaccagacaagtattcagaacaaaattcaattgcctcttccgcgatatagcattccacaatgcatccttctggccgacttctattcctaacatatcctttaagaattttcatatatcgctcaaatgggtacatccatcttaaataaacggggccacagaattttaattctctggctaagtgaattgttagatggaccattatatcgaaaaatgcaggcggaaagtatttctccatttcacacaacacttcaaaaatttcatcttttaagtcggataactttagtggatcaaccaccttacaacacactgacttaaaaaacaaacataatcttgtgatgatctctcgaagtttaactggtaagacagatcgaatcgcgactggtagcacatgttgcattataatatggcaatcatgcgatttcataccacttaaagtacatttgttcatgtctaccaatgagcttatatttgaggaatagccgtcaggaacttttatattatacaagcaattgcaaacttgcattctttcatctttagtaagagtgtaagaagcaggtggcaaatatgttcgtccctcctctgtttttggatgcaaatgattacgtacacccatgacaatcaagtcttgtctagccttaattccatctttagtttttccaggaatattcaacaaagttccaattacactatcacatacatttttttctatgtgcataacatcaagattatggcgtacaagtaagatttgccaatattcaagctcaaaaaaaattaattttttttattaacaaccttt

SEQ ID NO: 197193 - DNA, 1354 bp, Cannabis indica
gtggtgggtgaccagacatggattccaaagggcaaattaattccagttaataaagtattttgttttgccaaaatgaaaaagaaataaatactatttaatagacgagattaatttaatgacaaggaccacgtcagccacatgacgggtgggaatatgttggaccctagacccctggacgcgtagatcgactaatcaactaacacgtgtacggatctaaataaactggaataaacaattttaatagcgcgaatatcgatgggccacatcaacaaccaccacgcccctcgtatatacggcgtaccgtataaaaccgcttacgctgaagacacgtgtacgatgacgtggaagttggcttggcgctcttcttcttcttcttcagcccccacctctctctctttcgcttcattctattttttatgtgtgaaaagaaagccacaacgttgtagagagagaaagacagagaaatgctgaggctatgaagctcggtgatttcgccattgacgatagttgaagctcttagagataatatttttcaggaaatttaatttggaggtggaggttttcggaatttagagtcaagaggtatgttaaattttttatcggagttcttcctttttcctgtattttttcttcttgtagatttagtataatgttgccgcgattttctgccttttctttttatttccttttgagtgttttttagtttgatgaaagtgaggtggaaagtatgtggaagagtttaaattccagaattttggtatctttcaaggacaaatgcagggagcaagaaattatgcctttgatgttttgtcattagaaatcaaaggaacagaaatctctagtactatcagtgcaagaaataggtagatatttttaacgaagaagaagaaaaggatgattaaagttgatgcttaattagatcttcaacataactggatcgttttacttggaaagctcagtttcattagctgattcagtgtctatgttttcctcaatttctgtctcttctcgaataaattcaattatatttgtgaaacttaatccatttttaaacgttgattgctttagatttagttggagataaataattatataaattaaggggttgagttaaattaatatattgtctctttgctaaaaaaaataaaaattaatatattgtcaaaaaatttctcgtcgagggtgtttttgtctttcagcatccagactacccgtttcagtctttcagcttaaacttcttaccctactggcaccttattatcaactgagatggcgaaagactatactgaccttgaatttgtcgtgtatgtgattcagtaattttcagatttctttttttctacttttttttttt

SEQ ID NO: 197194 - DNA, 506 bp, Cannabis indica
ttttttttttgaataattaacaaaatttttgttaaaaaataataagtgtaaaatacacttaaaaaaatggagaattaatcatctaaaataatttattattcattttgagtgtatgcacaagtaattcataactgtaaacaaaaattagagacacctcaagaaaactgaaaagtaaacaaacactacgtaccctataaaaaaaagatcataattgagtacaaataaaaatctcatagagaaggcaaagaaaatctattaatctcaaaaaaaacaaaaattgaaatccaagcataaaaaactaatccacattccacaccatcatcacggctattttgaatatcagtgagtttccctataaaataaataaaattgaatcagcatactaaatattatagataattaaataatgaaaaataaaataaaataaaaaaaaacttatctgatgcaaaaatagtgtagaaatttgaattagttatttcgaagtttaccctttaatatgagaacaa

SEQ ID NO: 197195 - DNA, 973 bp, Cannabis indica
ggtctgggtttgggtttggttctcggatccgggtttgggttcggttctaagtttgggtttggatcctcgttggggttcgggcctgggtttggatctgggattaggtcatgggtttagtttgagttcgggtcttggtccttgcctgggtttgagactgggtcctggcctgtgttccaatcttggtttaggtccggggctgggtcttggtcacagtctcagtcctcttccaaggtccttgtccgattctagttcaggttccagtgtcggggctcaggtccagtctcggttcgattcctggccagagttcaggttcaagtccgaatccaaaatccagaaaccgactacgtgtctggtccaagccccggatccgagatctcgttttaagatctgaatcttagtcataagatctagtctagttctgattcaggtcccgggtcccggtctgtgtcccaggtcaaggaatgggtctagttgagagactgggtcaagttctgagtctcactccttgggtcctgggtcgttttctttgcttgggtctgaattttggtccgagtttgggtcctaagtcccagtctctgtttggttctgggtccaggtctgggtctatgtctaagttcaggtccttgtccagttaggttctgggtccgtgtctaggtcctggtctcagtccttttcctgggtcccagtccaatttcagtttttattccactttcgggtcacagggtacgggttcgggtgtaggtttaggtcttggtctaggttcaggttttggtccgggtctgggtctcagtctaggtgcgagtttgggtttgggtcccagatccaaaaacagactgtgggtcagtacaagcctcgggtcgacatctagatcacagtctcgattctcagtctggttcccattcaagtgctgggtcccgagctaggtcctatgtctgtgttcgggacttgggtcgggtcctgggtcccactccca

SEQ ID NO: 197196 - DNA, 1763 bp, Cannabis indica
taaaaaaaaaaaaactaagaagatgagataaaatggatcatgaagccacttaaatcagcttattctaagagagtggaaacttgtggcacaagtggcacacctacatttgttgtgctcttctctttttctgacaaaagctcaactagagggaacgagaaaccatcagatgtgtgcgtgatggagtggtcaagctttagctttaatgggagaatgattttgtgggtagggatgcacacgagatagggaattggcgggaagtgttcccccattctaattcccgttaagaattttaattcccatatctttgcttattctctatcaagaacagggcggaaaatcccttattgggggcaagaccagggcggagaatcccctaataaaaaataaagtttacaattaaaatttaaatatatataatattaaactacataaaaaattaaaatattgaacattaattattattcaataaattaattatcatccaaaacacaactttaaattcacaaaaagaatataatatacttaaaaaaatacaaacatacattataaattataaaaaaaattattaaaaatataaaataatatactaaacaggttcccgttggggtgagaagtgtgattcccgtcctcaccccgttcctcatttagaaggggaatccccgccccattaagggcgggtctccgcgaggcccatccccatggagaaatatgcatccctatttgtgggacatgagctaagaagcttgtgatcacaatcataaagaaaattagattcaatactcattttattgcccctttttttaagttttaccctttcctttttaaaatctatcatttctaccttattggacaaattttgccctgtcgatctcttttgtgctcttttcactttttatttttatttttatttttattttctctaaataatttaagaaatttttgtactcttcttattaactattttcaactccaattgcatttgtatgcatgcataattaagcttgtaattttaactacaatatttattatatacggaatgaattaagaagaaacaatgtttactatatcatctacattggtcttatcaatcataaaaaattaataaaaattaattatattatttaagtatattttcctcattactattctctaagttaattaattaatttaacaatttttgctataacatccatgtcaaatatcttaataaataatgaatcattacatatgtggcataaacttatcttagataaacaatgtgatttaaattaagtaaacaatatgttttattaggtaaatagtatatcttcattttggtaaatgacatgcaatattagctaaatagtgtagcatgctttaaaataattaaggtaaacaacatatctaaaataaaataaacaacatactttaaataaagtaaacaaaattaataccctataataaagtaaatgatatgctttattaagtaaacaacatagattgatttaagtaaacgacatgcaatattaaatgaatgtgccttaaattaagataaataacgtacttaaacgacatgtcttaaataagacaaataaaaattactatcctaaaataagttaaaccacacgcctattaagtaaacaacgtgtctaaaataggataaacaacatattttattagtaaacaagatattgttcaattataaaataaaatatattttaatactatttttgataaataaataaaaaatttaattatcaattgatttaccaaaaaaaaaaaaa

SEQ ID NO: 197197 - DNA, 648 bp, Cannabis indica
ggtaggggttgggatccaagagtcgggacatatatgggtttgaggttggggccggggttgggattcaagagttgggacctaagtctgggttggggccagggtcaaagagctagggctcgagtctgtgtggtcgaggccggagttcgagactaatgtcagagctagggtaaagccaaggttaggggttcgacgtccaagtctaggatcggggctttaggctgtggtttgtgttcggggtcgaggcgggggtccaatatcggggccgtggtcggaggtctgatgttggaatcgtggtcgaggtgactggggtctagcgcgctagggttggggtcgaggcccaagtcttgggtcgggattagggtctggtgtcgagatccagtgcttgggctggggttcgatgtgaggtccggggctggagccgtcatgacctgtggttcgaggtcagggtttggggctcgaagttagggtcagagttaggagttgaaggttaaagctactgtcagacctagaagaggattagtattacatatgatataattgaaaatatttattttatttattgatttaaaaaaattaatacagtataatataatattattgtgcaccatacatgctttaatacaatatataatataatacaattcaaca

SEQ ID NO: 197198 - DNA, 1756 bp, Cannabis indica
gttgtgcaccaagtgatgaccaaagatcacctaggcacagggtgttgcaccaaatgaagttatgactttgccacaagtcttttagcttattcttagtgataaagaagcaaatttccaaaatataattgttatttgatgaatgaaaccacactttacctggacactaggtgcacttgttgcccatcatgtgggcgtcaggtgtgttggtcagtcactagtttgatattttgagctgacataacacctacgctgcttcagaacaaaatttcatcgagatttactcattcggaattgccatcttgtgtgattaagcctaggtataccctagatgtcaacttggacgctagacacctagggcaaagccaacctaggtgcccctaagtgtttcagcctacatatggtttcgtttgatccctgaaaactattgtttccttttatttgatgaaagttaggaaaatgctcgatatgttagaggttataccttaaaaagcatgtaaagacattttaattattaaataaagatgtaatgccctgatattttaccttactttaaaaatataccattttattgtataatttgaaaagattcaaaactacttgaaatacaacattgggttttataaatcaaaatgcaacagagaaggatcattcatttataaaagaaaatatagtaaataaataattttaaataatatatttctactatgtttagaataatcaactactaaaaacaaaattaagacacatcgacactctagatcatttgcccattcgtagcccctcacagtgtacacaccaaaactcaatctgctcactactagcacttctttactagctaaaagcccaataaagaaatgtttaacacatatacattatacatatataaatgtcttaaatccacaactgtgcagttatatacaatatcatcatatcatcaacgtattaagtatagcaacatcatactttaacttataacaataattaaattattatatacatgaaaacctatatcatatgtgtccatgctaaatgaaatcataccatacatatattataatgccctaacttctagggatgccacgcatgtactttgataaataagcttataataacaagatcaactttaaactctaaaaatatgtttgattaaaaatttactgttatacccaatttttgagaaataaaaaaaattgaaccctacgactttgattaagacttataaaggccaaatgaggttaagacatcctatttgagggcctcatgacaactcataaaaatactaaccaactatttggtactggggcactaaggttccaatttccaacatcgaatatgaagtagaataggaggtgctcttagtaggtttaaggatagttgaagttgtaaaagctagggcaatccattgttttagcaattctcaactaattgtaaattaggtacttggtcaatatcattaaaaaaaaaggaattaaaatggccaaatatttagaaaaagttcgggagaacttgagaaacttctattattaaaaaattgaacaaatactaagagaacaaaattcaaatgttgatgcttttgcaaaattggcatcgcaacctaaagtagatgaccttaatttggttccaattgagaagttgaaagaaccaagtatttgttagatggaagaccaagatatggatatgattgacacaattccaacttggatgacgccaataatgaactatttattaactacgcaacttccatctgacattaacg

SEQ ID NO: 197199 - DNA, 1418 bp, Cannabis indica
taactaccaattagaacaaggaaaacgccaattaacttcttacgccgtcataaacgaaattaaggctaaatcaatgtgcaattacaacagctcgatttccaaatccttcataaaataattgtacatcaaagattccctaatttatatatttttcctcacgaattgaacagcaagaactaagaaaacgttcatttttttccctcgaaattttccgagcaaccaaaaagaaattttacataaatgaaattagagtagttcagagagatagagactcactgtgatatgaagattagcgttggatgagagtgagggatcgttcggcgaaaaggcggtgtcgccggtcatgctttaggcggagaacttcgcacaagcgccttctgtcaaagtctgtgattctagttttgccctaacactaagcttgctgactgggcttttttcttatatttatttattggtccttcaatttgattatattgtcgtattaggtcatcaatatttcgcttattaactttttttaaaagatttcgcttatttgatattaaaaagaaaaagaaaatagtttccttaaaaaaatagtttccttaaaaaacaattatatatgttttttaaaaatatatgttattttatcgcaaagaattgtcttggtagtcaattaaatattcattttttgttagaagtgatttaaaatttattgtttgtaataattgaactaatcaggatttttacgtatacttaaaatttttataagtaactaattatattcttgaactttttcatgttagaaaatttattaaaattattaaatttaagaacttctgtcaattacaattgattatacttacgagactattgttaatgtactaaatcgtgaccctaaacattaatatttatcaaattatacccttgaattttgacatttctaaattttatcttttgaacatttatctatgtcagatttaattttaatagcctaaaaaatttataaaacataatttagtacatattaaaattcaagaacaaaagtactgaataatttgctaacttaatcatttatacactttattcatttttagttggaagtatatttttttaaaaaattaatatataaataaattaatttgatcaaactattcatgaaattgtaaaagatttttaattcaataaagcctattttatgtccactaaattgctattttttctacggatttatcaataagcatcataatcaactacaactaataataataatgtcttagattattgaactaaattaaatttaaatataatttagataaatattgatggatcaatttttgagttaaaaggtctttttagagcaagtaggatagctcgtgtcgtgatggtaatagtcgattggtggaagctttttctattagtttggttggtcgtgttcaacc

SEQ ID NO: 197200 - DNA, 513 bp, Cannabis indica
aggttcaatgtaacagtcgtgaagacacccaagaacatggaacaagggtaatatcgtaatacgaagaaactaccaaagcagtatcgattaggtatgcccaatagacaaggggtaagtgagattgaaagcacaatgctcttgcaatgttaagtatgtgttgatgtttctttccacaactgattttttttgtgggcgttcaacacaagaatggtagtaagtaatgcttttggaagcataaaaggatgacgttgctagttctttggcactgtcagattgaatagctttaattggtgtagaatattgagtgcaaaccatgttgtaaaacatgggaatcacagtgtggagatctgctttagttttaagcataaatgtccaactaaaccaagatgtatcatccacaattgtgagaaaatatctatatccttctatgcttgtaagatggaatggtccccatatgtccacatggatgagatcaaatgcatgtttagcgaagttgttattggatataaaggg

SEQ ID NO: 197201 - DNA, 1791 bp, Cannabis indica
tttagctgtataccagttagtcctgggaaatgcagagtgatatggtcaagtgtaaaaaactttggagtattatgggacaaaattgttccaaattggatatcccatatggacacaaacataattttcgattcagatttaagtctcctacaagttgaggtgattaattatataaaaataatttttgtgtaataattatataaaaataatgattggatataaattcatggtattttgttaataattataatgtataggagcataggataatggatgttgggcgtgggccatggcataaagagttttttgtgccaacaaaatcagatgctccaataattgctttcagaaattggttgaacaagtatggtggtgggcaggttgattggaaaggcaaattcactactactactcttcctccaactcctcctagagaacaacttatggataggtatgtaccttactataattttgatattgatattgtaaattattcaaaaaaaaaaagtatgactacaataagaactattgttaaaaataataatgataataataagggatatttgtggccaaatcttttaacatttataattattacacattgattctaatttaaaaaagtagcggcataagttacttatcttacgattttgttgtagtcgtactattttttagtcattaagtgttagctctgaaacaagtggcgacatattattagattacatattaaataagctaaagaaatatgtcactaagtgtttctgagctaacacttaatgggcttaattggtacttaattaatagctaaaaaagagtacgactgtaataaaatcgtaaaataaaatatttttgcaactatttttttttattaaggtcatatgtgtaacgcttataaccgaaattgtaatcaatttagggtaactccgtgctgattggagaagcttaggaagtggtgggccgaccctagacataggcgggctaggcctgctcatagggcctattcattttaggggtccaaataaaaaaatattttttaaaaaatatatatatttttaataatttttaaaagtaccatttatctttatagtaagagtcaaaaaattttttttacctatgacccattttaattcagggccgaccctaagtgaggcactttgtgagagtgtttatgcatggagtgaaatatgaaagcataccaaattttcttttttctttttaataatttattattaaagatgtggagatggttagttatttttaaagccactataatattaaaaatgttcttataagaatattatgtttgtgcttaagaaaaagaagaagaataagaaaagaggcatcataacttagagacacgtgttaataagtgtaaatcacatgttagtgtacataatataacattatatgatgtatagtcattagtgcaatttatatcattatatgtacttgatttgtttttgattaggtattggagccatgtggtgaattgtccaagttgtagtggtgcacacaagggtttgaaagtgttagaagtagtgctacaagtgatgagcatagctctaattgggtatgctgctgttgctaccaaacaaggccaagtattaaagagtgtcatggtttctatagcaatacttgcctttgcagcttcaaagtggctttcacatcttatccacaagctctttcatcatcatgactatgatcatgctttccaatgaaaatagtacttatataagcataactatgtggttgtggttggcatagctttttagtaaaaagctctttctttaatgttgt

SEQ ID NO: 197202 - DNA, 1174 bp, Cannabis indica
atatatcatttatttatttattttttttgttaaacttaaaaagttaaaaagtctcatttctcgtggtgagtgcttatggaatcgaccttactcttatgatagtttgttacttgtaaatgatacttatacttgcctgttaatatttccataataataccctaccgagcctttacagtaaaatggagagacttaatactctgtgaggcactaatactaaactgttaaatatttctctttctcaaactttgtgcaaaaacatccatcatcacatcaaggctgaggctcacattcagacttattttatgggtacaacaacaatggaaatttttccaactgtgatgtagggcgaataagaggaagaggaggtggtcattaatggagggcatgtggtaatggagggtattttaacattcaaccgtggtggagggtgtgaacaagaggaagaggaggtggtatatggagggcgttttgaatttcctacatatctcatcctgattttatgtatttcatcatttatttggtatatcttgagtttgtgtactttattgtaatagtctttttttttttttttgaaagtattatgtaagagtctcttttaataattgtgtaatccctctacaagaagaacacgggtagacatggtttttccagtacacaacaatctgctttgaaatgagtcatgatgactcaccatttatttaaactttttttatttgaaccatttatttacttttgtccatgttcttattagttctgctcctttcaattttaattttttttttttttgaaaagaattgcctggtacatctgaggcctggtaaatttgacccaaaaattgggctttaattacctgtttaaaagcatacacacaaaattcagttccaacaagtgttaaaactttttaaaggggcaccaaaaaaaaaacacaaaccaatcatttgtactgacaccatgttttgaatggtgccacatatatattagctgatcaaacacagggaaagaaaaaaagccaaagcaagacttaatagatactaattaggctgcttgaaaacgataattcatgttccatacataactcgataaaccacatgcattcttttcaacaatatacatatatatagctaattaccttagtgcgtacctatgtgtacagttatcctaggttggccaaatt

SEQ ID NO: 197203 - DNA, 732 bp, Cannabis indica
tttacattatccgttagctaaccgcaataaatatcttttgaaatattaaacattattatcttatcaaatcgattaataaaatattatcttgcatgcagcaaatccaatatatacttcacattaattaataatatactaatttcatcagagtcatgactcatgcatgaacaataataagaaactaatgaactaggttttgatttttctcctataaatagagcaagcaaatcaagaacatttataaaaatatacattttgaagcaaataatgaagaagtttaatattaatggaatagtaataacgatggtaatggtggtagcggtggtcgggtgctatggaggtactaatggcgctaataattgtaaaaggcccggcgaatactgtaacgtggtacaaggcaagatttgttgtggaggattgcattgcgagggttctgcgttcggagaagatcgaaaatgtgtggctagttatggttgtacgcctggtggtaaacaatgtaacattatgaacgagtgttgctatccctataattgtaacgctatgggctctggatattgtgttcgaaaatggatactaaataatatcgataccttttctagtaatgatcgtgatgatgatcacttctcatcatcaacttcttaaatattatacaatatatagatataatatatatatatatctatattatgtataccatgcatgcatggttatggttacgtaaataagaaacta

SEQ ID NO: 197204 - DNA, 1334 bp, Cannabis indica
ctttctagagagagagagaggaattgggggagagagaaatagagaaagacagaagagcggaggaggaggaggtgatgaagaaggagaagaggagagagagaggggagagtgtgtattttgcaggagaaaacacgcgctggaacgcgccaccgcagtgcgcgtgggaaacagagagtgaccatgtcgaagggaactggcgacgcttgaagtaataatataggagacccacggacgaaagcagttcctgacactggtcatcaccttctcttgattggagcgtgaattgcacgtgcctttcgagtgcttcagatttgggcttgctcccaagtcccaatttcatgtttgttagctttttatttttattttaaaagaaaaaatatttttaatttctttttggtgttgttggggtcttgtttgtgggtcttgtagggaagtgttttttcttgtcttcttcctccctttttaaattagaaaataaataataataatcaaaaactttcttttcctttacccaaatatacaaaagaaacattttattttttgaaaaagagaaaagaatatgttatttattttttgtaatttgggttttgatgtatatttttgtgtttttttttaaaaaaaaaaatagaaaaattagagacataaaagggcaacctaggaatttaatgaattccaactagttatatatgtggggtagtgttgaccaagacaatcaagagaattgggcttgaaaaagttcaccaactgccatttgcaaatatgcaatctattatttatttattatttattttagtatttctttttataatccaaaatgaaaggttttccatgcatagagtaggttgtcctcacttattttttttttttttttataataatatctcctcacccaattcattcacaatttatgtgtcatttgcttttaatcacaattttcatggttaatgttggaggcaatagatttttatttttaatttttagtttatatcaaaatgaaattgatttaagaagtcatgttctaaacctcttatcaatattgaaggtcacatcttgtcaccacaaacttaatcatcctaaacaacttgcataataatcttaatgccaagttaataaagatactttaagataagccttaaatgttaaggtcttactttcttttgttaacaaaaaaaattatttgctaaaccatgactcaaaatttagacttgaaggaacaaaaccctttaagaagtgcaaaaactacttaacccttgcatttaaatttttaataataaaattaaacttcattcaattatatggaaaacattacaatgacatttattctctctctctct

SEQ ID NO: 197205 - DNA, 1755 bp, Cannabis indica
cttatgtatactgaaaatattcagatttctaatttaacactcttgaattctccatcatggaatgttcatcctatttacagcaggtacagagtaatattattcttaattcattttcaacccttgttaaaattgattaattcctgaactgatttagtgaccatggtctggaacttgcagtaacattcttattcaaggaattacaatcattgccccaatctcatctcccaacacagatgggattaacccaggttggttcctttctttcctctccaattatttatgagcattcattcattcattcaaacaaactaacataataacattaacttcaattccaatcacagattcttgcacaaacaccagaatagaagactgttacatagtctctggcgacgattgtgtggctgtgaaaagcggttgggatgagtacggcattgcctttggaatgccgacgaaacagctagtaatccgacggctcacgtgcatttcaccatacagcgctgtgatcgcgctggggagtgagatgtcagggggaatccaagatgtccgagctgaagacattgtggccatcaacacagaatccggggttaggatcaagactgctgtggggagaggagcatacgttaaggacatctacgtgaggagaatgacaatgcataccatgaaatgggcattttggatgaccggaaactacaaggctcatgctgataaccactacgatcccaacgctgtgccggagatcaaagggatcaactaccgggatatggtggctgagaatgtgtcaatggcagccaggttggaggggatatctggtgatccctttactggtatttgcatctcaaatgtcactattggcatggcggccaaggcgaagaagcaaccttggacttgcactgacgtggcggggatcacgagtggtgtcactcctccgccatgtgcgcttttgcctgatcagggtgagaagaaaatggattgtgatttccctgctgattcacttcctattgatttagttgagttcaagagatgtagctacaagatgagttattatgtgtaagttagttgtagaagtccactaccctatactatcaaacagcagcaattccagctcttgttgagtttggatattgatatttcttacttagtagaagaagataagatcatctctgtttttgtaattccacgttgaaagtgtatgcttttcatcaactatagtaatatggtaattgattattaagttacactctgttcgtttatcaaattttgtttgtttaccaacggctgacacaattttattctaaaagcctagaacatgaacattgaaatgtcaaatcatgaagttaacagagctagtaaaaatattttcacatccccgtaaaagatttgactgctaggaatattaacttttggacatgatttgtgagattataacttggtatgtaaggcaaacacgttagtcaaggaccccaaatgagatacaacttaaaatacaaggcaacaaatgaaataaatgacaaatatcatacagtactactccaaggcacaataataagaatttattagaaacaaaatacacaaaaaggttgtaggctatgaatgaataaagtttttcaagcatttcgtcatcatcaacaagaagaaacaatcgacacaaagaacaacaaacctacaccagtgagggactggcgctctctaaacagatcaaccgctctactaactacaagctttaactagattgaatgttacagacatcacaaa

SEQ ID NO: 197206 - DNA, 1250 bp, Cannabis indica
gcctataaatacctccatttttatgaacaaagagagaacaatttttacttacagaaactctgtcgaaattcctagagagctttctactttgaaagaaacaaaaggaatacagagattgtcattgtaaacacttgtaatatactcaaacattactaaagaaggctaatactgctaactcgtagactaaggatcattaacgcctgaaccacgtaaaaaatatgtttatcttctatttagtattttgcactttcttacgctcttattaatccatttctaaaaacctcggtaaataatttatctaagaccaactatgttatattgagttaaaaagatgtaacggtaagtttatgatatcttatccaacttcaatattggtccagtctgatgtatactctatacattccatactagtatactttaccaatacctagaaaagatatactacttatttaagtataaataaactttatcgctgattatcatgtcagtgtaaatccagtgtactgataaatcgcgagaattaactttgaagcatataatcacaactactttctaccgtgatgacatcactgtaaatgtgaataactatatgttctagatttatcagaaattatatgtgaaactataatcatgaaaataacatgtaaagttaaatgacttctaatcttctattgatagaaaataagattatattaaaattgattttagttagggtataaaatcccaatagagatatgggtttagacgaggatgtagaaatttgtaggcactataattttggatttcgaggggttgtgatatggctttacttggggatgcacaaattgctacagtgtaatagtggtatccgatgtcccttgtggtcttcaatggtctcataaggaagtttatagaagaaaaggaaagaaagaggagtgttaatacatgttttgatggggatgagagattaaaaagcaccgtaataatgtggttttcggtagtctctattggtattcaatgtctctagtggtactctgtctctatctatgatagtctgaaatggaagtttagaaaagaaaaaaaaaaacgaataggaagttttgccgtaaaaatgattagaaaagaataaaatttaatataattttataaaaataagtataaatagaaaaggaaaataaaaatcgtacaactagaaaaatgatataaaaagtgtggtgtatggggtgatttcgcttattactctaaggtggtgtttggaatgggttaatgct

SEQ ID NO: 197207 - DNA, 777 bp, Cannabis indica
aaaacattaccgaacagcccctaaattaatcaacgttcaaaaagttgaaaatattatttattttttcctacatatcaattattactgggtatacttaattagtgtactgtaattgattatattccatatatatacataatattaataattagaataccacttaattaagcagcagttaattattttatgtgtaaatattaattaattacctttcacatttgagcgagttcaattaatattatcatgtaaattcaaaattattattaatattaaaaaagaaaagaaaagagagaagaataactgattttcttttattttaattgtttatttttagaatgatgaaagaaaacaagaaaatgaaacagtaaatagtaaagatgacaaaagagaaagaataaagggaaatagatatatatatatataggcacattcacattaggcattcattactttaggacatactttcagtttttgatgagcatgcaagttaagtgtagaaacagtcatcaacttttagtatataatttcaaaaataccataaatgttatacacaaactttatcacataactttattattgctgggtaaatcatccatatgtaataaccaacttacaaaagatatacaataaattatggaaaattttattgattgcataagtgccttatttttatgaaactgttatttttctttcattttgttaatatgaatttcatcttaaatttattaataaaatatttagaagtaactgtgtgagtgacagtcagtagtcccgtga

SEQ ID NO: 197208 - DNA, 2633 bp, Cannabis indica
ctttctaattgaagggataaacttagaagaagaccagccgttgagcacgatgcagaaacttggaagttatatgtagatggggcttcaaatgagaatggctcgggggtagagtcataatggtgtcgcctaacaactttaaattccattatgcattaagattccaatttgatacttcaaataatgaggcagaatatgaggccttgttggcaggtttgagaatagctgaggcgctaaaaatcaagaatcctgcattctttagtgactcacaactgattgtaaatcaaatcttgggagaataccaaccaaaaggattaagaatggagaaatgtttagagaaggttcggaagaattagaaaagtttgattattttaacgccctaaaaattaggcacgttaccctagctgattaagaaaccctaatcccctaaactgggattactaggaagaaaagtgcgggaaatttcaactttaaactaaaatagaatgaaaataaaacttgtaataacattaaactttacaatcaaaagtgacaggtttcgggatcccaaaaagcttttacaaaatattacaagtcttttcactagacgacctaagcggaaaaattagagttataaatgtacaacactggtagaccccaacccgcttggtctagtgtggcccaaacatgtgcatacaccgcctagctctcgcactcatggctaattagagacagatttaccctttcctccacagtagagcacccgtgaatcaagcccagcaagacagtataaaatatcaataatcataaataacacatcacattaacattaattgctatttcccatttgcctgtccgacacagaccagcgtgttacgctcacacgcctatttatgtctatgtgacatagacctacgtgttacgctcacacgtctaaaaacaataaggccttagaacggttcatctcggttctagttaccgagtccagcttaattataccttaaacatataatccttaatctcaatacatatataacatggcatagcatttacacattaataatcactcaggtaataaccctaggccattaaaccgctcatgttagggtaataaccctaatctcagtttctaattactcccatatattattttcaatataagcgccaccatgcataactctacatgctaactactatcttacgtgatgtcttacaaatgtggagattcaaaatccccgggtgctcctgaccaagtgcccgtaatcctagtcacaatttccgagattcacaagtatagggttaatccctaaatccactttcacataatccaaaattggcatttaaaatacagataatcacatagagctcggaacgagctttctaacgatatatagaactcccgaaacggagtccggataataaagttataaggattcgaatatgcgttcgaatctgccctaaaatgaagggcgggccgcggcactccccacatggggtcgcaacacctgggtttaaaccccagaatttcaacagaggcgggtcgcgatgcccagaaagctgggccacgagcatgaaatcaagacaaaaacaccttaaacatgcataatcatccataccaacttcacaaataaagctataacattagagagtaaaataaacaccaactaaagctttaattcacatcagaacaagcatcaaaaaaccagtttatactatatacaacataggctccaaactagagcaagattcaccaaaatcccaacttcaagagcttaaatacctaacaaaaattctcagctcacatcaacaataaaattcaaagttgcataacaaattagaaacaccaataaaatccctaaaattttctctaaaacttaatccaaaacaataaccaaagataatcaacataactaagcataaagcatcaagattaagctaatcttccacatacatgcatacaagaactccaacaccaaaaataatgctttaccaacttaaattccagcaataaaacttaagattaaagctgtagaaagctaccacaagtttcaagtaaagatcaaccctagcacctccaactcccaagcttgaattccaacacaaacttaagcaaaataacaaattaaagagatggatttagagagagagaggggtcagttttgagaagagaaacaaaccagaaaatacttcaattttcaaccaagatttcttttttgttgaaacataaatcaatttaggcaaaattacaataatgcccatagggccatataacacacaactaaacattcaagggcaattattgcatttccctcacatatacactcaaataaattttaaaatattcacacaccaataaaatgccattaaattatccaaaaaatgaatttcgtccccaaactcggttcggtccaaaattcctaattgtgactataccgcgtcgacctgtgagattacacctgaaaaaggacaaagcaggtatactatataataatatagcccataagcacatcataatataaattccacagttttacccttctcgggtcaaaattactaaaatgcccctggctcaccaacgaggtcttaacatgtcatatatcaaattaattcacatataataaattatataagaagataattccacaataatacacatt

SEQ ID NO: 197209 - DNA, 502 bp, Cannabis indica
taatgtgcaataatcttttttttctttaatattaggaggagaaattggaacttgaggcaatatagactgcaatgtttagaaaaagaacttgacataaaaatcatatctattataaagggaaaaaaaatatgccaaacctctctactttgtaaaaggaaaaaataaataaaagcttgaactttatatattttgaatgaatatgaaggtataaaaatagagtatagaaaagtattaaataaaaggaaagtagatattctctacttcaaaattgcttacttatgtggtccaaaccaaaataggtagagtaattttatactcaaacttgaaaggaggagagtattttgagtcccacagtttatgccaaaatcaattctctctttgaagtttaattttggttagtgagtggggattgagttgactagaaaagcaactagcaccaatataattgtttaaattgatgtctcaaataatatgcaactttttaaaattatgtttttaattt

SEQ ID NO: 197210 - DNA, 582 bp, Cannabis indica
gcaataatcttggagatcaccttctaaaccacattgcagaaggagattggtctaaactgagtcactttctttggattgagcacctttggaatgagaattaagatagtcgcattaatgcccttatgcatttcacccgtaacaaataagtcttgaacaacttcacagaaatcctcgcctaccgaggtccaataatgcttatagaacaaggcagacataccatcgggtccaggagcctttaaactccccataaagaagagtgtctggcgaatttcctcataatcggggattttcaaataggtcattctattcattggccgagagatgatctactagaaggtggtccaggcgttccagcagtcccttaacagtattggtgaaaatacttcccaaaaaattggagaattccttgcctatgtctcctcggttactaatccacaccccatccttgatcaatatactctccactgcattatgtccatttctaatggtcgccgtagtgaagaaaaatttggagcatttgtctccctgtctaatccaagatatacaggctctttgctggcagtaagtggccctctgcctaag

SEQ ID NO: 197211 - DNA, 894 bp, Cannabis indica
gactgcactactatagcaaagaatttgatgatatatacaaaataattctagctctgcgtttgcattatctattcataattaggtattttcatcatttatgagtcaattctaatatgaaataaataaaagaataattagcattcttgctctcttaactttttatattactaaagttgtgccttgtatggtatacgacttgtaaataataccccccttttacagcattgggcctaagccctcacaattttattttttgagcaccttcctaaaaggtcttataccgatggatattttttccatccttatataccaatgatccttcccatttctagccaatctaggactttgattgcaagtcaaacaatcctcccctcaaacaaaggagtacattgcctccccttaaacgatcttccatctatccactctccaccaactagtatacttccctccaatgtattggggcacatgccttatatggagcaccaccactacctaaagagattttgctggctaactatttgagagcacaccacctgtctaactgagcacatccacggattttgttgtgataggattttattttttgggcacctttccaaaagttctcataccaatggagatattatccattcttatatactcatgatcctttccatttctagtcaatgtggaactttggttgcacacccaacataattttatcatggaatgagtgaagtggtggattatagttgataaacagatgcaaattaaatattattcatctttttttcgttaatgaataatagaataaaagactttatgttttttttttataataaatcatattttcaattttagttttttaatcgttaaagtgaaaagatgaaaggtatgtaatttgtaaccatttat

SEQ ID NO: 197212 - DNA, 1833 bp, Cannabis indica
aaaaaaaaaaatagttttaaaggttttcaaaacacaagttgcgtttgattagtatttttaaaaaaaaatattaaccaaaagtgaattggtttttaaaatagaaagcaaaatttttgttgtttttaaaattcttattttttgaaaatataaaaacaaggccaaaccagcttaattgtttttttttttaaaaaaaaatctatttttaaaaacaaaaaataattttttaattatcatgccaaacatgcatttatattttttttctttttatgttcttgtcaagaatttaaatttgcatggtcaaacaaattgcatccacaccctgcaaaatttcaatttatcaagaaatctatgtcgtagtcctttattatttttttcattctatttattaaatattggaggaagaaaatttaattcatctatatatatatttattttatataacttgcagcctttatttattttatatttttttctagtttgactagtttatttatttgtatttgtttttcctacaaaacaaatttttgtatttgtttgttctttgaagccgcctgattcctattttccttctttagcctccttagaactaaatcacatgttttttttttttatataaatagattgattataatcacttatacgtactacatagtaactaggctacatcaacatcaccatcaatatgtgatcatcaattacttaataactaattatttattcaagttatttataattttcctataattattggtgataaattaagcaaaaactaaagccaccgtacgtgataacaaaaaaggatgtgtcatcttgttactctgcatttgggagtaaaaacaagggaatcggtattaaaagcacatattgaattaaaataaagcatgaaacaaaatgcaattttttttttggtgaaataaagaagatgcaatttcttttaattaattgcaatgcccctcttgcacgtgaaaaattaattgcaatgttttgcatatatttccaaaattaattgcaatgttttgcatatatttccaaatttttgaaaggcactaagaaaaaaagagtattaggaacgaatagctaaaaaacgactgcactagctaatagtttagtttgataggcagtataaattgttggaaagtaaaaaaagctagtctgtcatgactgatcaagtcttcatattatgaatgctgagaaaatattaccatgaaaaatatgtaatttatgaaatcattttaagggctaagacataaacaaaactaaagaggaacatataactttattttaaaattgggataataactgatgaagaatatactaaatttgtaatgtcctaatttttaggaacatcacttttttttcttttttttatatataaataagcttataataataagttcaactttaaactctaaaaacatgtttaattaaaattttgattttgatatttggtataaataaattatacattcatttaaaactttaattttataggctcttactattagataaactacattaataatgtgtgaaaattaaataccatatataagatgcataggctactcattattaattggttttgagatgaaatctcatgcatcttatcctacacactctattctaactttctcaaccatacgatcctaaattcaaatatatggtatcttagctaaaattaaactctaacgagtatccaatccaaatctaaaaatcgaatccaaaaatacgaagccaaaaagagatgcttgtgattcaggcttagtgagccaaaagagccgttgttagctaaaaaagccacttgtgatcgagacgtgcaagatggtgacttaaaaa

SEQ ID NO: 197213 - DNA, 2166 bp, Cannabis indica
gtaagaaaaatataatcatttaatatatattaaatagagtaatttgcattataaatattttttattggttataaataaatacataagtttaatttttggcagtaaatttataattgtaaaatttttgtaagtacctagaagttaagtattaagtaaattgtgatcatgtagctaattcttaaatttatttaggttatttaatttttaatttttttttcaaaaaatattagtttaaatataacgataaaaaaaatgacaaatggataattacttaatatttaatcctcagatacttacggagttttagaaatataatttaggtattattagcacaaaaaattaaacttagatttttgtttgaaactaataattaaatttaagtatttatgtggtaaattattcttatgaataataatatagtattattttaataagttttagatttgcttatcattgaaaattttagaataaaaattatcaaaaataatatggaaatagaaataaaataggtttttatattattattttttttatacttcaaaatatatatattttgtatttttacagaattctatacaaaaattcatatagcagctaacggagcaatctaaattacaactaaaatttgtatagtaatccgtataaaaattactagagaaactaccgaaacaatctaaaccatgaaaaaaaaagttaaatataatgtataaaataattctctaataaaatataatattatatttttaaataagatattgaactgaaatattatatttgagatgctcagagtaataccattcaagtgcatcaagcatgcgcaatacaattatgacaacaggtgatacatagtgtacaataagtaaaataaaataataacaatagttttgaatgattgagatataaaaataatatattatgaaacgccataatctttttataccaccttatttatttatttttataaaaataatttcttttaacaaagcaatttaaaataataataattttaattttttgataaataattttaaataataattaataaaattgtgcatttagttttaataaataaattattaataattatataaaataagataatatattttataattttattatatattataattatatttttaaataattatttattataatactaaaaaataaattagccgtgcttaaaacgaccatattgtctagtttattataatactaaaaaaaattaaattaactccgcaaaagaggctatatttcctagttttataataattctatttttttagataatatattaaagagtaataccattaaagtgcatcacgcatgcgcaatacatgtatgactaactccaaattttaatatttctacattatcctacctgttctacttctttgactttactaatccaccttctcatggaaaaagccaacttgagatcaatttcctaaaggccattatattaattgatttttgttttattttagggtaatggttgaaaaatcaacaagacaacttcaaattagtaagagcaacgaacgccaggccaacctctttctttgtttttttgccctccataacacgtgtgtagggtttcataattcattacctctttctatgcatatcaatatcatcgatccatgatcatatattcttattttcaatttgatcaatattttcattggtactgttacatcttatattatagtttgtctttagtacttgtcatacattacactgtggatatatatatagtagacacataagataattaatttaatatatataatgttatataattattattattaatgataataataatattataatgtctcgctcccgagatacctggtcatggtttggttttgctcaatatatagtaaattcgatccccacacagatcactaaaaatcatgatgaagaaatttattcaactgctacaattcaacaaaaccatatatatatcagacgtgagcaattacgtgagaacagtgaactttcttttttctttcttaactccaatggagaacagcaacgagttatatatctatatgtgtgtgtgtgaaagaatatatatatagtaattaccaataccaactgcatgctctatagtgccacaaaaagtgggtgacctataattggatcatatatctagctacg

SEQ ID NO: 197214 - DNA, 888 bp, Cannabis indica
tgatttggtaaaataatttatcaaagactcaggaaagaaaaattggccaactcaatgaacacaaaagttatgacacaaataataggaaagccatagaagtaatgaaatattaagatgtcagtgatcattacgagaagaagaaaatatcatcactgaagaaaatggaaaataagagcaaagcatcgagatgggaagaagaaatttgaagaaaacataactttaactgccacagacaaaaaaaatggaattttaactgccacaaacaatattttaccaaccacggctaactatacttatttttaatcaattattaccactaaattttatttttttagaaaatatttactgtaataattaattttcctaatttgcgcatcctatatatataatattttataacatattgtttcatataatattgtggtgcccagcacatgatatggcatcattcagatatcaagaggtaacaattaaagaacaagcaacaaagtgatagaaagaatatgacaaattttttcacgccgaaaagaatagaaaaaagggaaatgggttcacgggtctgtttctatttaaattattaaataagtaattatttttattttgcaacccacatcctgccaacaaattcataattgacaccacatgccttcaagaatttcctccaccaccactctcactcccaacaatcgtctctctctcttaaacaaatattttatcctacttacatacacagaacatttgtagtaatagtaaaaaggggtttaatcttggaccaaatcatggtttggttttggggatgttgtaatgttgagaaaatgttgctgttggttttgataatgttattatgtaatgtggtttggacaactgacggagtgaattttaatacgg

SEQ ID NO: 197215 - DNA, 1478 bp, Cannabis indica
caataattacttggagaagatattaacaaaacaaaataatgagaaaaccctaacctttcaactttcgtattcttttttcttctcctcttgcctatgaactacagaaactaacgaaacaatttatgcggaaaaaaccattgagtcaagggcacaagaatcccaacgtggttatcaataacaaaggtatattgtttttttttctccttcatctaattaataaacaatctagttatatataattttttttctttttggtaaagatatagattgtaattgtgatatggtactggattttggtttcaacatgttgaggttccagcgactactcccaaaaataatgagattttggtaaaaatggaagcactttgaatcgagtggtctggaaaaatcttccctacattcctggtattacctgttgtgtatttatataactgatgaaaggaaaagttgagcgtgatgagatagtgaaagaggtactcatgtggttggtgaaggagcattggttggacaaggagtcaacaattcatagctggtgacaaaatcttattttagccatgcggtgagatacctctctcatatatatgtaagtatattttaaatattccacctacaattaatttgttctctaaaccatgatgattttaataatttaatattatacaatgaagttggtcatttaggaaaaattctaaataataattttgatggactcacttcaatttttttttaatatcattgatagtcattaacattaacattatctctataaaagaaatagtcaataatgtgatgagtgtttaaaatttatatgaatatgatagatttttttttttttgaaagaagcctttagaatgtttcactactacaaaagtgtaattcttcaaacccaaggtaaatatttattacttgatataaactgtaattcataatctttaaattggtttaaaacattgaaaatactttccatattctttattttcataattgtttaaattatttaattttatctaatttcttatatggtttacttttatatcttataatggtcattttcttctaaatatagtcattaacaataatgattacattttattctatatctgtttatgtataataattacattttatatgtatttttggcatccaatgacaggaaaaaaaaaaaaaccttagacttaaaatttattgtaatttatattacatcttagttcttttaaattcaaaataatatatactacatctaaatataaatctaacatgtattatttgtatgatattttatatcaatatacaatttattttgaatacctttataattatttgtaatatatatcacatccatttattaaaaaaggaattctaaattctattataacaattcatcatttattatttcttatttctatatatattaacttatgtattccaattaatatttcgtacatatatgtaattatattattaaaaaattaaaaaaa

SEQ ID NO: 197216 - DNA, 904 bp, Cannabis indica
cttttaaacgttttttagttttttttttttttttttttgcatcctaaaatttattgcttcttttctattggagcacctagggatcaccttcaagtggcagtgaaaagatgccattctctacttgggctttcttgagcaccattatttttggagttatcttgatattctatgtggacagcatggcagaggaaaggtatcttgtatatatatatatattttttttttttccaaggcagctctggggttttgaccactgctaagttgaaatgcttgcttagttttccggcatgtgttgttacttgtttaatgtttccttccaagttctgtactctctggcattgtaatatttttgagtttcttaatcttattaattcgttgatattttatagtgttaatttcaaaacactaatcttttgtaagaaacaaaatcattgttgtcttatcatacataatataaatgtatatatattagcgtgtagtcgtcttttttttcaagtgtttcttaacttttaccccccatttctacaatatagtgctctttttttaattgagctttgttgacaattcgaatgaaatgtcttgcatttatctttgtcatttctttgatgactttcttattctttgtagattacacatggtattctcttctccgaggcatttaatggtagctggaggatgcataattgtgatggagatcatttacaagatggacttctctcttgcagggtttctaatttgctgtctaattttgggctttggtatgtttccatgtttaaatatcatttgtattgtcattacttgctaatgatcttgtgtgagttgtgtcaatcttatcatctccgtgtcacttttcttttgtgaggtgtatttgtttgtatggaaaagttcttaatggttctcaaat

SEQ ID NO: 197217 - DNA, 667 bp, Cannabis indica
tcaaagaaaaaaaacctaatatcctcaaataattttcttgaaacgcatgaaaacttaaaaaaaaaacccttgaatatatctctaaattactaaggatatcttgagattacaagctagaaatcaccaaggttaccatctttcttctctattctttgatttttagtatttctttgatgggattcaaggcttgggacatcattaaagttagtggctaggacatgcaatttatctgcgaatagtaggctcaactacgcagattggattaatcaatatctaatatacatacatgtatagtctcgagaaataacatggtgcttaaataataagatggagaatttcagaaataacatgtgttgaggtttaacctcttgaatttggattcactgttagttttgacagttagtaacttcccaaactaacttaactattttgacagttacagttagttagttgctaaccacatatatatattgaagaccacttactttgagtgagagaaacacaaaaaattttaagggttgagagatgattgagagtgttgttgagagctgtaattggtctctcttaagtttgtaagagagagccatttgagagacactttgtaaggagcaagactccatttcgtttcaagagttttatccctattttgtacctctgttcagatcaa

SEQ ID NO: 197218 - DNA, 908 bp, Cannabis indica
tataaaaatttaagtaaaaattgagattattgtatatataataataaaaaagttgtacacaaagctttatgaatgatactaatctagttatataatttacaataatatttaatttgttgctaaagtatgatatactcacacacactttcctctcaatagtggtgagagcatgtatacttatttattttcaaatagatatataggtatatacgtatatatagatatgttacatgtagagtggcatgtaattaatccatcattaacatttatttaccattatgaaatatgttaactatgtacctatactcagaatttttaccatcaataacttcttagctaatttctgcaaattccaaatgcaactcaaactagttcacatgaaacttaaagagttaccccaaatgcacacactgatgaaaaaaaaaggggaacaagcagtagctataaatagtctatatgcattacgaagttttctcttttgtgaagcataaaatattgatgacttttctgataaataaagctctgtatctacaattatgaattttaacttcttagacctgtaacatcatcaaacaaaaacagtccaaaaatttcttcactcatcaacttcaatcacagcaaaatcaaaatcaaaactaaatattgatcatactctctcaagccaatgtagcttgaatgactcataaatttgagactttttggcaagtaagacaaaattggagaaaaatccaaacaaaaaaaaaccaaaatgaatctaaaattgaacaacagcggtattatcctgagtaacaagtgggtaataagtgacattgagactaataaaccaatcctaattcaagccaacctaagaagcatataaggactttgaagagtgaacaaaaaagacaaaagagccaacctattcaaaa

SEQ ID NO: 197219 - DNA, 1568 bp, Cannabis indica
aacaatcttagtttaacatgagaatatagttatgcttgtaacatttttgcttaccagccaaatgggagaactttgaagctaaaagctggttcagtttgtagcttaaggaccttagccacaagttcaggggtgacacttcggagcttcctgagctcgaaaacgataggtggcccccaatgggactgattcttacgaaaagcgtcaacgatgaaccgagcaatgggggaccaaatggagagcgttgcggtgggtttcgacggttgggatggaaagtgatgtgggtcccatttagagagatcgggcggctgggattggtggccacttcggacaagtccaaggggcggttctaaaagttttggggttttcgctctgttcttagtttaatgacgacaattacatccgcgggtttgggtatccgcgtaatgaggtgggttgaggtcgaattttgagggataggtatgggcctcgataagatatatgtatatatttaagttttaaaattataattagtacaattaaaataattttatgttttaggctttttattgattacattaattagatattttagttttcacaaaaatacttgtgatgatgtatattaataatcatactacttctttaaaaaaaaaaatgacacttaaccgcttattttcgattataattttgtatttattaattttatttactatacacactatttcactagtgtttgttgttttaatgatgtttttttaattttctttgagacgttatttttttttctaaaaatatatatgtaatattaatgggtacccaatggaaattcttctcccgtagggtgattcccttcccgtcctcgactactttaatgtaaacaggtatggggtaagtttaggaagcagaaatgagagtggaggagcaatcaccgccccgatctgcccgtttacatccctagttcttagctcttatcatttatcttctttcttcttcttcttcagatcattatggtaacactggataaggttggagaagaatgcttcttttcaagctcattgaacccacttatacactaacaccattttttttaaaaatgataattacaactttttattacaatctttttgccaacctctacgctcgaaattacatgtaggaatatttttttcataacgatattcgttataattacaatatcatccttgtaaatttttaaaaaattctatataatttatagtactagaaacatagttcttgatattccagtttactacgcgtgttcaaaaaatttcaaacctattttcggtattgtaaattattcgaaatttttaaaaaatttacagtaatgatattgtgaatataacaaataccactatgaaaaataattgaaaaaaatactctaataactattttcgagcacaaaacttaactaagaggttgtaatatgaaattcaccaatttatgtatcaaaatttatttccactccaactaaaacatcaaaaattacactaaaataatattgagaaaatacatacatgcatatattaagagtgatataaataatataagatagtagtaacataacatgc

SEQ ID NO: 197220 - DNA, 1617 bp, Cannabis indica
cacttttcataatatattctatgaattatacaagagtatgataattttttttttataattgtaaatgacgaaagctgaaggagtcacctactgtgttggttattttgcaaatatctaaaatagtaagagagggccctatctgcgtatacaacccctatagtaatcgaaagtctacgggcctatgcctacaatatctttttaacccttatatcactatgcctatgcctatataagggcctatgcatgtgtaacgcccttatatctaaaacatgttatgtattttttaaatactatgcttacttttgctaatcaaagggtttacgataaaagtgtgattaaacagacatttgtaatatttaaaattttaccaaaactaaccttgtttaaacatttacaaactgggatctgatttctacatattttctataatattcagaaagtatcgtcaatgataaaatactaattactctagatgatcaccatagatctcaatcctctaggtcttggtggtcgatctgtacaatattcaccagagccctcgaaacactaccgctgatcagatttgcttttgtaaaacctaaacatatagtgaagcaactgtaagtcgataaattcagtaagaaaaatatacataatacaatcatatatcttacttataactgagcgttcatacactcaatcaaccgtatttaatgcgaaaactaagatctaaacgtttgtacgtatagtatgattgaccataataccaacctaattctaatactctaatcgtacatgatattggtaggattaatccatactattcaatactacctaacatactagatatgagtatcttggtgcaactccatgtacacacatattgctatctctaatatgctagctatatggcaatatcatactattgaacaccctttagtatcactagatatcaatatttaaatgcaactctatgtacattcatactgctatctctagtacactagataaatggtataaaatatgtacatataaacatgtgtatatatgcatctaaatacttttcttaccttaatttctaattcaattgtatcaatcaacctgagtggagctcggaaatcggaggccctaaatcacattaacggtaaattgataagtgtctcgctaaaatactttttaggactaaaatacatgatctgaagttttctatcgataaataggatggaaatactctaaatatcctaaaaacatgaaaatcaagatactcttgagactatccattcgaataacaagaattcccactcgtacttaatattacgagctctaccaaaacaattgggtgcttgattctgcctagacactgcaactcaaaaaacttcgtattctaaccttcttaaatcgaccctaacctgtctcaaaccttaaataaaaaaatttaaacatcaataataccaatattacaggttgtacatcggtcggtttgggcagtttatcctatatattttttaaccaaatctaatgttcgggttgctaaaatttaagtgcaacccacccaatttttaaaaaatatctgtaaaccgattaacggtttgtgtaatttggtcgggttaaccggccgcccaaaccggccaaactttt

SEQ ID NO: 197221 - DNA, 1733 bp, Cannabis indica
tatctacacacaaaatctaaagaagcacaaaacattggagattcacaaaacatgaagataactattaatctggatccactcaaaacataccaccgagactaagtcactgacttgcatcaacaagtatgtacacacaacatcaaatagtgatcgagaacatgcatatattcaacaactattagcaatccttaacatgtttattatacataaaaaatgtaactcccacggaccaaatacactcaataagtgctcattgaattaaagtatctacacacaaaatctcaagaagcacaataatatctataaaaatcaattatgtacaatattgtatagatagaatacaaatataatacataatgagatattggagattcacaaaacatgaagataactattaatctagatccactcaaaacatagcaccaagactaagccgctaacttacatcaacaagtgtgtacacacaacatcaaatagtgatctagaatatgcatatatttaacaatcattagcaatccctgacatgcctattatacatgaaaagtgtaactcccattgaccaaatataactttggctctcacaatccaaacaagaaatatcttcttagtacacatatttaggcaattcgtgtcagtgtagtcgtcaacatgttatctgttagtgcgtgttatgatataatagaggactactccacaactttctcacaataaatggtacattataaccaaatagagcaacaagacttctcaggttctgagagaaatatatgcttgctatatttatcacataagttctgtaaattcataataaagtcaactactcttaatactgaaatagaatatcgcagttgcaatatacaatcaatatcctcgtaacacactacacactctatctctacaaatgaggatgatgtaaatgtccatacaacacctaatcacctataactctcccattatacttgcatttataagggaagaagttgtaggtgttcatatgatacttgattacaaattagctcctcatagaatcatgaatacttataagtggattttatcatccatgcaacattttcaatcggtatcagtaaaactaactattatatgtcacgatgttagtttgtcaatttttaacacatcctttataccataaggatgacaactcaagtaccagttcaacatgcctgcaatagatatcacaagaatatgcatatacttgagtgaatcctagactaccttcaataagcatatatatgtatgggacaaattcaatactgatctcttgttaaaatctatacatatggactttaggcctttcatagcacaccatacttttgataatttaaaatttttcaatgaaatcgaaatattattcacaacaataactagtcattagaaactatatgagacaattcagtctaccgttgatctcatcatgaagaatctcaatacttagaccatataaggtttatcaaggattcttcatctaatagagattatcaaataacagtttattcgtctctagaatagatcaaaatcataaaatatgagcaatgcactatatcaattaacaaaataaacatataaatgcacccactgatctttcacacattattgattaatgataatatttcgatgcgacccttttgagaattacaataaatcactgtccttatgcccgaccataaataaatataatccatttaactcgagtgtccttatgagctaccttctca

SEQ ID NO: 197222 - DNA, 522 bp, Cannabis indica
atatagttaatcttaattccttttcagggttttcattcaatttcaagttcaatttaacaatactaaaattgatattgatacaaaaaacaactttaaagtttaaacctttttttttaacaatgagacgacttcaaaactttttgtcataagaataaattacacaaatatatctcagataggtaaaacaacaaccaaatataccttactttaattataatataatatataattttgttatattcttgtattttctataaaagccgtaaccgtgcagaacacgcgctcagccggaatgtaagcatggttcaaaattatatctttggaaaataataaacaaaaataattagactcgacgcataccttttctttcttctccaccaagaaaattaaaacgcactgctcttctctctctctctctctctctcccttcagaacccaaccctctctctttctctctacaccagtaatcctccattgattgaaaaataaagctttttgtttttcatctaaccttacccacag

SEQ ID NO: 197223 - DNA, 635 bp, Cannabis indica
tgaagagaatgaagtctattgttaaacatgggtaccacagggatttttgagttgaagagatagcaactggatgcttcgagggttggaagggtaggattctttgtgcttcctcatgttgggtgcctgcgtaagacatagaaaacgccccttttgcatgaagttacttttacctcccatgaccagtaatctattgctacggtgttcgtatataattttagattgtcagccctgtttctttgctttgtagattggtttaggtggtaattatccgaagaaggattcctagtttgtgtgtttgtactatatctatggtcattattttttatcaatgaacagatatgtgattagagttttttggaatcgagtcttcttcttcctttgctaataatggttttcaccaaaatattttatgtgtgatctattataacgatgagatgatgtagtaataatagagttaaagtaatggcctatatgtttctcttttattttttcttatgtggcaaagtatacattcttataccttagtgtatcttttgtaaagttgctctttagaatattttcatagttaatattatttatttcaaattttgaatgttgaggtagaataatatcactatgtgtttttagagatattt

SEQ ID NO: 197224 - DNA, 1020 bp, Cannabis indica
ccagcattagagttggtcttggattggtatataacaaaatcaccatattcaagatgagtagaagaatataatcacattcttttcataagatacattaaaaaaaaaacaggagtacttaacatgcaccctttgtataaaaagcacatactactctctagaacttcacatattctcctaactcgactggaagtcaaaaacaaaattcttgcccacataataaatagttggatacaactcaaaaagaataaataggcctacattgctggacaacaaaaggaaacaaagctctttaatagaaaaatctaagactcgattactggaagttggttatctgacatactctgatcagctggaagttgctgggccgactcgctcttgctagttggaagctgctcacctgcttcacccctcaattcagtctcactgaaaagatccctttgaacagggacagtcatttgctgctgggacgaaattacaccagcaatagctttaaacgctgcagatgccttgttgctatcttctgctgtatctgtgctaatgcctttaatgttgggttcaactgatgcctcgtcttcttcttgctttggcggtggcacgaaaaatggtattttacccctctgccagtcatgaagtaccatctttgctgccgtcttcaaatcaggttcaccaccctaaaaagccaacataaatttttcaattgcagctatcaactgtcataatttcttaagagctgcagaactgtcactcatattttatcaaagtttaatgaaaacagtagtcacgtccaagtactctttcacattgatatttaggcaataggatgttaaggattaattccattgaaatgtttgcaggggttagttaataaattatggcaggatccctaacaggacatgcaaaataaagcacagtcaactcaaacacagttgagcaaacagactgaaccttaaatcatgtacaaacttcttcagctaaactaaggtataaagagaaaagagaagaaagctacaaaggaaaata

SEQ ID NO: 197225 - DNA, 690 bp, Cannabis indica
agatttgttccccaattgatgtatagaggggttttcggtaaaatgatgggggctattttttgtggggtttttttttttactaggtaactttttttgtactatagagcaacaccaattgtcagccttaattacggtcaaattaaaattctaaattcttcttaatagaaactaatcttttccatctttaatacaatatttttccaaagtttttgtaaaatggtcaatactcatgaaataatcacaagaacctcacaagttttttgtggtctcgttttatacacgaatttgtattacctctatagatgagtttaagggtaacacaacactgggccaggcaaaatattttttttgatatggatgtataactacgtaccaatatccaataaataccaataaccatttatgatttttgaaaaggcttaactttggggtaaagataaggccatttcttgtcttgaattttaatgaaggatgttctcatttcaagctgtaatttaatttatagcatttgatttttcactctttatcttttggtaaaaataaaaaatgagatggaaaagcaggaatgcaggccaacctaaggctccaacggtactattttttttggctgcattattctgccatctttgcccaactttcttttctggcttttaggtagtcaaaaagagtcagaaacatttaggtgattga

SEQ ID NO: 197226 - DNA, 1099 bp, Cannabis indica
ctaagtctaagcctaagcctctaagtttgataacacactctctctctctcattcacatgcccacataagcttctatccacacttgagatttgtcatctttgattcctactttgtaactttaagggatctatatcagatcccacctatagtgatctaaataatattatccctcggtatcagtataactaaaaggggagtttgtcattacccgctaactaaaggggccaaacctctataaaaatctttgtgttctttatttttaagttctaattgtgtaacacgtggcatacataagattaatatgactccattgtcggttggccactttttggggttgacatcatctatacacgagctaggactctcatctttcaatgatagcctattgtagaatagacacgaaatgttcttcatcccacatcaagattcaacgtcctttagcattcgataattgcaaaatttattggtgatgtggtccatcttccaacaagaagtgtacttggctttaacaaccagatcataatcatcctaatttttgtgttatgatccctctatgttcatcaagcgatccaactcttggtcctctgacattgcaagaattgaaaaacatggaaaccaaggaactaggacccgcactaaaatatattaagggcacgggagaatccttccaaataattgctaggatatgttccttctggaccctaagtcttggagtcatttcctcagggaatgtaactctcaaaagataaattgaaacatagagcaaagaaaaataatagcaaatgttgcatggtctgagtctgtaaggatcccagataagatggacaagatgcaacagagccctaagaaccctattagcatctgttaggtctatgattcgaatttgcttccctaagcatgggatggtctatatgttcattattcatcttccaagtacctaaattttccaaccattaataagcctaaagaccgcccttagtggcagaaaatgcaatcgacaaccattaacaacccataaaaaaaaatccccaaatccacaaacctagaaattaactaacaagaaaagtagttagaaaataacaatgctaaaaatcattaa

SEQ ID NO: 197227 - DNA, 501 bp, Cannabis indica
agtgtagtgatatgtaaagagtagtagagagtaaatgtgagataaggataaggtgatagagtccatagtatagttaggaaattaatttgagtagttggcatagtgcggaaaagggtggcaagtagagagtgggaaaagaatgtcaacttttccataataaaataaaaaatatttcaggtaaagaacaatgagacgacgacggatcctggcatcacatgcaaatatttagcctacaaaatctatattattattagtattatttatatttatattcatttaattagagaatagattttgtatccttttaaatgtgaaatctaaaagtatttttttgtgcaatatttaattattaagttttatataatttaatttaataatttttatccattattcgagctactatcttattgataatgggaatttcaattacgagtaggtcatggtgcgaaaaatgcactattcgggcatgtttctaagtaaacattattggttagtccatta

SEQ ID NO: 197228 - DNA, 553 bp, Cannabis indica
gagctgaaacatatcatatctctctctgaatgagcaactcgacccatatctcttaaattagaagtacatgtaataataatacattattataactcatcaagttgaagttgtgatcacatttatttaaatcaagttctcttctatacatagtacgtacacatgggagaccatgcaatattaattacattataataaatagatatttattgaaaatatggttgaattgtttcaaccaatttaaactcatcatacatatatatatataagtgttatataacctcatcacttggtgtgtgtgtatatatatatatagatatatatttacatctagagagagaaagaaagcgatggatgaaggtgaaggtgaagctgggccttatttgttatgggaagatataagagtggtgacatcaagaaaaagaaaacaagttttggtaaacaatctttgtggctatgccaaacccaatcgaattatggctctcatgggtccttctggttctggcaaatcaaccctacttgatgccattgctggtaatacatacatacatacaca

SEQ ID NO: 197229 - DNA, 2229 bp, Cannabis indica
atctactattgatttgttgatccccaaaataaggccaacatatcattggtactcagactatactctccaaagttgagttccaaccgttgtgggtcagaaacccacccaaagttgatattgttttgatgttattttctgttatttttatgtagttttcttattgttttcgtgttgtttctatagaaaattcaaaaatattaaaaaaatctttaaacgtaaaaaatataatttttttacgaaaattaatgtttcatataattattcctaaatctaattccatagtactatagttttttgtcaaagaaaaggtactggtatataagagggccgatccaagtataaagaagcttggaccattcacaagactttcttattaaaagatcctatatttttttttagaagtttacaataatatacatttttatatttactttacaataataatgttattaatattactgacgtgctacgttagtcaaatctaatatttttgacattttttaacgttttcttgtttttttcctgcatttttaaaagattttttttggttactaatagtgttgataagaaaccaataattagtttcttttatataaaaaactttattttttatatcatataatttgggatacattttggttactctttaagaacttatttgtatacatcttagtaactaattagttatttttaagttatataatggtatattataatttaaaatacatttaggtcactttaaaaaatatttttgaaattaatgaattgtcatgtaatataacaagctactatttttacataccgattattttatacacttttttgttattttgaaagctaattagttatcgtataatttaattaatttaattctaaaataaatgttaactaaaactttaaaaaaattataaatagtaactaatcactgtatcagtaattaaataattttttttttctgtaaatagcgaaaaaacatatgcttctcataacttaaaatgttcacattgaaaagtaaatcacaatgttattttttttaggctcatacaagtaacgacgagatcagaatttatttttaaagtttgagagaagatagaaaaataaaaaaatagacaaagaagaagaagaaaatgagagtaacataggacaagagaaaatggagaaaaaaaaagtataaataggaatattgaaatataccaatacaaataaaaagttattgaaacttgaccaaattatttttaacaactaaataagaataagtcattttcaccattttttaggctaattaacaattcccccctccctcgaattttgacatataccaaattatgtcccatgaacttttttggccgttaaaaattttctctagattattgagattgttagatttaaagacttttgtctaatttcattcaattttactgtttcagtgattgtttatgtactaaaccatgctccccagattttgatatctaccaaatcatgcccttcaaactttgatatgtactaaatcatgtcttctgaattttcattcatgttagagttttttttaataaaattagacaaaagtccttaaatctaacaatgttaatagttcaaggagaatttttaacggccaaaaaaattcaggtagcatgatttaatacatgttaaaagttcattactaattagcctttttttttatctatccgtttatatataaatctagttccatattggtatagttttttttttcaaagaaaggagaccgtatcaatcattttcattgaactttctatttttatttatgagtagtactaatcaagtagactcttcaactgaaagtcttttcggttaaaaaccaaagcttaaattattcaacaagttgttctagtcactttcatctatataatctataactacaataattttagtccacccatattattttataaaaatactcttttactattcaactattatttttaagacaaatattaattataaattaaaaaattatataacaataataatagtacgtataataattttggatttatattttacttcatctttcacttctaatttagtttgatgtgtaacttattgatagaaagtatatttatatttatatatattgatagaaagtatttttgtggatactctctcaaatagaagccctccttttttttttctttatactgtaaaacaacaaaaaaaaaaaaaaaaaaaaaaaactaaaaacgaaagacc

SEQ ID NO: 197230 - DNA, 783 bp, Cannabis indica
ttttgtttggtgagtttccgaataacttgtatgatactcatattgtcctcactcctaaaaaatctaggcctgaaactatgagtgatcttcgccctatatctctatgtaatgtgatctataagatagtctcgaaggtgttagccaaccgactgaaaggtgttcttcatcatatcatttcaaaaactcaaagtgctttcattcctgacaggcttattactgataacattttaatatcctttgagattatgcactatctaaagaggaaaagctcgggcaatgagggtgttatggctattaagcttgatatgagcaaggcgtatgatagggtggagtggggttttcttcaggcaatgttaaaaaagatgggatttagtgatcactggattcagttggttatgtgttgtgttaggtcggtgtcctatcacattctttcgggtggaaaggaattggatcctattgtgccaaagcatgggttacggcaaggtgatccgttatcaccttatctatttcttctgtgtgcagaagggcaatcagcactaatttcagattttgagaggcaagggaaacttaggggctataaggtggctcgtggggctcctgttatcacccacatgttttttgctgatgacagttacttgtattgtcgtgctactgagaaagaggcccataatgtgatggagcttctccaatgttttcaacttgctttagggcagcaggtaaatttgaataagtcatctacttttttcagtgctataataccggtgtggatattcgtgcaagaat

SEQ ID NO: 197231 - DNA, 1114 bp, Cannabis indica
tatatattaattaattaattataagtacgtaccacagtaggagtgagttgtagagaggtatatgcctttgaataatccattatagtccatcgtttaaatgattggtttgatgttgtttgtgaggtgagaggcatacattcagttgcttcttgaactttttctagcggagataactcagagcgtatgcatttcacttcatgttctttcacatctaaataataataacaattaaaaaatagtgaatagtattagtaacatggaatacatgtttctatagagtttattagagtggttattatttcattataattttaataataataataaaattaaatataataaattcaattatatttcttaaatatcttttaaatttttttatttaaaaaaacatattcaattaattttattaaataataaaataaatatataaatttagatattttaaataatataattaaaggaagatttttcttgagtgatgaattgatgatgattcattcagtggtgttgccataattagaagcggctggtgagaactgagaagcaatgtcattaaatcaacaggatcaccaaagtaggattaccaaattaatttgccttagtttcaagatatcctagcctaaacaaccttaaaatatcgtacacggttcacctatattcaatttggtgatggcccaccaataagtgggctactaataaaaagaaagtcattatctaataaatattaaagtacttattttcctttaaaaaaagtaaaataaataaacttctttttttggcatcaaatatctttttaattaaggttggtagttgtaaaattacattttctttttttaatttactattctttatgattttttcttttaaaaaaaatatgacattcaatttcaatatccatataaatgcaaataatattgaaggaaaagtaatatagtacgagaatagtaaaccttcgtcaaaaggatgtagtgggaagtaaataggagactcttctagctctgcatttgtgacaagctgcacatatttttgaaaatatttagaaatgttttaaaattcagatatagtatattaatagcaagggtgctactgcttaacgtgccttttattaaaa

SEQ ID NO: 197232 - DNA, 1232 bp, Cannabis indica
ttaaatgctattattaaatggagtagcatcggtttggctattaagtttgtaagtaagtagcctaatgctccatccatgcattctgaattcggtgaattcttttcactctttccatctctttctctgtccttcttcatctctttcataatgtcaaacagaactagcagctcccgacacgatgattacattctcatgttaccttttttagctcatggccatcttattcctttcttagccttagccaaacaaattcaccaaagaacaggcatcaccctcattatcgcctccacaaagctcaacatcaactacctccgccggtcctcatccaaccaatatgaaaattcagactccggtattcatttctcagagctacctttcacctcctccgaccatggcttaccccccaacactgaaaccaccgagaacttgtctcttgcagaggtaatcggcctcttctacgcttccctatctctggaaactccttgccggaaattaatccacgaatccatcggtaaatatggccggccgccgctttgtgttatctccgacgtgttcatggggtgggcggtgggcgttgccaatagcttcgacaccgtcagtatcactttcacgacctgtggcgcttacggcactgcggcctacatgtctatctggctcgaactccctcaccggaaaacggagtctgaagaattcgaggtcactggtttcccgaaacgctgccgtttccaccgttctcagttacatcagttcttgacagcagccgacggttcagatcgatggtcgagattctttcaaccccagttaaagctgtctctgaaatctcatgcctggttgtgttacaccgtcgaagaagtcgaaaccttcggactccaaatcctccaggattacgttaaacgccccgtttggtgtgttggttcgcttctcccccaagctgtgttaaacgacaagtcatgttcaccttcttcttctttgagtttttccaaacagagagtcagtaaagaagttgggatatcagttgcgaagttgttcgagtggctcgattcacaagaacccaaatccgttctctacatctcctttggttctcagaacacaatcggagcaacccagatgatggaattggctatcggactggagaagagtttgaagcctttcgtttgggtgataaggcctccattggggttcgatttgaaaggagagtttaggcaagaatggttgccagaagggttcgaaga

SEQ ID NO: 197233 - DNA, 1439 bp, Cannabis indica
aatgaaattttttttttttttgaaggagagaatgaaaattttaaataaaaaaaaaaatcacttttaaaattttttttaaacaatttttttctttattatattctggactccaactctaacttagaccataatacacatactccaacttcggccccaatgccggactcggaacacaatcctggacccaaacacagaactcgacccgacttaaataaaaccaaaaaataaaagttatgaaacatacttttatttttaaaaaaaaaaattaaaaacaaaagtggccatagaatgcatttttattttttaaaaataaaaattttaatttttatttttgttgattcaaaaattaaaaaaaaataaaaaataattactaaatagctctggttttggtgcggtcctacgtaacagtagtggtaatattattggtgctatgtcgaggcctttcccaagtacttttaaaccagaaatcatggaagcgatggctcttatgtatggtttgcaatggcttaaggatcttagactatctacacactttatacaggctgactctcttttagtggttaaaggattgcaatcatctcgtgcctccaactctgactatcattgtctgttaattaatatttctgttttagtgtacaattttcctggagtgcagatctctcttgtttttcgatctgctaatattgctgttcatttgttagctaagtatgctctttcggtggactctatctgttcgtggttagagggtatccctccacctcttaatgcttgttgtattgtcaactcttgattaattataatttgcattttttctacaaaaaaaaaaaaaaaaaggaaagtcaaatttgaaaacgttgggaccaaatctgtaataaaagaaaatttagtgaaacatactataataacttaaaagtttgggggtaaaaataataaataccgaatcttgtgtgaattagggtttagaattgggcacttactcgtcagtcagagaaaaaggaaaagaaaagaagaggcgaaggaagtaacagcgggagagatgtcgaagaagaatagcctttctaagcggaaagtacagcacgaatttgaactcaaaagtaaatttttctctgcaatctctctatctattcatgtatctatatgttgtttctgaatatttactcatattaatcattctatactgaacacaggggagaaggaagaaaaagaaaggaaggcaaagaagcttcatgctaagaagaacaagatgaaagtgagtccccatctatcgattgcaataggaatgagttcttttttcttttctttttttgtttttataagttacattttttcgtggttgaattccaacaagagtatctgctaactgaagttttttattttaatttttttccattatcaaatgcaatttttctttgggtttatttgattgggtgggtggttat

SEQ ID NO: 197234 - DNA, 1044 bp, Cannabis indica
ttttttttttcctatttactaaattcacaaaatgaatcataaaaggttactaagtaacctttacttaatcaaagggcaactgtcatgatatggtgaagacatccaattaaataaaggtaaattactgaaccacccccatcactaaacctagttcagaaatcggcttaggggtaaaatggtccacaaccacaaccctgccaacacaaaccatttcaacttacattacatattttctatcattaccaaattctatatttccccaagtgactaaaatatcctccgttgtatttttccatcgtcaccgagctaaaatcacagagatagcatattttacatttaacataatcattcacattaaacgtcaacaataatgataagaattataaaattagcacttataatctcactaatccatatttaaatattgcggtcgctacatttttcatgcaaaagcctcggctagaaagtccaacagtcagatcaaacaattgcaagatgaacatggtaacatggtatctaacaagaatggaatgtgtgatattgtacagcctcggaggacgaccattgggctttatctcatgtcctatctacaattccaacaacaatgacttcagaccataatgaatttcttcaaaaagaattcagcaaggatgaggtgtttcatgctttgaagactatgggaagtgataaaagtcctggaattgatggaatgtccgcaatgttttaccaacataattgacatatagttggagattcggttacaaaggttgcgatagatgttttgaataatagtacaacacatgttgctttcaataaaaccttgatcactttaattcccaagatcaagaaaccaaggacaatgaatgattttagaccaataagtttgtgcaatgtcatctacaaatttattttcaagatgttggctcttcatctcaaagaagtcctcccatatgtaatttttgtaaatgcaaagttgcttttctcccaaacagacaaatcacagataatattcttgttgcttttgagctcattcatagtatttaa

SEQ ID NO: 197235 - DNA, 1521 bp, Cannabis indica
ctataatggaatcaatactaaattttgtagtaacatctttcttaatacaaacagttaagcaattattcagaaagttgatttccatcttgtttctaagcttttataattttctgattgagaatccatattttgtagttctcattgacacaagaagagtacctatcattaagatgatacataattgcttttctttattttcaccaagccttgactcgatctagaaatggagaaaaaaagaaaagcctaaaagagattatttgtttagtcaagtgagttagtgtaatagtattagtgagatgacaaataggcttagacagaaaaagaataagttttggctcattttaatagacaaaataacatatgccatgacagtccatatttttttgaaatatctaatagattataattccttttattataacttcaatttaatatttttttattcaaaaaataaattcaataataaattattttttaaaaattataattaatatatatgtatataattctttttttttttaaaaaaaaaatagggtcatggccactttcgggctttccttcactaacaaaaaaaaaaagtctattttttgtgacaatattttagccataatataatttttttttttaactaaatgttgtcataataaaaaattacttatgactaaaacataatatttagatacaagttgtcactaattttattttagtcataaattacgactacaaacacatttaatcacgataaattatgatttttgtgactaatacctttaaccacaaaataatgatttataattagtcacgatattttcacttttaatcacaaattttattgtgactaaattacatatattgcatgtacgtacacatgcatatgcaactatatatagaaggaattagaaacacaagagaaaccatctatatatcttaatatacatccaataattaataatgggtttggttgtagttggtgtttttatgattattgttatagtgattattcatgaatattggtggggaaatagaaaggcaatagttcctaagtggccgatattggggatgctgccgaggctggtgtgtaaattcccatgccttcatgagtatgcaacccatgttttgggccaaagtggaggaacatttgagttcaaagggcctttgtttagtggcatggatatcattgccacatctgatcctttgaattttcaacacatcacaaccactcactttaccaattatccaaaaggacaagcctctagagatatctttcatgatgttcttggagatggaattatcaattctgattttgatctttggaagtttcaaaggagaatgtttcagctctccactcgacaacatactttaaattttcactcctttgttgcaaaattctctccatcagcatctcctcaatcactttcttccatttcttcatcatgccactcaaacccaaacttcaggtatctataaatatattatggtgttaattactttactattatggtgttaattactttacttaat

SEQ ID NO: 197236 - DNA, 610 bp, Cannabis indica
caaattataaaataaaaaaaaaaaaaaacgcatcgttctttcattttccaggaaaccaaacagcatcccctcgtaagtttgtaactaaaatttcagcacaaaaaataaaactaaaatcaacaaaatactaataataatgtaacataccttctgaattagcatacacttttctgaacaaaccaaacaacaaaatcaaccacattaaagcagaacccgaaaccaccgagatgagtcttcgccttcgttccgtcatctccattccttcaaacttccataaacatcttcttcatacaaccaatcccgtaaaccgatcacctacaggctacacactttgcttcgttgaccgaatcgaattccgtaaaaaccgaaaaacaaatctccgtttcacaattcaattttcaattcttctactaacacttccgtttcgagtcacagaatacgaaattggaaagagaaaatgccgattaaccaaaattacatggatggataaaggtttgagcttcgtagaattttctcaaagctgctcaaggagaaggaggacggaggagaagtcgtcgctctctctgcgttgtcagaatttagtcaaagtttcgacctttctttgttacaa

SEQ ID NO: 197237 - DNA, 627 bp, Cannabis indica
tgtagtgtaaatggtctgtggcttactggtattcctttgtcagtactgtcaactttaaggcctaggaaaaaacgtaagtctccaaggtccttgaatttgagttgagcatcgatggaatcttttaattgtgctaactcgtgcaagttgtttgtggcaacaattatatcatcgacatagatgagtaaggctatgaatatacctgaagtatgttgaataaacaaggaatggtcaaatttggaatgatgaaatccatgttgaatgagagttctactcaactttgcataccattagcgagaagcctgttttaaaccatagagacttttttgtaatatacatattgcattaggaggaattgttcctttcggagtgtatccaaggggagagttccatatcgacatcttcttttaaatcatcatggagaaaagtattcttaatatccatgtgatgtaagtgccaatttttaatggcagcaagtcctaaaagcaacttgagtgtattgaacttttccactagaacatatgtgtcaaaataatctatgccatgttgttgattgtaaactttagcaactaattgtacttttaatctttctactgacccatctgggttatatttaatcctatataccca

SEQ ID NO: 197238 - DNA, 1100 bp, Cannabis indica
tatatatatgttttaacggtatgctaataaatagtatatcttctaaataattgaccaacaatattatagcaattaattttagattttagtccgttgatgcaattaattcttatattttttagttttcattctaataaaatttcaatttttattttgttagtaatttttatacttttttttgtatgtttttgtcaatgtaggatggtggtgagggtaatggtttagctgttgatgtattgggtggtgttaatgatgatggtgctgaagtttataaggtgactttatgttttttttgttttgaaatgtattatattgtgtgtttttaaatttattatatattagtatcttttgttgtttttttctcaagaaataagacaaatatcagatgctattgttaatgaagttactgatcaggctgttgatgtaggtgctgaggatggcatggataaggttttgttttttattttttatttgcaattattttgctttgtattttgtttagttgatttagtagctaatatgtttctttttcatgtaccgtttttcaaattggtcacgattgttcaagttttgatattatgggttctttgttggtgcagcctgaaaatattgaagttttgttggaagataaaaaagtagttggagatgataatgttatggaagcttctaaaaggaatagtgagagtactgaagatggtattacatctgctgagatgttaattatataagagaaagtggatgctgtttgtcatgattatgagttgaagaagagtatggtatgtgatttgtatatatttatgtatgattaattttttaattattattaatttgttttgacattttgttatgagtttttcatattattttaggaaaaattcaaagttattgatttgggtagtgctgatactccaagtgtggatttgcaaggtgttattataattgactttggtgattcgtctagaaaatctgttaagattggcgaaacaaagtatttgaaaggtctacaccctttcaattctgagttgcttgatccaccgcattgtcttcaataagattcttttgatgagtggtttcttgaagttattcttatattattattt

SEQ ID NO: 197239 - DNA, 3129 bp, Cannabis indica
cttttgaacattatatatttttttcatattaaatcccttcatgtgctttcggaattggaattcccatagtgatattttaaagtctttcttcatgaaccatttgctctaaagactacataagctaaccatttttaatgttccttacttatatatagttatgaacacctcaagttttgaacttacaggatctgttactttaaacacttgagatagatactattgactatgagctaattgtttccaacttttggtagttgccaagaaaattccaacttgaagagagaaagaagaggcttgttttcagggcgtactaactacactaaatcttccactgactagtgatggatgagtattttgatcacttgctttattcatcatcatggctagataaagatttggaggaaagatcatccgagatatgtagcgaatctgatccaccaaaaggcttgcttttcagctcagttgaggtcaatgaagatgacaacaacaattcacatacaactttaattggttcaaatggcagtactgagagtttggctactcaagatgcctcttcatatgttcttgattcagagtcagattatggtcttaacatggctttacttactgatgaagctcaattacaagatagtcatgaaaacttcatagaacatttatcaaatggagtggtaaatggaatctcagaactcaaaacagttggttttcaatacaatatggctattccaatgcctaattcacttagtctcgattcttcgaagcagaatccggtgagtcagcatgtttcaagctcttctactcttccttactttgaggttggagatatgcaatccaatactcttgaaccatctgttttacagtgttttgataaagagtttaaaaccatttctccaattccacatttgtgttctcatccatcttttgagggtgtctcttcattgtctcctgatatggggcaagatggaattggaggccttggtatgcaaggggaagaatatgctattgataatgatttatttgctatggaaagccattcaagtaacttgtcagcatcaaaggtatatattattagtatgtggagtgtagagtattatgttatatatattttatgtagttagttactaatgtcatttacattgctcttaacatgtaatagggtgcacatgacttgccaaattatcccttatcttcttttgcttctgctcctcagatgataatgacaacaactggattgcaatctctatcacaggtctctatctattattattattctcatttatatattgtatttgatatggtgaaagttagaatatcttagtctaatttgttgattaggcattaagtttcattagttgctagttgaaggagataagtacatttgatgcattgtaaattggcttgtgttttcccatacaggccccatcaactactcctgctgcagtagaatgtagtccaactgcaaaacctcgtcccagggcacgacgaggccaggctaccgatcctcacagcattgcagaaagggttagttagttagaaagattaataattttaaagagtatttggcttgcaaaatttgaagtttccttgtcaaaggaatttactttgctgcaagcttaatcaatttattaattacttctttctttcttaaatctttttataaccaactatttgcagctgaggagggaaaaaattgctgaaaggatgaaagggttgcaagaacttttgccaaatcctaataaggtaaccatttcttttggttatctcttgttaatgagttgggcatttttgttatgttaacacatttttagtggagatctgattatttttcaccttggtttattgtagactgataaggcatccatgcttgatgagatcatagactatgtcaaatttcttcagctccaagtgaaggtatgttaaagaaactagttattctattgacacactgatgtacaatcacttaactgatcatgttaaaaatgactcttattgataggttcttagcatgagcagacttggaggagctggggctgttgttcctctcatcacagatggtcaggctgaggtatgatcttgttaaatcccaatacttattaattgcttcataactaatgataatgcttttttttagttttgttttgattgatgagatgatctgaataacattagggaggaaatggttttttactaaaccaatcatcatcagctggtgaattaggtgaggttgtttttccatctgatgaaatcgtgttgttcgaacgagagctagtgaagctgatggagtccagtgtgaccaaagccatgcaatttcttcaaaccaaaggcctctgtctcatgcctgttgctcttgcttctgccatctccaccaaaaagagaaatgatcaatcaccaccctcttctgtgtctcaggattacaccaagaaaaatgacttcactaatgccaatgcccccatgaaaagtccaactacagaaccagaagatgggactaaagtttcttgcaaagccagacatacttaaaatataagctttttttgcacatctttctagcttctatacatatatttttatgtatgtatgtatgtatgttgttcttgttgtaggatttgtgaacttagaagagtggagatttagttggttttcttctttctcctttttggtagtttcattttctttacattggaagtttagtagcgttatttatgtaaagatttattatgatgcatttgattatcgatatttatgtagaaaaaaaaaaacaaaaaattgaacaagtttgagaaatgaaatacaatacaggacctagtgtgctaatgtatgtgtgtacgtgtcctctaaggagaggttattacaaatgataataattaaccagtaatattaacatgaaaaatagtgtgctaatgttggtttaacatactgtagttgtttgaaataaaagatcaagataaccaatattaacagctatgtgaatattggaaggggaataccaaaagtgctagctaaactacaatatattttgcaaagatgagggagcaagagcaacaggtgtggagagagcgaaaaaaaaaggccagtttttgtgaggagatactgaatgtgcttggcctagctagctggctcaacttacaatcagct

SEQ ID NO: 197240 - DNA, 972 bp, Cannabis indica
tgctagtggagaaaatggtagctagaatctgaacatggagtactaggcatttgacttttacaggaatagtggggctcattaactcggttttgatggccattcacttgtattggagtcaaataacggtgcatccaaagaaaattgttgttgagattgaggccatttgcaggagtttcttgtggagtggcagccaccaacacaaaggggttgttgccgtagcttggaggactatttgtaaggagaaatcaatagggggtttgggcctcaaacaggtaactgaatggcatattgctgctatgtttaaatatgtttgggtcattgataaaaaagaaggtaatttgtgagtgaaatgggtgcattgtgtatacataaaagagcaatcttggtgggattataaagctaaaagcagtgatagttgttattggaaaaagattgtggcaataaaagataaagtaaaagagatctatgatttagaagaaagggagcatttgactaacaagtatgtcattactcaaggctatcgaaagctcatcatagctgagtcaaaggaatattggtcgagtattgtgtcggctgaactatccaaagcatagttttattatgtggatggccatgcttaactgactcaagagaaaggataggattgccaaacaccaaccagaaattgataaaatctgtctattgtgcagcaatgaagaagaatcaatggaacacttgttttttaactactcttttgggcaggcttgcttgaatcaagttcaggtgtggctgaactggaacatgtgcaaaaggtcgctgccaggagtaataaaatggcttggaaaggccaaaattagcaagttcgaagaggtgtaatggctgctgcacttgcagctttcgtgtatacattgtggtgctcccgaaattcaattttttgggaaaacaaagttgtaagaagtgatgtaatcacagcacaagtaaagaatattacaa

SEQ ID NO: 197241 - DNA, 1016 bp, Cannabis indica
aataggctatggtgagggaaatcacttgctggctggacgacaaacttgagagacaaaatccttggcggctgcttagaacacataaccccttgagattttcttccttcatatttttcctaagtactccatactttatcgacaccaagtcttcattactaaatcaccattaacttaaacagttaccataaacaagagaccactctcttttcttgccacaattagtttattgttcccaaaaccaccgtccttatcagatttgtgaatattgggtctcccatgagccttgtgttcataagtctcgatatagattttacttagaaatctattgttgtattattgtccacacactcttgagaacataactctggagtgtcagatttaatcaataaaaacaaaagtagacgtagtttcattaccatcgcgacatgagacgaactactataaatccctggtatcaattttatttattatagttttatttagtcaaattaatttatcgcagtccacttattttttatgatgtttttaaatcagttgataaaaaaccgcatcaacatgcactattaattctttttttttactgtaaatttgtgttttgcagtaataagctttaattctattactgcagatcataacaattgtaattttagtaactgaaatttaattaatatattaacatttgtaaaaacactatttttaaatcttgatttaaaatttcttactaatatatataataaaatttaagtacggtacatacatatagatagcaaatatagtaatttttcaattattaatatataaaacaaatcaattattaagtcttaatacgacgagttagggcatcgtgggtatataacttgaatcaatgtcaattactgacatttttggtgtcgttcataatgaataataatgtgtaaatagagagaaaagagagtcaacgatatttttctactggtgcccaatcgaatcatacacggaagttcgcttgtagggttttcacgatattttctcttaat

SEQ ID NO: 197242 - DNA, 780 bp, Cannabis indica
attcgaatctcaccattgacaccgtaattgtttcttaaggaattgcagcgaaagaatcttgatgccgcgttcttgatcgattaccaagctctaatttacgggaaaattacaattaaagtgtagaatcaaaataactaaaacttaaataacaaacaattagcaatgaaaagattaacaaataatacacagttattagagattaaaatagggatgaacaaagtatattaaccataaacgattaaagtaataaaacaataaaatcaacaccatgatatatactagttcaaatcttatagatcgatgtaatttatggctctactttagttctggaacaccaccaaaaattatctttattgattgagcaagaacatggtacaatacagtcaagatcgattgtctgttgaattctctcaaagtgtttactctcatactcttacccaagaatcttcttcatctacagaagattcttcatataaaactcatagtcaatctctttcttttctctgtaccactttcatttctctacctctcaatctttctctctcaagattgcctctctcaactcatctgatctccttcttatcaaaatgataagtgttggtggtatttatagattagggatatggatcccaaaaatggtggttgcaaatgctaagttgttatgttagttacgacttaacaaatttctcgtaataatatatgcacgtcatcacaagaagaagtgcttccaaataagatgtacgcttcctggaagacaagccaaagtgtacgctgaaggga

SEQ ID NO: 197243 - DNA, 3050 bp, Cannabis indica
ttatctcgtctgctggtggagaaagaagggcgaggcttgctcaaaggtttcaaactaagaagaagaggaggttcggttactcatttaatgttcgcagacgatatcgttctgtttggagaagccagcattcgtgaggcgagatcttatttggattgtttaaacaactactgcaactactcgggacaggcaataaacttctcaaaatcttcagtgtatttctccaagggggtttcaggtagaaaggctcaagaaatagctcaaacactagggatgagaaagatgaacaagaaagcaacttatcttggcctccctctcttcagatcgaccaagagaacggaggatactaaatttttgattgaacgggtcttaaagagaatccaaggatggaaagttagactcctctctactgcggggaaaacttgcttgataaaatctgtggggtcaagtttatcaaattacgttgcctcctctgatgtaattccattaaggacggcaaacaaaatagataaactcctacgggacttctggtggggggatactgaggccaaacgcaaactccatctggtggcatgggatcgtctctgtaaacccaaaagtgtgggaggtctgggattccgcaccactgagattatgaacaaagcattcctaatgaagtgggcctggaagatcctatctggggaagaaagtttatggagtagtataataaatgacaaatatatcaagcaccagagttttcttgacatggaagccaagccatctgactcaattttatggaaggcgattcttcgtatgagacccgatcttcaaaaaggtatatgccgaaagattggcgatgggaactccacctcaatttggtttgacccttgggtgccgggagacaatcgacaacctatcccatgtgttgatgatgcagcagggattagtatggtcagtaatttcatctccaaccagcagtggaatgtaaatctcatcaggaggtgttttcgggaggaggatgccaagcgtattcttaacataaccctccctgaaacgtgtctgaaggactcctggatatggctgccgaatccaaatggtgagtactctataaaatcagcatacaggcttttaaagaatgtcaactcaagtatggaaggggatatgaaatggaaagctatttggggggccaagatacataatcggctcaaaatgctttggtggcggatcctagccaattgcctgcccactagagttcagcttagcgcctttatccccatccctgataccttatgctccttttgttctaatgctgaggagaatagcttccacttgttttgggaatgtcattacgctagagccttatggtttggatgctactggaatctaagaatcagcgctacgagaattacaaactgggaggactggctgaagtggttctcgaatgctcataacagacctcctaatctcgatttccaccaatttttgggaggggctgcaatagtctttgagagcatctggagggaaaggaatggtcgctggcatgagggcaaagcaactcctattgcaattactatgaactgcatcaatagcagaattagggagttcactgctcttgaaccctcctccaattctcttcaatcggcttggcagccgccccctccagggtgggttgcctgcaactcggatgcatccattggaaaggatcaatcgacgggggctgtagtttttcgcgatgataagggaaccatcctcaaaattctctcctgcagaataaatcattgcgaccctctccctgctgaaatctacgcagtttgtgctggtgtagcagcagccaaggaacttggattcaaaaatattgtgtttcaatgtgattctctaaatgcagttgcagctctaaactgcgcatcccatgaagtttgtaacctgcattacaacatccaggagcttgttctaaggttctctgaattggctacctctctaaatctttgggaaattatttggactcctagatcctgcaatcgtgtggcccatcttgtggctcaatgggcaaatcgtaacaacaaacttggggttatcgatttggccagttttgatgactccctgcaacttgttattgcagatggtcatgtggtagattagtctgttctttagtttttctcttttttgtttccttgttgtttgtttccttttctttggggctggccttgtttagcctgttttagtttctctggtttttctttgtgtttggtttctttgtttgtttcgggttgtggttcccttcataaccactaatcaaaaaaaaaaaaaaaagttatacctgcatttatttgcggtactagaagtctagaacatggataggatacaacaccttatattttgcaccaacattaattatgaaaactatttatactaccaaattagaaactactattattaataacatttgaaaatactttattttcttaacattacattataaagtgaaaataaaaaataataataagaaaaaaaagttattaagtgaaattgaagcatcgttaaattttttttaataatcattactttcaattcaaagggttgaaatttaaaaagagaccccctcctccacccagagtagaaatatatatataatatctttttttttaactaaaggaaaattaagcattataacagtcctcagccataacaattttttccaaaacagaaggagcattcagctcattgaaaatacaatctgacgtaaaacaagaccctctagcaacacaatgagcagctttattggtagatcgataaacaaaagaaatcgaaacatttcgtaaagataataaaattgaatgacagtcagccacaacaaaccaaaccgtgatggcatagagtctgaactgtttattgcttgaactaccatcaacacgtccgactcaataatcacatcttcccaacctttatctttaacccaacttagcgcttctttcattctaatcacttcagcgatttcaggaaaaacaaccccattcctactcgctgaaatagcttcaagtaatcttccatttacgaagccacacaaccaacccaaa

SEQ ID NO: 197244 - DNA, 602 bp, Cannabis indica
aaaaaaaaataaagagacttatgtgtgataagttaagagaaattgagatagaataataaatttaacttatttattctctaatcctcttattaattattattacaaatgtggattttcctttatttaatagctaggttagttgccaactactcttatggttatggagggagaggagataaggaaatatcgtgagaattaagtgtgcataatatcgtgataaattgagttagttcagaaatgtcattattgaccgacagtaatggggcatgcccaattgtacggaaagataagcttacccattaaagaaagaaaaaggttgtgccacaaaattatataccaaaatttaatttttacttttcacatcccattttgtgggttattcaaagggaaatttgataatctatgcttaaaaattaaacatggtgtttaattatcccaaataataacacataaaaaaaatatacctatgtttcaattatcttccaaaaatacccccatcatttcaattccccccaatctctctaacttccctctctctcctgtctgtcttcctttctcggttcaaactcagccattatcaccaccgcaccattgtctccctc

SEQ ID NO: 197245 - DNA, 1361 bp, Cannabis indica
caatcgctatttttttttccatttatgtgtttaagagttttggagggtgccttgaatggtgcacttgtttccatgattagaaatgttgcttctgggaattttgtgattaagccatgaccttttctctttttgttgtgccattttgtggataggtacaccatgtttgctctagataaggtcggcccctccgagattgcaggggagtagctaagttgccgggaaaaggcaaaagtcttgttgatatcggaccttcggcatgggggtattgggagatcacgcccgacccccttatgcccatctacggatgggcaacccagggctctccctccagttccgtgcaggatgcctattttagggttcgccttccctatgagggcatttccttttgaccctcttcaaatgcagagggagagggaggcaaacaaggccctgaaagggcatctggaataagagtggctgcaagtccattggcgtgcatccttgatatcggcagtccacaaggtgaaacttgcggaggacatgcacacggtgcctccggcggggtagattgttgaggtcaaggccttgatgaagtggttgggctataggttggggcgagaggctgctccttttgctacagagctcttggaccagggtgtgccttagaactgcctatggagacttgggcgtcctgcagcagcgtagatgctttgtgcttgcccactctgcaaaacagcaagcagttggggtaagtcctcatggcattggcttttaaaattccactgtcttttattttggtgtttcaaccttttgtcttggctcaatttcttaatagcggccttgttggcggaaaggtccaccgtggaggttggcgtgctggtgacggaactggagcgagtgaaggcgtcaaaccatgatctaggcaccgacaatgagaccctccgggccgagctcatgcatgccatgttctagattgaaggcctgttgtaggccaatcaacaattggaggaggaaagttcccgccaggcctgcctcatccagaacatcaaggccattcacgacctttacacggagactatggagaggatgtccggcgtaggtccttcctctctgtcagccagtgcgcaaccatgattctccagccaggctattattgaatctatttatttgttttccttttgtatatcctgttcattaactacacttttccagccgtagagacaattaactttgccctagctgtgggaggctttttagtaggtaaataggatatttcttttcattgttcctttcttagagatttacaatgatagactgtttaggggtggtttcattttccgaaacatctggttccaacgaccattgttttgaccttgtttgcc

SEQ ID NO: 197246 - DNA, 1411 bp, Cannabis indica
cgtagattatatggactatcatagacacgttttttgataaggaacgattcatatacttttcaccgttccacgaaaacatagaaaataacaataaaaaaaaataaagtaggttggtcggtagtctaaaagcatcttccatagttttttttgctaaccaagcgtcccccatagaattttaaacagagaattcaaaaacctttccatattacatatatatatatatatgtacatattgatgaaagacttaactcttataacgcatcagtcatcaccctctctcttccaaacccttcaattcctccactctgcctttcacattcctctctctcagcctgatctgatccctccaacccattcctgtttggcatttaatcaactcctctcattgaagtaagagttatttgcttttaattaatataaagatgtgcatatgaatatgatacaaagattaagaaaaaaaagtacatcaatcttacacttttacactgttttctgtttttgtgtgttttgcattggggttttgaatagttgccccttgcccatcatataacattgacttttgcttttaaatttctaaaaagtggctttcatctctttctcatagtttcttaagtgagcaaattagattcaacaacagcatattaccctccctttgcataatacagtcatattttatttctctgcaaaaacagaaaattctgaaactaaatacttttatttaacttagtctcctgattctaagctagctatatggctttaggcatttctattttgtaccaccatagcctaattgaagagaacaaagtaaaattgttcacttggttagaaagtcgttattctagaggtccattttaggctactgagactttctattttctgtttcttttaatctgtatcttctaaaatagtatacatttatttgaacatgtgcaatgtattcattcatttatttgaaatgggctcatgcatttacatatatgtatttttaatatatattatattgtttgctgtttgttgccaaccactgtcaatataataataataataattaataactggcatgttgaaataatctgaactacatcatatgatatgttatgtgttgatacttttattaaatacagaggacaccagagcactatataactctctctttttatgaatttaatcattaattattttttcttatgcatacagatcaatattgtttgagtgttgtaaattaagctccagctcaaatggcagaaagcatttcaccaatggggatcaacctgttttcccctttcaagatggccaacttcaatctctctcacaggttagtcacccaaatccacattattttattactttgaagtcgatagatttagttattttggaaaactcagagaacttagatatgggtttgaactga

SEQ ID NO: 197247 - DNA, 967 bp, Cannabis indica
aatagctggctcgccaattcccagaccagtttcccctgcatagtattggggaacatagttaattgtggtacgtggcgactgttccacattgacagaaccctctattcaaggtaccgatgatggatctaccttgggtgacaaaggttgttcattgggattagccgggttagcagggtcaaccaaactggtagtgttggccaagttcgttgggcctgttgggttggcagggttggcaatattggctatatccattaggttcgtggaaactctagtggtggctggaacatgaacattaggatcagtagttatggggtcttgaagaagacacgatgaagtagaaattgtaacttgagttctccttattacatccacggtaattgattgaattgataaacaacactctcaataaaatcaccaaaatgttaatcttagatttggtcaactgacaacggagccttatttacgatcaaaattaccacgtgtaaacaattagaataaataaataaaatagacacaactattttaaagaggttcaaccccttggttaatagttaacaacctactttccttttagttgtattgatttgagagataataccactcagatcacaagctttgtaatttctaaagtagctctctatgaattatcttaagtgtgtgaaatgagaaagacttagtctttagtgcactagagatggtgtgcagaagagagagctaggattttgagagttagaactcaagagcttaaggattagaacttagctttaagtttagcctagtgctctttatatagaagacagcttacagaagacctaagccaaagtagattaatatctcttaaaaggaggagatatcacctttttttcacatattaaatataaagaaaataaccaattaattattcttaaggaataggtaaatatctgaagtggaacccctagtttcgtgggttgttggagtgaattcg

SEQ ID NO: 197248 - DNA, 730 bp, Cannabis indica
gttagatactcttgttgaggctttgtatcttatttatttacaactccttttcacaggttgtagtgattgatgaggtggactcttttctttttcggcctcatttggtattacgagccaagtaccacgctgtaagttgtataatttacacacataattgaatcttttctagttaatttggagtaagcgtgtcccactttttctttgttttcagcatctatatttctggtattcatatgataatgaaatcataatgtagcattagtgctggtacttgcttacttaagtagatatactacaaatgatagattttggaatttaacaaattattaatcctttttagtcatgaataaatttcaaaacttctgtgactacatgttgcctgcagtagtttgtaatcctttaaacctaaaattacatgtatgcatatgcaggttaactttttgagccaaattcgtctcactcataaaggagaaggaccaaatgtggcaaagcgtttgatagatgtatattttgcacttttcaaggtatatatggtctctatttgtattcttttatgtcccttttcagacatttgtgggttctctatattggttgcaaaagaaaataagttggtgttaagtggaatggtttttgaagagaccaacataattcaaattatgagtttgatttttcttttaaacaagtgtattagaggaaaaatagaaaagaaatgacgaggccttacaaataa

SEQ ID NO: 197249 - DNA, 1193 bp, Cannabis indica
ggttatctaatcctcgagttttgattgaggttaaattggattaagcttttcctaatatgatctcctttacgaattagttagatgtgaacatggatgtccaagtgcattatgaatggattctgattcaatgtgtaaacttcctggattgcaaaaagaagatagtcaaaggaaagaatgggctccaaagaaaataaataagaggaaagttttagatcccaagaaggtcgtgatggtggttgaggatagtttccaagttgtaaaagcaaaaaaaaatagcaggaaaagtttggaaacgctcaatctataagtgtgattgagaatatttttcatgtgctaagggaagaagataaattcttaaaggtaggggaagggtagggaggggggagggaaagccccttacaatttctggatataattatgagttagaatgttacggggataaaaaaagtgaataaaaaaaaggttaatatattaatctcttctttgcatgtcgggttggttggtctctttaaaagaaaaataaaggcttcaaaattggcagttgtttatgttgcaatgctttggggttgtgtctctgcacaaataatatgtggcatccacggaagagaaatattgtaagctggaattcgctcatattttcaattaatgttcgtctttgtacaagcatattgatgcatctagctgtggattgaagagtaggaaaggagagatattttattacctttttttatgactttaatgatggagctttggaaggatttgaagtctttttctaattgaattttgaaatggtggctagtgataggggacttcaatgattttcttagtgtggaagagagaatggatgataatgcgaacattacaaggatgacaaccgtcaaagaatgtataaattattgtatgttacaagatgtgagatattcgagatgtttttgttttacttggaataaatagtaggggagtggagatagaatttactctaaacatgacagaactatggctaatcaagagaggttggatatattctctgcagtagaggttgtttttcttgcagagggccagtttgataactgcctaacaattctatctatctatctggagcttaaaacgaggaaaaagcaatttgagtactttagattttgttagaattatattggttttactaaagtacttatagatagttgaaaaactca

SEQ ID NO: 197250 - DNA, 1018 bp, Cannabis indica
tgcattttctctttccgtttggttgctgagaatatgctcatgaaaactaggatcttatgtttttttacagaaataaattaggggttgtgtgtttattgagcagtaattaactgaaattgtgtttcttttcgtgtatgttaagatggttcaagtgcggcacgtcgtttcgaagagggatagacggaagaggaggaaaccgatgacaccaatcacttccaagctcaagaaaataaaaatgaaaccattctcgtaggtttatactctgattgataatcttaaaccctgtaaatttgtgaaaaggtttaataagtttcccggaataattggtttagatgtcaaccaggtcttacaaatcaaggtttaggactatgaatgatgggaatatccgacggtggagggagggaaaacgacacaatgcgcatttgaaggtgtgctttcttaaccctattaccgatgcatgatttaagcaaaaatataatcttgaagggaatatacattgggcgctttgtttgtggatgttggattcatatgattgataataattttcctgagtttaaagaatataagttgttagtgagcggatgatatttgtttgcattgtagtgtagtttatataatctcttaagtgtggtgggttctttttaatgaaatttgttcttctgagtttgttcatgctaagtagaacgaatgagaaaattaaataaggtattttatattatgtagaagatctctgttatgagatttctaataatggatggtcagatacacgaatgtgtggattttggttaaaatgtttcttagctgtacaaatatcttgtctgttaccttgatttatcttaatgctgctacaaaaacactaacaaatcgtttgcatgagtttcggcttttgactcaatgagacctacctaacaattgaattgcctgagattcccaactcccaaagattatggttaagcagtaggacttagaaaatcatttcagttgttcaccttttgtctgctatcttaatattgctaga

SEQ ID NO: 197251 - DNA, 1605 bp, Cannabis indica
ttgagagatacacttcataagagtagtcacattcgagtcatttgccttacagaaaaagattgcatcatctgcataaaaaaggtgagtaatcggagttgccattcgagacacctttaccccattccactccccattaatctcagctctaaggattagcttcgataaaacctcactacaaaggataaatagaaacggggatagcgggtccccttgacgaaggccccgtttaggattgaagggagtcaacggagctccattaagaagcaccgaataagtgaccgaggtcacacaagtcatgatgatagagcatacatggtcactgaatctgtttgctttcaacacccgaaggaggaaggtccattccaagcggtcatacgctttactcatgtcagttttcaccgccattaccccttgctttcctttctttctcttaaagctctgaagaacctcttgagccatgatagaacattccgctatccatctaccagggacaaaagcagattggaaaggggagactaatctgtcaataacttttttcaatctgtccgttaggatacgagaaatgattttatagcagaaattacataggctaataggccgaaattgatcaaatcggcaggcattattaaccttaggaatcagacacaaaaaagtatgattaaggttaggacaaaccgattggttttcaaaaaaaccttgcaccatcttgcagatttcagccccaacaatacgccaatatttacgatagaagatgcctgaaaatccatctggtcctggcgattttagaggatgcatagtgaaaaccacacttctaatctcttcatcagtcgggcacctactaatactagcattttcctccgccgaaacaccttctgtgaagagggaatcaaactcagcaccaatgtcaggattttgagattcatatacttgtataaaattctcattaaaataattcccaatctcatcccgttgatgaagccacatcccattcttttccacactttcaatagaatttcgtcttcttctaatgacagtggatgcgtggaagaactttgtattcccatcaccattcttaaccatagctctctagacttttgacgccaaattcgttccatgttggcttccatctccaaaatgcttaactgaaccgaggcttccttctccagattctctctagaaggcaccttgttttgtatcaccccaagctctcgtttaagactcctcaacttttgaacaaaaaccaaaagaattttgattccatttcttaagttctcgctttgtattcgccaatttcagaggaactctctcattcttcctacccctaacttcaatcttccaagcagaatccacaaccttctcgcaatccgaactcgacgtccacacttcaaggaaacggaaaggataattcagttttctctgctcgcctctatccatcaaaagaattggagagtgatccgatccaaggataggaagatttataactttagcattaggaaaattagtgcaccatgaggaatcagctaagcccctatcaagacgtttccgaacatttttgatcccttttcttgcattctgccatgtgcatcgaaccccttggaaacccag

SEQ ID NO: 197252 - DNA, 733 bp, Cannabis indica
aaaaaaaaaaaaacaattcatagtgtatacatgcatatcaattaattatcaacaaaaagagaaaagtaattaatagcaagctaaagtaaagccaaacccaaaaatagtcttttcttacaaggttttttcagtcttgaacagttgatgagtgagttagatgaagaaaagaaattggtagcaaattactgcatgcatcatacctttatgcaattttctaccagaaacacaaatttttttgtgcaatttcttttaattaacttgatgaggatgatggagtcttttttcttttttcttttcaaatcaaagcttagtgtcataagttgtatttgatagtaaagtaatgggtgtcagaagcagcataccaaaataacaaggttgagagtgataataacaatgagaagaagagaataaaggcagatgaagttgatacagggacacttctacttccatttccagacatctcatctgtatagtcaggccctgatcccaaaccacttgttccaccatttggtcctgtgctccacattcccacattgttgtccctgtaaattcattcattaattattcacatctttaattattaatattttccattaataagtaatgatatcatgtacatgcagaatattgcattcaaattctaaatattgaaaaatgctaattaaagataaatggtataataccatttaaggtaaatatgataatattattagtgtaatttaattaaaactta

SEQ ID NO: 197253 - DNA, 2385 bp, Cannabis indica
ccatcgactaatatatagtaatcttgatgcattgttaatctttaattattaacacattctttcctcttgataatttgtggaatggctcttggtcctcactcgtacatttttcgagataacttcctcgaagatttcccatcttgagattactccatgttaattatgctttactccaaagtaagctcatggtgggttatcagaaaaaagattcatccttgtcgctcctaattgcatttcttacctttttctcttccttaattaaatccaatttcaatcattcccttctttggcattttatacaattcattgtcagtattgtttacttaatcttgaggagttcctatcttgatgttaactaatattttccctcatgacgtggcatgattgctacgtggagtacaacttgttaacaagaaggctaagtcatttacacaacacgttagttgatgagaagtctgagtgcttaagcgggacaaagagacaaccaactggccccctcaggggctagccagccctatgggcagcataggttgacaaacctccatgttataaagggtcagccagcctataccaacacagggattgggctgaccagcctacacttggtaggcacttggtgtgcaaccttcatctaagacaacaagttaagatgcaatttgggcttcagcaacccacaaaaataggggcaaaatattagctattcccctattaatgagggataattatctcatttattatttattttataactatgtaacaaatactttataggtcccatttttaagggctattaggttattattctcttgtaagatctcttgtatcaagtgcattaacctaaccctaattttcctaagtctttaagctccctaaagctctcaaactctatgtctgaaactctagttctacctctctttctcttctacaaacccaaggcttctctctcacttgacattttcctacttgattctcatattgtaatgttaagagagccacttcaaaatccacaatccttatgatcttagtggtattatctttggtattaatataaacaaaagggaagtagatcattacctgctaactagggggttgaacctctataaaaatattgtgtctcttttactttcaagtttttattgtgtacacctagtaagcatcaataataaatacgactttgctgttgggtggccgaatctaaggtcaacaatttgatgctttcattgggagctttgttaataaatctaatcaaaaacaatagttaacacaaggagaactccggctataacttttgcctcatggggtcatcctcaagatttagtgattgatgatcctaatgttcatgttccagccacaactcgaatctctacaaacctgacaaaggtggccaaccgtaccatcccaatgagcatcaaaaacctggccaccacaactggtcatgtggacataacaaacccagttggtcttaatggccaatgtttgccacctagggagaaccctccactggtacctcatacttaatgaatggtcaacatgaagtaacccctgagcacaaaaactagatctggtccttggtattatgctagagagataggacaaggaatcagcgagccagccagtggctaacctcatctaaatttgggagaagatctcgagttggccagacttagagaggtcgtccaccaagtcggccaaactaaagaactaagtattgttggctgcaatgcattaacacaatagagacgtgaattttttgagattgatggatgactaggagtacatccttcaatctcatcaggcgaaactacactgccataataaagatgctagtgacctaataaggcagttcaatgaaagagctgttggtttgaggtcaggatctcagagatcctctccaagggagactagttaacagatcggggagggctgacatataaatggtccaactaggttcctctggaactaggacagaccttccccagcctgaaggaggataatacatgccatgatcatcttgtggaaaaacagccacacgctagacacaaatggcttaaggggccagccaaagatctctagcaacacaacacccctacttggccaacctttggcttaccagccccgttgtggtgcacctctagccgaccaactaagtgaactgccatcctaaaatatttgggtagggagtaacccaaacggcccactctttaaccagctaggtccgggaatgggtggaaacacccaagacacaacaacttgagaaatgagaccaatcacttcaaatacttagatccatataactctagcaattggtgtgatctaccacctgttaacacacaggttgcaccagccaatcaaagaggaacgcgtggccgaacgccctacccaacc

SEQ ID NO: 197254 - DNA, 884 bp, Cannabis indica
gtttgaatttatctataattgaaagtcgtggctgtgaatcgggggtgagagtcgtggatgggaatgggggtggagtgagggttaggttgaggatgggtgaagaagacaaagaattaaaaaataattttaagattctaaaataattttttattttattttacttttaattaaaattattacttagatcaataaaaaaattgacatgtggtattttattaatatccaatggataaattagaaagagagaccaatagacttataaaaaacgtggcattaagaactattattgtcaattttcaaagttagaaactaactctaattttttattgcaatgatccccttaaatataacacaatttttataagagcattgctattaggcatcagtggtgcctagcatctttgcgacatgtcgcgttgcgattggctagcgatactccctaaaaactattatatgtgcctagcatctttgcgacatgtcgcgttgcgattggctagcgatactccctaaaaactattatattaaattatataggaaccgatacttaattggaccaataacaatagttaacacataagagagtgctaggcacgagttaactaatcataaaacaatcatatttaaaataagtgttaaaactgtatttaatatcaataatgcttacaatagttgcccttaatatatttacatttgagagttttagttggaatttgttattgtcgttctccattttttttaataattattaaattaacaaccatcaaatgttagtaatattcaaattatttaaccctactatcagtggtgaactcaaaagttaaaaagtatttttggtagaatttaaattcttaacccctattatatatacaatttaacttaattat

SEQ ID NO: 197255 - DNA, 980 bp, Cannabis indica
ctgattaaaaggttcttggcttaaaatattaatcaacaaaaattataatttatttcgattaaaactaaattagtgataacttgtaattaaaaaattatcactaaaaataataattttttgtagtgagtttatacattttatattttctatataaatatatatatagttcggtgacatatatagtctctttaaaattaattactacaaatagtaatatttgtttattatttcttcaattttctattttttttttgaatttttattataggtttataaatatttattatttatttattattatttgttatttttaaatttttaattaagtttataaatttttatttcattctatttctgattctctacgaattccatatatcacatgatatcttaaaaaaaattgatcttactttagatagtgatatggtacttacttggtggctacgtctctttctagttgtatcagtctttgactctgttattcacaatcgcctttctaattagttcgttactttcagaaaaaaaataaaaaaaatcatatgtccaacaaattatttatactttgatattaatattttaaaatatttgaaagttctcaaaaaattatgaaataaatgcaagtattaattaactataacatctagtgctctctctctctatatatattacaattgattatagtgcaaaaaacgtaagtaagtgttttccaatgaaaattaaaaataaaattatatataatttacattatttataaaatttttagagatgagtcagtggacacaagttgtctaaatttgaaagttaaaagtactatatataatttataaaaatatataggaaattaaaatttgagttgatcatagtgtttgtgaacgaggaacacgtggtgttctggagttagtgctgtgatttaatttttctcttttattcatttatttttagaaacgtagctatagtgggatttgttcaaaaaaaaaaaa

SEQ ID NO: 197256 - DNA, 641 bp, Cannabis indica
ccgtagtactatacttattgtttttgagacacgatatatctaattattaattaattgatcaagaaccactacaaaaccactatatagttttttaaaggatgtatactagatcacaaaaatgatataattatatgttgaccctcaaaagtaaccaatatagttgatgtagctagcgggagcaagagtggatgatccaaccgaggtaactgctgcttttctcaattattagcaaaatctgcttggcactagtttgcaaaataggaaattggtgcaaattgagaccatgttgcagggtcttcttgtatctaaacagcaagcagattttttaatatctccctacactagagaagaggtcaaaagagtaatatttgacatatataccaggtattaaggctcttgggctggatggatttagaatttttttcttccaagataattggaaaatagttggagatgataaagctgcagcaatcatgtctttcttgaattctgggcagatgctaaaggagataaactcaacggtgctaactctagtacctaaagttaaatgtcctaatgcagtgactgaatataggctaattgcctgctgcaatgtcctatacaaagcagcaaccaaactaatatgttcaagactcaagcat

SEQ ID NO: 197257 - DNA, 595 bp, Cannabis indica
tttaaataataataataataattgaaaaatgtttaaaaagagatttttagattgaccaaagtaacccatctttacctttttctttcttttcttttttcccacctgaaaagttggtggacggtcttgatcatttggtgcaggtattccttttcaactgatctaagcccctacagccgttgttcttgatcaacggtttagattgatttgggaggcaatcatctgtttgaagttgacctacactatcctgttgatgacgtggcaaccatgatagagagcagttttgacaggtgggatccattgagtggagtctagggtttgttttgtcttctttcaagagattcaatcctagccgtccaatcagaacgtgcttcttgtttttcagccgcttattttatcacgtcatcattacgtcacgttcttgtcattttttttttcttctttttcttgtctaatttagtcctcaatttttattaaattaaccaattttatttcattttttttgctctaatattaccattttatttcactcttgtaacacattactatgtaaacatgcataattttgaataggtggaaaaaaaataatagagtttca

SEQ ID NO: 197258 - DNA, 991 bp, Cannabis indica
ttagtattgacgattgtatttgtcttgtcataaagttacattagcaattaaattatttcagtaatgataccatagtctttatagaaatttttagagttttgaataatactttagcccaaagatcagtcttcaatctcatttcttgtagtgatctttccttcatttacttcttcatttacttatatgacatttttttattaataaaataaactacaagaacttgtatattgtttactagttaattaataaggagttaatttatttgtttatatatataaatatataagaaaaatattatgtgcaaaagacacgtatacttagtttatattgagtacaatataattaatttaaaattatagaaattcaatgtaacaccctactagtttaggcgtgctacagtactttttaaaattactgtgcaacttttgctaagcaaagggtttatcaaaagtgataaaatttatactttaataaataaacatatactatattacatttataaaatctgggatcccgtatctacatttttcaactttacataatcaaaaaatattgcatagcaactacataattgtgagccctagttgtcccaaagatccaacacttcagggcaaactgtctcgatatatacaatcttcatccagctcaaaactcactgacgtttgacattaatagctttgcctttacctacacataacatagtatctgtgagtcgacagactcagtaagaaaagcataaaacataaatatataaccgacctacgactaagtgcccatacacctatcaataagtcataaaccatgcaaacatgtataattgagtctcgaacattcttgaccatagtataattgactataataccacatgcactcagtactctagtcgtactagtgttggtagcatcaattcaatccatactataagtacaattagccataataccacatgcactaagtactccggtatactggtgttggtagcactagttca

SEQ ID NO: 197259 - DNA, 1159 bp, Cannabis indica
atcatattttgtagcaatttcaaactattaggaagtgttaatgcaaatatcttaattgttaacatatgaaaatataataccagatgcatgaattactcttctaattgttaaaaaactatttgtgaaaaaaaaaatggtaaatattattttagaccatgtattttgtaaaagttaaccttctatttgttaaatgactaaatggacccttattttttaaaattgtacaaataaaaccctgaactaattttttgtcaacataaaatttaataataatccgttctaaaagtattatgacaaaactgtttacatttttgtatctattcgtattaaatattaaaaaaaaagttatcgaaaatagatgatctaatcggtaacttttgcaaaatataaaatctagaatggtatttacccgaagaaagcttgtttagtagttaattggaaaatttaattagtaattattaatagatttagtgttaaaataaaattagtcttaataaatattttataagaaaataagatatattaattaatgaaataaaataggttagtattgaattacaaataatttgttaattatttttaattcatttttaaattcttaataataattcaataactaaaattgtagttagatggtaactattaaaaattattggcattttggcaattgagttgtatttgtttatttattttttaaaattccttaaacaatatatagaagtgaaagggatgtggatgtagctagtagtttactaattttaaatgaaaccacaaaaaaaaaaaaccaccaaaattaataataataataataataataataataataataataacccacaagacatggggaaatttaaccatgcttcacatggatatgatttctcagttacaatattttctttcaatggttcacagctaatgctgagatggatgttagagagagagagaagaaataaatctaaagagaacagaataatgaaagaatcttatcaaacacctaatcagagtaagaataataattaaaaaaaaaaaaaaaaaaaaaaaagtaagaaagaagaggcagacagagcagaatataatgttgtctgagcagccacaccttccgattgtattgccaactatagtcctcatcattccttaattgctccattgcccaacc

SEQ ID NO: 197260 - DNA, 1447 bp, Cannabis indica
caagtttggggttagtgaatatacatatatttacttttatatatatacggtatacatgtattatatacgatttatcataccaattgatatacaataattggccaattatgaaaattaaaaatacatttaaaatcacagatgtaaagaaatgtgaatctcagttcccacaactatacagtgacagtatacagtcatatattgtcataaaactgtttcagttaatgatattagggttgtcaattaaaattggtaaatattgccaataatagaagagttaatgatatgatacatagaaaaagacataagctaaatgtggtatacacattagggtgcagacaaactaattaaatttattctctataataaaaacaaataaacaattgatcatgatacatatcttttcttagatcttctcccttaaacacctacattattattatgagttttcttttttttttctaaaagaaagaattattactttataatatagttcatgtgattatcaatactatatgttaatcaatgaaaatttaccattgacgcagctatattatatatatatatgacatttaatttgctgtggtataattaaattagctgtggttaatttattacatatgggtcagagaggtgaaatgaaagtgaatgttatttgagtttgacaataaagttgggaagcatatatatatatatatatagtatctgaatttggtagttgtaagttaacgacgttcacatgaataatgttccctcccatttacttcaatcactgataaactggtccacatctttaaatcaagatgttgacaatataggagagaattaacatttccaatcatacctttttttttaatttttcttttctttttatcatttatattatttccctacctagtaaattaaacgtttcaaaatttcattcattacattttcaaaaaagaatgtcatgatctatatataatcaccaattaattgatttatatatataaattaaaatgttcttcctaaacatttagaagaaacactaatgaactagaagtgttttcttatatttagtacataattccatcgacaagagaatctttccttggaggactaaagatcatatatcttttttcaaagtacgtacaatcaatatatatatacttcctaactttcaaaacccactttgaaaacaacaatttcaacaaaagcaagaaaaaaaaagtttacaagaagaaatatatatatattaaaaaattatttgtcaaaatactagtcaatttgcacccattatctgtctctgagatttaaggcacttcttaaagcttgggtagtttttactttctgcttttttaattggcagagtaacatatgggcaacttgacctttataacatgtttgaagctgttattctacttctatggtacttgtttagacagaaaccccacacatttagatatgaagg

SEQ ID NO: 197261 - DNA, 1130 bp, Cannabis indica
caacatctttgtgtggatataataactattgacaaagcttatttattgagacagtgtcctctatttggcaaagaaaattaattattgagttcattttaaaattatgttttcattttaaccaaattaattgacaagtttgttacatctcaaatcattacacatcttgataaaaccttaacttttaatatacaataatacataagctcaataatctttttcttaaaaaaattgttgaacttaattatagagtttttgagcttctttaagagccatatattaagtcaaatgtagtgtttttttttttaacataaataaataaatatgataattagaaaatctacttcaactagtcatttcattttcacagccattattttctttgacctcaatttgataaaattatttcaattaatgtaaggatcctccacttatcatatgttgcttgaattgaatatatatataaggttggcttttaaaatttagtagatcataaaaaaaaaaaaagttatcttgagacctttatttagaaaaaaaaaaaataatttttcaaaaattggtaaaaaaatatataattttaaaataaaattttttttgggccctaacctaggtgaaccttaggtaaatgcctaacacatctatgttcaagatcggacttgtatatatatatcaattatacttctcgatttatttttaccacttaaagaactcataattaaaattttcttatatgattgtatacattgtagttatagtagacattaatttcacatgttttcgaaaaaaaattaaaataatttataatattaatgtcaaggttcaaacatttagatatacacgaaaaaaaaaaaatatacatgcgtgcgcacaattgattctttaaattttagttttgacattataaattcttcaaaaaatttcaaaaaaggatagaatacctattatatagatcatcatctaaagaaaaatgaattaatttcttgaaatgtcaaaaataattaattctccataagttatataaagtaatataaaaccaagtataatatgtccaaatgttgcataaatatagtataatttaatggttatatgggaaccaattttcaaccttacactaatatgtatttttttttttt

SEQ ID NO: 197262 - DNA, 1262 bp, Cannabis indica
cctggcagctctgataccaaaaagtgtaacgccctaatgattagacacgatacagtgatcttttgattactattcattcctttgctaatcaaaatatttttctcaaaaattgtgataaattaaaactttttgagtaatattaaactttaataactataattatataatcataaaaataagtcatgatcccactttgaaattgtttacatgttcaaaataaacattacaattatgctgcacatcaactacaaaataagactaagtcatcccgaaaccaaactctctaggtcacaccatcttgacatgtacaatcatcttcgagctctggactattgcttctcagccttagccttccttttacccacacatgcgagcaataactgtgagtcgacaaacttaataagaaaagcatataacatacaatatattactgacttgtatttaggcacccatacacctatccacaaaacttaacagatgattaagaactttcttaactatggtacgacctctgtaccacatgcactacgtaccgctactgtactagtgttggtagggtttgaaccgtactacgtacccaactgtactagtgttaataacatcggattgtactctttaatatcacaggctataccacatgcactcattactgcttccgtactagtgttgatagcatatgaatcatataagaacatgcatacaacatacatacacatatacatatatattctatgctaatattacctcgtttccaaatttaagtgtattggtcaacctaattagaaaatcacgtactaacagaggccctgtgtcacaatcacgtaaaatagataatcaactttctaaaacctttttgggaatgaaaactcaaaactaagagtttgcctatcaataaatagcatggtaaaatcctaagtatcgaggaaacacgagaaaaacaatgaaacggggaaactgcctgaaaaacaaaaaccttcctttttgatttaaaacaaccccaaactttgccataagttctggaatacctataatcaacataataaaccatttccaagtggtaaaacaaggtatataacacaaaaacacacaatccaccataattgagccaagtttgagttcttgaactcaaacttgctcaacaccataatcaacctttaaatctaactcaaataagcctaaaccaacttaattaaacctcagaaaacatcccctaactcctagggttcagacagaactaaagtacaacaattgcatgcttgaaa

SEQ ID NO: 197263 - DNA, 875 bp, Cannabis indica
caacattcataaatgtataaaatgcataataacacatcagatcatcaaatttatagtacatcttttatacacgcgtcatttcaagctgtgttagtgtcccaacatcatttaaattttaggattgatatttcaaaagttgcaacgacaaaaatttatttcggtgcaacataaacatctgataagaaaacacataatggaaaaccaaaagatttatcgaactatttcttagccacataatctttagttatgtaagtataaatagaatttacctctgcataagtagagagttgaaggatatatagttaacgaacatatagttagtctctacatggaaaaaaaagaatgtctgtcctaattactccatgttgtgtacataagtaatacatatgatttataagctaattgattttctagatagcgaactattggtacacatcaaaagagcaagcagtagaggagtgtaaaagcaaatttgttttacattctagtatggaaattgagttataagagaagatgtagtgaaaaagaatgacaacacaatagattacagatgaaaaatggtacaatattggtatgatcccacagatagtggaatgaatgaagaaaagtttgcccaagaaaaggtacataaaagtaatccattataaactcattaccaatggacatggcaaaaaaactattttataagaatccagtgtctaaagtctgattaatacaaacaagtagtttattcatcaatctaataaacttgtaagagaataaccatagaactgatttacctgtggccaattgtgaagcgaataacaatacccttttcgtgctctaattgcagaagtttttcccctgaataagaaaagaaagcatgaaaattcagc

SEQ ID NO: 197264 - DNA, 759 bp, Cannabis indica
aaacagatcaaagagcttgacaatgacttgctttgccaagaacattgtttattttattatttgattatatggtgagtggtgatggtgatggtactttttttaaacataattttgataaccttaccattaatagcaattaactttttccagtactagagctaatagatgtttttaaaacattcttcccttacaaaaaaaaaacattcttgggtgaaatagcttgttttgctctattatttgactacaatcatatagatagaagacccctgcatagttaatattgatagatttcttagagatgcataatttatttacatgtctttgtgtactttgactttcattagcaaataaacaaatgctgagaaagattagtttttgttttgttttgttttgtttttgggaaagaaaagctcattcttgctatatgctgtatgtcttctaattaaaattactatttggtagagttataattaaactgttaatacaggtctgatggcaataaacaaagcagggaaggtttgacttctcagtactgtttggttcaaagactatttacagccttcaattaaatcatatttcatatttatatattatctctcttcaacataacatacatcatcaaaaggatttcgaagacccaccaaaacatgaaagccaagatcttgcataacctcgtggataagctcactaatttggaattttccttgataggtatctaaaggagttggaattgaacagtaccgattcatatgtataccc

SEQ ID NO: 197265 - DNA, 641 bp, Cannabis indica
attttgcacaaaaaataaaaaaagaaatacataacagcaatgcaagtaataaccacacaaatctactaaaaataaactacatactcttcaaaatgtttaaataaattatttaaaaaacggttgcccattattacaggtgcagcaggtttcattcaatcaatgtgtgcattattcatggctttagtggagtcttccgctgtcattattgtcgtcttattttttatttttttacaatagagcacaaagaaatgagtgagttagagaaataattatttttttaagatacaattattaatatgaaggtggtataaaagaaaaagcaagtcaaaataggcattatttagtttaaatgaattgaaaatctaaaaattaataatggagtttgcgtatatataatgaaatttctctttataaatacccctactagcaatgcattctttgaaaattgaaactccttgtacatttaaacgagatgtcacataaatgtgtatgataaaaaagattgcaaaaatgtttgatcaaacaagatgcagccaaaattaaactttaatgaaaattaaaccaaaacccttagcacttccacgcgggtgcgaaatcctctctaatctaaaaactattatgtaagtaaaataaaataaaaa

SEQ ID NO: 197266 - DNA, 829 bp, Cannabis indica
atcaacttggccctcatgcagtttgcagtcgtgaccagatcccccatgttcaactcatccttattgtaaccagcaaaagcctttgcgtggtttaaaaagagttgggtggggcggtacggtgcatgggaggaaccctgacccatttcgtgagctgattcgaacgctcaaatgctttgaagcctgaggagaagaaaaatcggtggcgatattgtttttcattcttttgaaagttaaaatgcactagaccctagctcgttggtagggtgggcctagagtttgtaaaaaccatcgttaagtttgtcgcgcttttttgggacggacatgagttaatagaaatacaaaatctcagccggacttggtggggcctagttcctggcaacataaaaaatgtacaagcctgaaagtaggcgataggcttgaggaatgagttgataaggtgcaaggcaacaaaaactagtaagtttattaaatagtcttggagtgggagcatggctccgaacattaggtgggtctgactccatgctccgaagccgttgtagttatgattgggtgtttttcgtccctcgaaaggcgatggaaaaccccagcagcggaaggcttgatcccagtaacagtgacgatcttctccaattgatgggcacacgtcagggtcgagtgcagttcatctgcctcccagccatttaagcggggacagacatggcctagaatcggtaaagttccaagatttcttggtcaaagctacaaaaaccatggatgtgaagatggtgaagaatgtcactcatctgaaaaagaaatccagtacttagcccccaaaccaaaatctaagata

SEQ ID NO: 197267 - DNA, 2306 bp, Cannabis indica
accaccaccactactgccacatcactgcttccaccactaacaccatcgcactgctacaaacaccaccattattaaactaaattagcaaaaataagaaaaaacccctaaaatagaaatcgcaaatcacaaatctaaaattggataactatataaatcgatttcattctgaaatcacaaatctaaacccctaaatagaaacaaaaactcacaatcaattttggatataaaattacaaatattggagccaaatcttcttcaacctagttctcgctagcctcgtcgtgacttgctctgacatctcgatcaaccgttgattgcaacgaagatttcatcaaatgattatgtttagacctagagcacagagactccaattctgttccttgctatgactaacaaggccaaagacttatcctgggtggcatcgtcgtggagcctaaggtggacaagctatgttggcggagctgagagggttggcaaagcttcgggccatgagagcattggcaaagctgagagggtatttgtcggactagtttcggagtgtcttgggtctgtgagagttgaggagaaaactacaaaaaggtggtgaaggaaacgaagaagaagaagaagaagaagaagaagaagaaaagggcacctgcgtttgttccacgaggaataaaaagaaggaaaagaagaaaagaaaaagaaaaaatggaaaaagggtaaaaaagaaagaaaaaggaaaaaaggaaaaaatatttaaatttaaattactttctaaattattttttatttattttataaaaatttataaattattaatattacgtggaccaatggaatcatgccacatacacacttgtctacttaatgacaggtctatttgtcatttaattaatagccaaaaactaacagaaaagtagagagcaaaataattttatagtttggggagttctacccccaaaatttaagtcttgggggttgatcatgccaaactctatagttcaaggagtttggccacaaattacggcaacagtaataattaacaatcaatattgattaacagtatccaagatcaaacatttaattacagagcattttcataataatgaacatacctcaattctttattttgttctccgatgactatattgattacacttctttgatctagacatatagacaaaaataagtgagttctcatatagtgaacactactctttcattctctctacaccatagccacactcattccaccttcatcaccaatcaagagaataaccccttttatgaggaattatgggtaattgggcttacatgcctaatgtgagagaattaattgtcttggcctaatggattgtccaaaaatattttttagagcgtgtctatgggccccgagcatgttagtacattatgtctatcccattattaattgatggtaataccatgcatttatgattatacaattatcattatatgctaatattgacactgagtgagaaacacttaattatgttagtccacataaaatattttaatattctcccatttggacaatataattacacatatatatatatgctttcactatgcaatagtgtcaacacagagaaatctcaagaaatacaaacgtttataaaactaattgtgtatcatattgtattgacaagatacaaatatggtacatagtgagacatatgagattcattaaaaatgatgataactactaatctggatccacttgaacatagcaccgagactaagccattagctcgcaataataagtgtggacaacaacatcaaagaattatccaaaatatgcatgtattcaacaacaaatagaaatccttaaaatgtctaacatattttaaaataatgactcccactggaaaaatcatcttttggttccaacaattcaaacaagaaatgtatcctaagtaaacatattctagtaagttatctcagtgtagtcagtgagatgttgtctgtaagtacttgttatgataccaatagaggtctacacatctttctcactacaagtggcatatcatccttaccaatggaataacaagactctctaagtcctgagagaaatatatgattttgatgtttatcacataagtttagtaaattcataattcttaaaaacaaaatattacaactagaatgtacaaacaaatcaatatcatcatcttacgcacacactacctctacaaatgaggaagctgcaaatatccatagaatactaatcacatataactctccataccattataatgacatgtacgagagaagaggttttatgtgttcatatgacacttaattac

SEQ ID NO: 197268 - DNA, 878 bp, Cannabis indica
cttgtatccttaacattctctttccaacaggaaatgaaacaaactaagctaaaccatgaaaacaagtatctttcagcaaggaaaagaaacaagctaggttaaatcatatcagacatgccatatgtaacaggtctacaaacctgtcgcgttggaagagtacgtgttttgtactcctcaatttcgatagccttgatgtcctgcctgtgagtaagtgctttacaatcattaatcctcccctgtagttgaactgttatcttccccactctatgtggatcataaacttgaaaatccttaatatagcctataaattaaaatgtgagttagggacgctgttagatacaacaacaaactaacaaacaagcattactcttatcaaaaggattattctgataaaaaaaaaaatgaagtgaaagacaacgcatccaagcctgcagcaaagccttttctcaaatttaaaactagtaattgaacaggtgaatgcaaagagcttcaagtttcaaaacataacctattcatgcattttaataaaatatcaataatttcataaagatttcaaagacatgctgtcaagtaattccgagatcatattaaacagatatagcaaatgatgagagtcataggttctcaaagaatcagcacaacaaggacaagctttgttaccaagaaaagcagcaaaatttcctgcaccacacacccggcccctaaacacatcgggctggcaatgcgtacttgacagatagtgaaccccattagatatctaaagttgcattgcaaaacaactcaatcaaataagaaaactataagctcttcatagttcataatcaaatctatttctgcaaaaactcttgagaattactattcaggcttaacccagctac

SEQ ID NO: 197269 - DNA, 1705 bp, Cannabis indica
tagtattttatgaattattttgaaatttattttttatatgaagatctgataaattattttgaaatatatttttggcagcctaataaatactatcatgtacaccattctatataatttgtccccatgttaaaaacaaaattgtttactatacaagggaaaatgacatgctctaccatagaatttctttaagtatatacgatatatataaacaccaataaaataataataataataataacaataaaatatttattaaaagtatactctttcacctcactagaaacaatataaaataaattatattattgttttatatttccaataagaaattaaaacaaataaaataaaaaacttaaaggaaataagaaaaaaaaaatagtatgtaaaaagagatatttatttttgtttagattatcttttttcatatatatataagaatgaaatataaatttcatctactaagtattttgaaatatatttgtaccatatgtattagatttttaaattattattttcttttcacattaaaatatataatttttgtttaaaatatatataaaagtgtgaattgaattagatcgattacttacttgccaaccaatattcaatttgtgcaagtacaaattttaaattttttaatctaatccaatccgtaaatgcaaactgaattagataaggcaaattaaattaaattgagtattttgtaaatacctcggagtccttaatttaatttttcttattgttttgtatcttacacacccaatatttcttctataatttttttcttgtatgtataatcctaaattttaattcattttcgtccctaaaaaaaaagagtcatcttcctccactacaaaaggcttcaaaaaaaatttaagtttggaaaattatcattttgtaatattattgttagaaaaatatcattaagcttcatctaagggaaattaccaataattcaccttaagttccaatagctcatatcctccttcaatcactttgctccatgttctctttctatttttttttttttttgttttaaaatgactttttccaaatgagattaactaatgtttgggcctatctacttttggacccaaattatattagtttcaaagtgtgttttagctatgctgccaaaaagtgtttagtgtattttttttagtgagaaatgcttaaaaatatcagtcttgtttaacactctcaaatatatcacataattaagtatcaaattttatataatttaatgtaataaattttatagaatatcgctaactaattgtaagatcctatttttagatagtactattagataatactagacactactaatatttaatagcaatatgctctcttttataattagtactaattggataagtaatgtataatagcaataatctgttctataatattgaaggatttataacaaaccacttgaggctagctcaagtggccacagaagagtgcgtgtgtgttggaggttttgggttcgagttccaagttatgcatggttgtaatatataaacgcttaaataaagaaaaaaaaagtatttataacaacctatagcattaatattttttttttttttaaaatctatagtattaatatttttttttaacaatgaataaaattttattgagaaagaaattagcgttgagtacatcataaagaagaaatcgaagattcttcatcaaaattagctca

SEQ ID NO: 197270 - DNA, 1128 bp, Cannabis indica
ttattaacattttgattgacctagatatacaccaacattagatatattaattttttttttctttacaattgtaaaggcaataaataaattaaaatagaaagaaaagaaaagttcgtagaaagcagttaaatataaaaaagaataatcgcagaaaacaaaatataataaaatgttttgtagtccctattaagctaccaataatagtggtgcacatttctcccagctccaacataaggccataactctctctatctctccttctctctctctctctctctctctacaaagaaaagaagctaacccactcaaaacatgttgtcaagaggcagtagaagttctcttgttcttccactactagtcaccttagtccacctctgtctcactaggccttctttctcctcttcttcctccactgacggcttcgtcttcggtggttgcacacagcaaaagtatgagccggactcggcgtacgagtccaacatcaactcgctcctgacctccctcgtcaactcggctacatacgcctcgtacaacaacttcaccgtcactggctccagctcccacgacgtcgtgtacggcctcttccaatgccgaggcgacctcgccatgccggactgcgccacctgcgtcgcacgtgcagtaagccaactaggcgggctgtgcacgcagacatgtggtgctgcgattcagctccagggttgttacgtcaagtacgacaacgcaactttccttggggtggaggataagacggtggtgttaaagaaatgtgggccctccgaaggttatgacgccgacgggctgggccgaagagatgctgtcctgggctccctcgctggttctggtgggccgtaccgggttggcgggtcgggtgaggtccaaggcgtggcccaatgtgtgggagacttgagctttggagagtgccaagattgtgtgtctgacgccatcggacggctcaaaaacgattgtggtcaagcagtttatggtgatatgttcttggcaaagtgttacgcgaggtattccactgccgggtcacatttctattccaagccccataatggtaataagctcaactagtacttttctgttttaataattaaactagttgtttcttctcctatatatatatat

SEQ ID NO: 197271 - DNA, 1346 bp, Cannabis indica
tttttttttatatataaatcagcttattagattgtaatgcattacttcagcttccatttacaacctactagcacatttttaaggcctgcatatacaccaatttaacaagaaaaaactgcttataacttttcaaaccaatctaacctcctcttgccttatcttcttaggtattgttgctatgactctatatttaacattagttttaatttctttcacaattgtatctatagtttgtactctttggttccaaaaagtagggatgaaaattggtcggttatggtcggtttttataattttataaccgaccggtcggttacggtttttattttacgaaaactgtaatcgaccgtttagaaattgtaaccgtataaaattgaacgtactgtttttggcgattttcggtttggcgattttaggcagtttttggcggttttgacggttttttggttaaactatttttttttatttcaaaaatcgaaaccgaccgccatgtcaaaaaaaccgaatcgaaaccgaccgccaaattcggtgatgacgtggaactgaaaattcggttacggtctggtcggtttggtaggtttcggtttttcgttttttatgaacacccctaccaaaaataatcatttctattaccaaatactgtatatagttgcgacattgtcaaagctatcacatttttccgaaatttgctcaatttgcctcgatgtattctctttacaaatcagccagcagaatacttatctatattgtccaccccaaccacatcttcattgctgtgaaacaccgatggcttagatgacattcaaagaataaattggtaaccgtttctatgttattcccacataacaagcatatgtcatctttacaaatttcgaatctaaaagtctcgatttcacctacagtcttccaaaaatagccaaccacattaaatttatgcttcggcttgcttagccgactccaaaccatatcattccaatgaactcgttctcttgaagtatcttttattgccagcaaaccacaacctaaaaaaataaaaaatgtaacaaaaagaaaaaatataaatcaaatatttaattagtcataaaaattacaatattttgtgactaaatatatttttagttataatatataactaaattaatgccatttcaaaaaaataaaacaataacaataactatttgtatataattaatacttttgagtgacaatataatttctttaaaagtgatgacaattgtagtcatgaaaaatctattttttcactaaagagtagtttttgttttttcttatgtataaattaaaattttcttggactccatgatgtttagttgttaatgtgttgaact

SEQ ID NO: 197272 - DNA, 1656 bp, Cannabis indica
agagtccatcaggtaattgcttattatgttaactttaactacattactcaatgatgaaaaaaatacttgttttaacttttgtttgttacattttaggtactagcttatatgtcatttttacaaaaaatggagagtatatcaaaatagaaaggcactatacacaaaaatactgttaaaattactactaacctaacagatgttgctaaataatgtgtcgtatcaaggacaaatacaactatgttctaaattaaaacgaatccaagaggtggtttcactgtcgatttagaggggaaaatatgcacatgtaggagattccagttgacaggcatcccatgtggacataccttagttgcaatgtagtttctcagccatgaatctcatacttatgtgcacccttagtacaaaatagaggctttcaaaaagtgttatgaaaaaatagtttaccctgtgccaaaccttgacaagtggcccaaacaggtcaaatccaatctttcctccaggtgaagagtttttgccaggcaaatcaaagaaaaagtgaagaagagatgttgatgatccaccccctccacattgtacaaagacaagaagaacgggtgcaattatgtattatactaaatacaagcaaattggacacattaagaggacttgcaagaataatgcaacacttgctccagaacaggtaacacatttttagctgtaatctggtatatatctgtgactttgctactgtatgtacattacttatgtcaataaaataacattcattgcttttgtttagggcccaaagaataaatgaggaaagccaccaatttaaaatctaaacaagaaaatactcaagagaaggaaaacaaggaaaaagaaaaatcaccatagcaatgataaaaaaaattaagtagcatcacatttacatattcatctaacaaaatcgatgtatatttatgaagttaataaaaaataaaaaaaatgagagaatattagagagaattaataatgttaataagagaaatcttagagtgttatgtcactgccacatatctctcttatatatatgagttaattgcgttaaaactctcaatacttttacttttctagcaattaatctccaaaactcattttttgatggcaaaatcctcaaaatccgtgttctgttagcaactaagcttttccatccattttcatctattaagtgacatgttggattgtccacattgcacaatttacacgtggcacaattttattggtccatgtaattaattattaaaaatataaaaataaattaatttaaaattttaaaaaataaaccagaaaaaattaaaatattttttttttctttcttccactatcttctcttcaaatttctttttctaatttttttcatcattcttcaaaaatattaccacactaccaccaccatcagcctcgacaaaacaacaattgcccaccaccaccaccacctcaatattttgttgaaatccaaacacaataaaaaaaaatctaaacattaaatacctgccataatctaagatccaaattttacaaaaataaataaacccaaattaaatccacaataaaaaatcttagatccaaagagaaaaaaagaaaatccagagatttggaaggtgagagagagagagtttactcaacgccgaggccatc

SEQ ID NO: 197273 - DNA, 559 bp, Cannabis indica
gcgtctttagagaagaagactcttccatcaatgtcacgaacacaacatcttcgacatttttctttgacataatgaagagagaaaaggactgtaacaacggtgccactgccgggaaagaaactaataacatctctccgccgggatttctaaccaggtcttttttcccggtggccggagaaaaggtagggaatcagttcgttgaagccggttctgggtcgtcttcctcgcgacctcagtggttgaacttatcttttgcggattccggtggaggaggcgccgccgtccaaccgccggcggatgttaaagttttgcagcagaaacaacagataaagaaaagccggcggggaccgcggtcccggagctctcagtaccgtggcgttacgttttaccggagaaccggccggtgggaatcccatatttggtgagtttgtttccatggaaaatcaacaaacatgtatatatatataatatatatatatatttatattatatttactaacttcatttttcttcttctttactttttggaatacttagggattgtgggaagcaagtatat

SEQ ID NO: 197274 - DNA, 1546 bp, Cannabis indica
gtttttttatattataaattaaagagagtgaaagagaaaattactagatctgaaaaaagtggagagcacgtcgctagagatgacgattgtggccagaatctaccgagaagggagatgccggtgagtttgagaactttctgacattttatataaaaatggaaaaggaataatacctgcaggagagagagaggccgccggaggagaggagatcctgggttgggcagcgttttcagagcttgaagagaaaacgagatcaccggcgccgcttgtatgagtgagagagaaactttagagagtgagagagatgaaggaaccaaatgatgaagaatagctgaatagggtttcgggggcaaatgatatatcaccacttttaccgacgacacaactcagtcgtcgttaatatcaccaaaaattaagccattcccaaaaaccccatgcattaccattgaaatgagttataactatactatatacactcttaaatatatgcttttatatatgtgtaaagagtgtttctgtttacataaaaatgaagacttttaactttaagttgtaatataaaaaacattacataggcatcaattgttgatgggaatatatttcatgattatgggtgaatgaatttttcaactattctttgttgttttcatttgggaattccaagctgacagctacccacttgtcttctctaatggggagcacagtaatgtcttctgggaatggatgattgggcaactgtgagtacactctcaccttgttgcaaagcaagtaactcttcacatcactgctcatcgagtttgttactgaaggagaagaaacagcagagactttctcagcttcattcagtttttccatatgaaatgttattgcagggtatgagttgtccacttccattgtgcttacaatggtttctgctgaatctgctaatgtatcaaacttctctttagcttcaacataagtctgaggttgatgtggaaccaaaatgcattggtgtttgagactctgtaccaagtcataggccacaccagagctccaagttgatttgggagtatgtgctcctaaactagaggaagtgaagttgacattctgaattgatccacctgaagatagatgtcaagaaaataaacacattattcatttcataatttactattttcatggtaactggttaccttttttaagtatattccagtttctgatttacttgtaaagctgctacatcctaactagtcaaactaccaaaataagattcacttgaacatagaagattagagtcagcaaaacaaatcattagaaagaatgaactgttttttcggacttacgttccttaagagcgacataggcagcccttgcagcatccaactctgcttgtttcttggattttgctgctttcccatggaaaatttctccatccagctccacactagtaaagaaaataggcttgtggggttcaccacgttttatagttttataaactggagtgcttaaatcttctctctgaactatctcttgcaagagaatcttgtaaactcgagactcgtcctgt

SEQ ID NO: 197275 - DNA, 521 bp, Cannabis indica
atacaatacaataccaaatagaatttgaaagttactccattatgattttgatttttcaagagaaaaagcgtttaagatgttattgtgtcggacagtcttgtttcgattcaagctttggagagtcctatctgaatacttttattgtttagtttaatggtatttgagtgtcaatcacttttattttctcttgtcaatgttaaagtttgttttgttaagcgatctactaataaaattgcacattatttgctcgcaacttttgttttagttcaagttataattttgtagaaagatcagctcccgctctattcaaactcttattaatagattgaaacttttaaaacatataaaaaatgtcttaaaaacaacacattaattcaaacatttacaatcataagcaataaataagaatgcacggtataatatttgctaattgctacactttcatatttgataaaataacaaaccattcatatttaattccttttttgctaaaaaaatatatagttaatcttaattccttt

SEQ ID NO: 197276 - DNA, 621 bp, Cannabis indica
tcaagaaaatgacaaaataattaaaagaataagaaaagacagaaaagaagatgaaaaaaggttacgggaataataccctcatttagccctacaactcacaccttcagtaatgagtaacagaaaatgcaatgtgttaaactactgtcataagtaatacaatttccacaagtttaggcacacatatgatattaacttgagcttcgatcaggtgacatgtcaaatagtgaggaagtaaacctttctacaaatagtttacgtatgatgagcttcaatagtttacgtatgtgacatgtcaaatagtgaggaagtaaacctttctacatgctgtaattggatcatcggagtagaagggtggatatccaacaagcatctcatacattattgcaccaagagaccacctgaaaggaaggaagaaattagaatacatggaaaagcatatttttcttgtatctatggaaaacatcaaatgcaatgccagtggtcttgatggttcgcatcaaactcagagtccccttcaaagagcttttattgggataagatagtttgtcctgcaatttattagctcagctcaacccaataatacagtattgcttattaaaattaattttccaattaaaaaaa

SEQ ID NO: 197277 - DNA, 1224 bp, Cannabis indica
aatacatttaatattaactttaggccaattaggaaagacccaatttgtaagatagcgatcatccaaatttgcggggaccatttaatgatgacaattgttatacgctatcaaatttatacaataaatgttagaggatatgacgctaggtgaatccctaatttagtgggatcccatatcagaggtatcaccacataagcctttgctccccgtcttttagacaatcctttcgagaatacctcattagggtattcatatatgacacattgggccttctttcttctggccgagaatcctttccggactcggacggtgcggtcttgtaatggatgagtttaatatattactgaacacggagtcgcggactgactcccttctgggttgatctacccatttgggcccgagaatgtgccttctcaaaatgagacgaatcttagaagtacatgtgtcaccctgtcagaaacacggataatactcttaaatacttaggggttccaataagacctactaaatgaagaatggaagattgtggtgtaatccttgcaaagattaagcttaaacttcatacatgggcaacaaggcacttattatttgctaactgagtttagttgatccattttatcttgttgggctaaggaactattggatgagcatctttgtgtttcctcaaagtgttatcaaagaagtggaaaaaatatgccgagaattttcgtgggcgcaaaaaaataacagaagtaaaattcacatagcctcttgagaaaaagtttgtcctcctaaaaattatggtggtcttaaatttaaagaaggtcctaagtggaataaatctatatcgtaaagcatgtttggctattaattgagaaacatgatctgttttgggtcaaatggattagtgcattttattttaagggtactaatttctgggattgtgagttgaggcatgataccagttggtattagagaaaagttgtgtcatttaagacaaacttctggcaggagcaatatccaggctgttggtaggaatgagaggtttaaagttgccattctcgacaatagtatgcttcagtagatgtaggtttattatcaaaaaatagtgtggtatcggttaagtttaccgtagcaccaatttattctttggtaggtgcttaattctcattttctaatcaggaccctctttcgattctgcattcctattgatagttttctctgtcccgtttgtagcttgttgaa

SEQ ID NO: 197278 - DNA, 791 bp, Cannabis indica
agaattggagaatggactccatgaagacgaagagattttgtgagtagtggcagcagtagcagtggagtttaaaggatcgttgttggttccagtgtcagcagtagcagtagcagtggaagccattaatgacagatgtcaatggcgattgataccatgtagaagcttattaatggcagaaaacaaacacaaagaagagaaaacaaagcagagcataaaggcagagctaaagaatgaaatgccaagaaaagcttaaccaactggttagcttgagacctctttattatatacaaagatgatacaaagtacacgtgctgaataggaaaataacaaccaaagctgaacttaactaatattaacgaactaacagaaaagtaacagaatgcttaactaacatatttagacaaaaaattagttcaagttgttattattaattttttgtgaatagtaatttataatattatattgtttctactttttttgtctctccctttatgattcttttatttagacaaatatataatatttagaagtataatattaagtatagagaaagtgatgtaaacatttcatataaaataaatttgtgtgatttatttttcacatagctcttgacattttcttattaaaatctttcagctttaaatttgtaaacacatatcggagttcctacttgaagaatgagtaagttttaaaattagaccttaacactacatataaatatttatttatgcatatgattgtgctatacgtagtatgctaattgaaaatttactaataaagtagtattccat

SEQ ID NO: 197279 - DNA, 1151 bp, Cannabis indica
aaaattaaccatgatacatgacatgataaatatgaatgtgtacatcaatactaaaagaaaaaaagagtataaacaataaatgaaatagtcaaaagatgagttagcctatctaaaatctaaaacataaaatacatgatgacatgaccaattactagtccatccagtgcacttgtaaaattcactgctgctgaattttagtaccagcttggagacctgattgaactttgctttgaaaatgagtttccagcctaaaccaaagagagcacttatgaaattagaattgattataaataacaaaaagatgagtaagtaagagcaagatcatcatgttcatgacataccttgttgaacatttgtaataaatagtctcgggagaattgtaggtgcgtgcattgacgaacatcctcttcacatccgcaatgaacatctctagtgtaacgtaatattgctctgactctaccctctttgacaaagtccttagatctgcacagtttacacacacactacatctgagaacatcatcactatggaaataatctttgacataaaagtgttaccgtaactgcataaataaaggacaaaggaaaaaggaagcataatttatctttgatctcttaagataaaaaaatccaatactttcggtgtgtggttcctttggcatctgtttccataaaatattaggacacaacgcaaactgggtgcatctgattcatttccattccatttaatactccaaggacaatcaatttgaacataaacattaaagataattctaattggcaaaggctaaacaaagaaatggcacatcagtatccacaattttatcataaaacctttaaaatgcgagaataataaaatgatacttacccattggatctttgataatgtcataataatcaggaacgtcacgtgcatcgactggctctttgaatggccacgcatcaacatggtcatgcatagactgctttaaaaaaaaaagaaagaaaaaaaaaagctaaggatctataaactgttgatgagtgtggggaattcaggtgcattcttgaaataaatcattaccacatcaagttatgaaacactatatattaagaggttaaaggcgcttaaaatttgatttaaacaaaaactagattcctatttcctccttccta

SEQ ID NO: 197280 - DNA, 1829 bp, Cannabis indica
atttgattaattatatttaaataatggataattcatagtctatctatatgtgatatatagatagaaatctatataatcaagagtgcaattctaaatcaatagtggagccagaatgaattaataggatatgaaatttacttagtaaattttaaatctacttattgggagcttaattttataggcccatggtccccgcattatcaacgatattatcacctactagactcaattagttgatatgataagtcaattagatatcacaaatagactatgtcttatttgagaattttcacttagtttgggtcattttgagaagaaaaaataaataagggtttatttgttaattaagacactttgtgagtctaattaataaatacgtttaaattgtatttttgtttgataacttaggtttaccgagattttcaaaaactaaatattggagaactaaagaaataataaaatgtagaataaagagattgagatttttttatgtagttcatctgttaattaacattagtccacaagtcagtctattagcctctaaggacgtatttgatgtgtttagaatatttttataggaaactctatttttgtactcttagtttctcttgaagaagaagaagacaaagagtaatattggcagagttttagctatgtaaggttctaatcctcccttagtatggaaatagaaggatatttataggctaaatagcgagtatggacatacccatgatctgcctagggtttctgctaaaatcccactaattgggtaaattacatgcaaaagagagctggctattgggtcccttggaaacaattatccttgagcgtattgcaactaggtaattagggaccattttgtacgttgtggacacgtgtcacttaaaggtttaacctttaaaagtagaggacacgtgccatccaaaggtttcaccgttaaaagtagaggtctgaaatatctgtttggcaaaaaggtggaagaggtgtgcgcactaccatgcctggacataggggataagatttgatcttgtgctagaaaaagtataaatgtcattgggtgaaacgagttattccaatagtagacatccgcgacactctcggttggttgacatccgcaataggcccttcgagtatccatccgggtatcagctgggcaagcttcgacatttagaccattgcgggtttgggagagacaatatgccttccatgtctgggaggctaggataaggcgagttggctccgcttatcccttaaccttgacttgtcagtttcgtgagatttctccatgataggattgcaataggggattttaattagcgggattacgattggtcaatcccttcctttacgtgccacatgtcacatgctgagaaacacgaataatatttactcccaagctctcggggctcttcaaggtctgagagcttacagtcttcttctgcctattggagagaagttcttggcatgttgtgattgttaggatcgttgatgtatatctcgtgagctgtcatcaagtaaagggccataaattgaaggtaccacaagcgtggcacgcatgaggcatctttaatgtgattgttaacaacacgcgttggtggacgcattccttgggagatgttgcaatgatggcaggacaattgaaatgacatctcctttaatgcatacaacactcgaggcatgtaatgatgaagaataaacgacaaggttgagtttttacatgccaatttttcaacttcctatccatcggataaaagtgtactttttggaagaagagatctatgtcgtccaattcaaattgcaaagatctctactgaagtataaatggattt

SEQ ID NO: 197281 - DNA, 1817 bp, Cannabis indica
ctgtatttcgaggcgatgagaagggaagctgctgccgctccggtatagcttcagattcgagaatagtctgaaaatgagacggtttggtcattgatgatgatgatgatgatgatgattggcagtttggccctagctgaacctgcaagtgcctcaccaaagtccctttcattttgctccttaactctttcttcttcttcttcctgctgctgctctttaggtttacagttttccctctcatcaactctctctctctctcgctctctacaaatctgaaatagtactacggagaaagaaaataaaattaaatatattgggaatttcgggaaagaggaacatttcaaaaagcgcgggatatttcaggaagagctacaatcaggtgtgactcgatctatggtagatataactatttggactattaatgcttaggtggctatggatgtttaaatcataataaagtgaagtgaccattgggctgattttggagctcataaattgttagcgtaccatggacgatttgcgatatttaccatttagtagggctatttgcagtgtgagtagtgcaatttttaactattttttcaatctaatttgtatatgtagttttttcaatttttcaaactgcaccgcaaaaaaatagtacgctgcggtacaatttttgcagtttggactattactaaataattaaactatcacaaatacaacaaaactttagcaacacctcacaaaaatattataaggcttcaaaataaataagaaaaaaagtttcaagttacaacagtagaataattagtaggctttgagttgagcctttacatattggacataaataaatataaaaatttgtatttttataatatgtggtgcagtgcagtttggaccgcatagcaacaattcaaaacaacaaactgcaactcaccacgcagtttaggaaaaattcaaactaaaaccgcactataaagaatttcaaacaacattttttttttgcagtgtggtacagtgcaagtggtttaagcgatttaataaaaaccctaccatttagtaaggaataaaggagagaatagaacaatataaatggattgaagtagtggccattctttccattcattggcctttgatttctaccaaaaataagttggtgtggggccatgataattcatgtatctataatgtcaagagtggttactagttcgttctccaaaatgagaggcttgatagaggtttctctgctacaggccaggtattcgagttggtggaagaaatttttgaatcttaagattccttgcaaagtaaaagtatttgtttggcaaattttttctaattgaattcctactaacaagaatttcattcaacatggtcttctgagtgacaaaatttaatatgtttatgatgattgaatggagaccaccaccacatgtctgcatgataaaaataaaactaagtttaaaagccatttagttggctaaattgtatcaaaaataaggccacaggccgagtacaaaaaataaaagatagagaaattttttaaatgtttatgggggtcgatgggttcagatcttaggcggctaagttgttgtcttcctactcttagatgggattttggggttagtagcttcatgggcagcattgctctctagatgctcggcctcctcctcggatttctcccaagcagctttagcttcgcaaaaggccaatagtttgaccagctcatacttagcaaatatgtgaattattcctttggattagccatcctgaactcgtaaaagaccatgttgcctatggtatcatacttcttgttgtccttctgatgggcctcttcc

SEQ ID NO: 197282 - DNA, 608 bp, Cannabis indica
attgcacgtgctccgtatgagtggctcctaaaaatatttaggaataactttttaagaaataattaatatttttgtcttgtgaacttacaacactaccaaattatatcataaaaacgtacatcatgttgaaaaaactttgtgaactcttctatttacagatatataatatttttgttagctttcatttttttattattatttaaaagttgatgtgatattgttaattaatatatttttttcttggacattatttacttctaaatcatgcctcctcttaaaaaaaattaagattaaatcatttgtaataatttttttaaataaataaataacccttacctaagatgtattattggtcaattaatacattattgttgatttagatgtgaaacttccatcttgggtttttatatttaagtgaagaaattttggtaagaaaaacataaatatgaatttataaatatgaagaagtttgaatttggtttgttcaagtaaataaaatttttaaggaaaaaaataaatatttttagaaaagttattgtatttttaataataataaaaaaattaattatcataaaattaatttaaaaaaatgataaaatgagcataaa

SEQ ID NO: 197283 - DNA, 667 bp, Cannabis indica
gtaccaagacaaaatgtctattttgatttggtaggttggtttaattttttcttgttcgagaaaagactgtatgtcaatgtgaagaaccatagtttggacttcgacaacaatcgtatagatgcatgttaggtaccaaaaaaatgagctatgaattttggagtgaaaagtgcagtccgaagggggaccagattggcaaaaggatactttgggtgaattagaaattatgttgaaaatagggtccaagtttagagagaatttggttgtgagtataagcagccctgtgagaggccctttcttttgctgattttttggatttggaaaggatgagctttgcatcttggggaaaggagcagggaaatgagcaattctttcgtgatgatgatgatgatgataatgatggtgatgatgtcattatatatatgatgatgatttgggattttgatgatatttggaaaggaacaaaaataatcttatcatattttattaaggaaaaaataattatatcatacgagtttgagtattttttattttgtcatatgaaatgcaagattcttttatggagtggaggcaatttcaaattttcaagtacaacacttccattcttgaaagaatgaaagtttattgggaagactatgagagttaaaaaggatattgttaagttataaaa

SEQ ID NO: 197284 - DNA, 689 bp, Cannabis indica
aattacttagttaatagatgttatatatatagagaaacaaatcaatgagatgaaaaactaattaaatccattttcgatgactaacacaaaactaactcataaattaataattaattagcaccatattaatttatcgatagacataaacatttacttatatatatatatatatacacataactatatgatagatatctacacatattaggactagggcaagttactttatacgttacatgaagagaataattatgagttcataatatacaaaaaagttttaggcaaatactctagagtgaaattcttatttatataatctatatatagataatgtttcagtttgtaaaacctaatatatatagatgctaatatatagctcttggaaaataaaacttttatttcctgaagataaaagagaaagaaaaaaaaaggggtaaaaaatatcttcatatatgcgtccctggattttttccagagtcttcggtagccagccatgacagccaattaaaaaaataaaaaataaaaaaattactattatatatactttttcgtacgtatagaactcataaataataataataatattacttaaaagtaggtatgaatatgattgcagatttgcaggcaaatgcaagttggataacacagcaatctttaacctttattgacatgctcattaatttgttccc

SEQ ID NO: 197285 - DNA, 2245 bp, Cannabis indica
aaacttcttatgattttatattaatcatacagtaaagattacattaatatgaatggtgtgttttgttgcaggtgatcatttagttttcttcattctaaatgttgttgagtttattgctttcgcaatgaccttcaaaccttttctagtcttaactgatgtaacttaaaactcttcacaaattttagttcaactatttcatagttttgatcataatgaatgaagagacatatgttactgcaatttaatcttaaaataaggcaaattaagtcccatgaatatgttgtattattacaagattaatgtaagagaccctctacacaacatgttccactctatatcatacagtagcagccatggatatgagaagaaaaaggaacaaacaaaaaatcagtacactaaaccgggttcgaaatctgctaaatcaacggatcctgattcgataggaggcattagataagcagccaagatttctgaggctaatgcagcaacaagtgggatcctcttcaagttcttcactaagggaatatcatcactctgtccaacagcttgaagcttgtcattaatcaccaccattctatctaatttcctcttgaattccgggttctcaacatctagaacagctgggaaaattcgtgctgttgttcggttggtctgcaagtagagtgatgaacaagtgtttgagttaatcaatgctatacagtttacaaaactaataagaacacttaaaagagtctcacctcaatgatgacatgcatatcgaattctttcgtgttgagtccaatgccttcatagaaagctgttctttggcaatcattcagatacattgtcacataaacctgcaacaaagttattaccaaacttaataacatgaatttgtttcactatgttcacatttgttataggaaagcaaaatttaccgataagcaaaagaatcgagaccacagcttcgccttccagtcgttgaggaactgaggctgcgctttcatgagtgctgaaaagaaatcgccatgacggttctcatcttggcaccagttctcaaagtacttgaaaattggatagcattggtattcaggattctccttaagatgtctgtatatggtaatgtatctccaatatccaatcttctcagacaaataggtagcgtagaatatgaactttggcttaaagaatgtgtactttcttgcctttgtcaagaatcccaagtccaaagccaaattgaaatcagacaaacccttgttcagaaacctaaaagtagtacaaaacaacaagagttttacatttatatacaaacatatagtgaagcaatgatgtgtgtatttatatataatatatatgcatacaatattacatacccagcatgtcttgcttcatctctggacataagagagaaaatctcagccacaacagggttggttttctgcagagaaaaaaccccaaacagtaatcaatcaaactagcaatcctcaatcatttccgatactcttcaaaacacatgctggaatattttttttatggcagtgtttgttataattacaatattattcagtaaatttttttaaaaattttaaatagtttattgtgtcgaaaatacgtttgatgttttttgaacacgcgtaatagactagaatatcatgaactctgactttagtactttaaagtttaaactatttgaaaattttgagcagattccagcatatcattttagacacacagattgtaattagaagttattcaaatattcaagttactgattagcaataatcaaatatattaactaacaaacttactgattagcaataacagaaaatgactcatcattaaagaaatgtttagcacaaagtgagagtaaaaaagtttgtacctttaatcttcttcccaattctttgtaaagaagaaaaccagagaattcagcagtacaagacctttccaagaactcaacaaagatttgtctaagaggaccttccattttatcagcagcttccttaaactccttattcctaacgaaatgagtctgattataatcagtcttgaattcctgaagcagagcaacaaattcatcctggttcaactgtttgttaatctcagtgttgaaaagggtctccatttcatcgaaatctgtagtgtaaaacctcggcgtcaaaagggtctcattgatattcttcttagaacccttcttcgaagaagatgaagtaagaagaagtagttgcagacattctaacagaggtgaatctgggtttgtaaagct

SEQ ID NO: 197286 - DNA, 1318 bp, Cannabis indica
ttttttttatgataagattgtggtggagccaactatcataatacctttttatttatttattttaaaaaaaatatatataggggcaaaataaatgaatatttaactttggtgagaataaataaaatataggggataaaaagataaaaatacaaatttaaagggcaataataaaaatattttaaaaaattgtgtataaaattttaaaaataaataaattaaggggccatataactctcacatgtcactcaattattaattttttaggcatgtggattttgtttttgagtaatgatttttttattttcttattatttttcaaaattaaaaggagactcactacgcgatgcaaatgttttttttcattcttttaattattttgacaatctcgaaaatcacgtatcgataatagtaactttatatcttaatttatcttaattggattattagtaatcacttcgaaagttcttatcatagatgacattacctaccgcaagctagcatttaaaaaggactatggtaaacttggaacacttaattcaaacaaataaaaatatttgtaaaaatatttttacaactacactatacaacacgttttatttttttttttatttaacgacaactctacagcactattatttgtttttgtttttttcttaaaaataaagaataaaataaaataaatgattgggtgtagcacatcctagagtaaagatatgggtatgtacgcgcatctaacacggtttacattatgattgatgatatatgacatatatcacataagacattacctaaaacatatttaatgatgatatatactaatactatgatttcatttcatttcatttgacttgtagtaactactaaatacttatttaaaaccaggtaccattgttaatatttgtcatcctttgacataaacatacaaaatttaatactatttattaatagatatagattggtgcgtaaagataatatttttgctttgtttcttcctattgtatttttcatttcttctattttttagtttgaaaaaaaaaagagtaaaatttttgtattcaaaatataaaatctcctggccaccacaaaaataaaataaaaattgtataaattctctagacaaaaaaattaaaatatatataaataaaataatctttagttcaatgcgggtcaaacttaaattaaggtcacaaacttacactcttaaattagaaaaaaaaaatatcattataaaattaagattcaaatatttcattaaaaaattataccaaaaaattacacacgaattatatttctttgggtttgtttggaacgtcgtatt

SEQ ID NO: 197287 - DNA, 746 bp, Cannabis indica
aaaaaaaaaattcttgacgctttaaaatcgttccctatataacagggtataggtgacaattttaaaccgtgccctatactataacagggtataggcaacaattttaaacggtcaggaagttcacattagcgacggtttttaactgtctcctatttcgcccgttttacgacggtcgtataggcgacggttatagaaactggcgggaatactttaaatgactgtttaaaaacgtcaggaaaaactatttttgtagtagtaagtgaatcagattttgagtcatcagttgatgtgtttgattacaagtctacttaggtggcgtacctaattagtggcacttgtcatcttatgattggtccatttttcatacgtaattagtgccagttaggaccttgtcactagcatgataggggctcaactgtgtacactcttgccttatcaagccatataataataaaacgatatttatctatatttccttgtgtatgcttctatgttgattatgtgtttcttattaatttgttgcctttgttgggccattgagagccatttgcttatgtgtttgcttgttagttgtgtgagactgaccattggaatgacttatgttgtgcttgcttatacttcgtggttgcactcaacatgtatagacttgtatcatgtttaacgtccattgagtttgtttgtatgtaagcgcgttaattagtttgtttgtatgcaagcgcgtttaggtccgtggctaaaagtatcag

SEQ ID NO: 197288 - DNA, 763 bp, Cannabis indica
ccccagactctagcgcacggactaggacccagactatggctggccccgagctcgaaccctaagctcgactctgaactcatgacccaactcgaccctgaccgtgcctcaaactttgacacaaatttggactaggaccttgaatcagatctaagcccgatcttagacctggacacgaacttcacctagatccggaccctgacctggacttaggtcctaggtcagggtttggagctgggtctagatccacaaccagagtcggtattgggatcgagtttgtagtaaaaagataatatatataattttactatacctattaatataagttaataccaaataagcttataataaattatgttgtgagatgtggcgcataaaaataaggaccctaatttataattaataatgaatttgatttattaaataatttaattaatgatcaatgatcatataccacacccaaatctttcaatcaataaaagcgtttgcttttgatacttaataataacattcatattgtaaattaagaatatatatagaagaatcattacccaccatatttgattctctagctctagcaatttttattatatatatatatatatataatatataattataagggattcatgattaggacacttgccctaatcatgctttctactaactgaataattggttagcttttaaagtagtgttaaactttttgcatttaactaatccacactttcttcttcttcatatttattaattaagtcttaataat

SEQ ID NO: 197289 - DNA, 2727 bp, Cannabis indica
tttaaaaaacttaaccactattttaaaatttagatgatgtagtattagttataacgaatacaattatgaaaaaactattccgacataatttttcaaaaatagaggttaagaagatgtaataagatgtcataattagtaattaaggtggtgtttagttggaggtaaatgaaataaaatagaaatggaaaaagaaacaatcttcatttcatttgtttgattgcatatttaagtattagaatgatattttaatataatggtctttccactattttagtagattaactattttaattttaaaaaaagaagaaaagactatttcaatgaatgaaaagaaaaattaataactaatttttttttatgtattttaaattttattccactctatttatattcctattctcatttatattcttatatttttattcttttcaaatgctgtaataagaaacatatttccggttaagaaacatgtaataagatgctgtaattagtaattagtttgaacctaaaagtaccacatcgcctggctcctttccaacattggttcttgtttttgaatgtcggtggtgatgaatacgtaaatacgtaaatacatttcttcagatttctagttttagttcttgcttaaatctcttctattgttattagaatcatgttgtacatcattcatttgatacgttgaagtatacgtacaaaatcttcagtatcatgggaacatatggtgtgattaggactttccttgcattattaggtaagctttctaacaatggttgcttgatgttcacacagaaatttttgttaagaataaatcattacaataagaaaatgatggataaatcattaagaaaattaagttctaatactggtaaattaaaacggttttaaatagtgtttcgaatcatataacaaaactagacaaacatcaaccaatagataagtaaaagagaaacaacaaaaaattctacattaaaagatggtaatttaagttgaaagacaaaaccagtaatatgtctccttcaatccttcaacaatatccaaaacttaaactgatctgaaacaaggctaacaaccaaagatagaattttttgaaagctcaaaacaaaattttaaatactcaataacaaatgtttatgcattggcctttttcaacttagcgagctcttgcttgacaagtccagatttctgcaaacacaaaaataacattttagaaggtataaacttaaataatatataatacaatagcaaaactaaactttctgataagaaccagctgtataagaagaagagagagaacataaatggcacaaaccttaatcttggccaacataagcttgaaccgatcgaagtcattgagggctgcccttctcttctggacaatcaattttcttccccaggagctgttctcccacttcttctttacatctgcccaatttagacacaagaaagtgttaaaccaaaagatctaagatatgaatccacattacaacaaatcacttttcaaaaaaatgaacacctaccagcagcttccatggctgcaagaagttccttcttcttagggaccctcttgatgtcaatcttgatatcagtgagggaaagcctcttgaagttcatctgtgacctcaccatgtcgggagaatccacaagagcctgtacagacacaaaaaacgaaggattaacctcctcacgcacacctcacaaaaacaagggagataaaaaaatcaatgtaggccaaaagattagcattttcaatcaaaacaaaattagttcagtaattttcaatgtttaacactaaacaataacataagttatcaaagccaaattggtctagtggagattgagctaacactgaaaatagaatactacaaaatccactaaaacatctcagaatgtccatactatgttcaatcactggtaccaaattaataatttcgaatttattcataaaaaaaaaaatcatcagaataccaataaaaataatatctttatcctttagcagtaaatcaaaacgaataattagtttcataccacagtgagtgtatctaaagttactcaatttttttgattcaaagttagaaaatccataaccacactattagatcaaagcaaagactccatcattttactaatcgccaactacagcaacaaaactaacaataatacaaaaaacctaaaagaacatttctctttcagggtaatgaagccctaagaaaactatatcaaagtaaaatcaaaaccagaaaaagaaaagattaagaaaaaacatacccggttctgatcaatgacgtcgacgataacaacaagctggccatagtcctttccgtagttgacaagagccactcttccgatctccacgtacctcttgaacggctgcaaaattaaacaaagaaagaaaaataccaagatatgagcaattagaacgataaatatgttattctgaagatcaattcaagcttagaagagaaaacgctcaccattttggatgagtggtgtgtgtgaaggtgagaggtgtaagaggcggaagcaagaggacgaagacacgaatataaagtgttaagagattagggtttttctatagagcttcttttatagtctaccagttcggatcaaacttatatttagggttctattgaaatggagagaaatgtttgggcttctcttttatgggcctttgtttcgaatcagataaccacacgacattatttattgttttgggtttggcgggttttt

SEQ ID NO: 197290 - DNA, 803 bp, Cannabis indica
tccattttactaattcatagagttctactattggctctccattttgcacaaattattgtacacatgagtaacttaattattttagttttttttacctatatttacttttggattagaattctaacacttctagtttaatttatacatctggatttatgttaattagcagatcttatgttaatttgggttttagacaaaaataaaaattagggcacagtgaaaaaatgaagttgttgaaatttaaactttgaacctcttaattgttaaactaattaaattactattggggtacaatacatatttagtattaatagtattattatttattttattattaattatattttaatttttttttttaatgaaacttaagtggtgggagacctaaaacggctgcctctgtcttaactcaggatcgaccctcttagtcaggtcactgagagaattctttcttaacatttaataaaaaaatttgctaataagttgcgtattatgcgttgtttttaattagaggtagatttactctatgttagtctagtcctaattttaataaagcggataataatttaaccaaaaatgagatttgcatgaatggatgagattcctccttcaatttgtttgctttttgttcttgtgatcatattactttctttagcataacaaatgtcaaatatcaagatataagttgccattaaagtcacatgtttataactaattattatcttattaaaatctaacattgacatggataaaatacagtgggagggcaggggcattatttttagttttattttgtctatata

SEQ ID NO: 197291 - DNA, 907 bp, Cannabis indica
tttattattttaatgtctttcgtttttttattttctcatttgctttattaaactagatgaatgtcaaatttagttatgcatgaaatcgacaaaattaaatttccaatgggttctttaactgttaactttcatcaagaattttgtccaaccatttatgttgggcccttaaatgtaatatagcattaggcccactgaaattattataacataaatttatgaaaatactacatttttaatgtgaataatacaaataattttttttttcaacacaaatttttttagtattacatgtaattatattttgttgtagaaatctcataataacgtggggaaagcgtgtttgcatgaatatttatgatgaaaagcttccattttaatgtatttaattatgcctaatattcaattttgaatttggtaatgtaaatctcttaataacaaaaataataaatggtacaagcaaaatgcaacataaggttgtgacttggggttgaaatggaatccatctcctacttcaaattttgtattaattaattaatacgataatgaattttggggaagaatatttaatatcaagtttttttatgtttaaaattctactatcacaactacttgagccaatggaaaaaatgtacctaaagaaaataatcacagaaatgaccaaagtgattgatgtctattataaactatctatatgttcctttcaaaaaaaaaaaaacaacaacaataaactatatatataaatatatataattttaattttttaaaaagaacatttacgagcaataaatattctctttcttacctatctattttaatttatattctattttgtaagcatttggaccctagtttgggagcgccactccaaagtgttatttttgggccgttcggtataagagactgaatt

SEQ ID NO: 197292 - DNA, 1563 bp, Cannabis indica
ttaattggctcgtacactcacaaaataataggtagagagaggagagttaacaagaatacattcttttttggtacactaaaagtagatagttaataagaagaacagcggtaattggtttcttttattttagaaaggaaaagaaaattatgtgtggattgtgtataatttgataccaagtaaattggttgcatagtaattttctttttcttatataagcttctttatttccaagtccaaattagaacgtaattaactgatcaatcaaaatatgtacatctaaaaaataaaaaatgtgaactttgttacagttattttgtaatcagttggcacatcccaaccatataaaacaaaattttaaatcctcctgtagctaatgaaaaattgtcaactaagacaatatagttccggtccgtacaatttgaactatttataaatatgtatcacaatagcaacaattaaataatatcatcttttatccttataattattatttaaaagaaacacggttaaaaaatggcatctttcttatttatctcttatatatataaggtgaataattttatagattgtcgttttgttagagagcctcacgaggggtatgagtatgagtataattatatatattgtgtggtaaaatgaggaagaaggtagaagaaaacaaaagaagaagagaagatgatatttattagtgtggtggtataagtattaattaagtatatatagtaagtaagagtagcagagccctacatatcctattactctttaaggatctattcaattatgtatcgtctctttataacttaacttgtcataaataaaaagggcattataacgtacaactaagcgtgatccaaccgttctcttaaatacctcacatgaattttgctcagctccatccattattattattatagttattgtcatcttttctttagttacaatattttttctaatagtactgtgaacccattaactatactatttctcatagcctctcagaggatgagcaatgatattgatcatgatcatataatcataatcaagagcggaccacgttgagatgaggttgtattgctataaggtgccgtaccgatatttaaatcaaaatatatagtactgaatatgaaccaatattaatatcccatttttatggtgcccccttagcatttttcaataatatattactaaaaataataataataataataatacatattagtggattgaaatttatacaagttttaaaattatatatgaatttttttccttaaaaaaacgcatacgtacgtgcaaagcttttagagggatttgaactattactacgtacgtacctagtttctcctaaaatgtatacgatttagtttaactttatttgttaattacgagttttttaaataatatttaatactatataaacacaaattctcaccctaaaaaaataaatacacatagtcgcatattataaaataattgctttttaagttaaattttggatctgctaattatcatataatcatttttcttttgaagttgtgagcaatatgatgtatcggaggacaattt

SEQ ID NO: 197293 - DNA, 907 bp, Cannabis indica
gtccttcttagccagagactacagagaaaaagcaaagtccaaggtggaagatggagtaaaacgccgaaaaaagtggcgggaaatagagaggtcgagttatgggaagaaaatagtagaatgagagaatttaaagagtggaatatagtttgaacccaacagaaaaagtacccgccattttctttgagcaagaaagagctatggagatggttagaaagaagtgagaaaaaaaatgttaggaagaaaaagaaaaaacaaaattaatgttttattttttatttaatttttatatatgtaaaattatcacctactactcacacacaaaatttattccacgtgtcaatatttcatttgaataataacacctcactaatgtgattttttttagaggtcctgctatatatagtaaaaattttctatgtatatcaatgtcagtatttttattaattgactaaatattttaattaattgtcatcattattctactaatcaaaatttattttcttattgattgtaaaaatattctaataatgaattgtgccaaaaaatttgatagaaaatcttataagttctcatagctcacatttattcaatcaaatcactatagaagaaagctatagtacgtaagagcttagaagaactttgcatgcatcattggctggaggtacactatctctcattcctggtcatttttaacaatccattttatgatgaatttaatttaggatggttatgtctacagattcatttcatctagcacatagtgtacatacacaccatattcgaagactatataatatgtatatatatatatatatatattcaatcgttgtggcagagtgtgctttaacaaatctcatcttcattatttatatattgagaggagatagatttttatgcctcactaaag

SEQ ID NO: 197294 - DNA, 1506 bp, Cannabis indica
atatacaaactataaaattacaagtttaagatttgccacaaagtttagctttcatctctaaaattaggtgaaacacaacaaaatttcttatctaagttatataattcattactagtcatcaaataataagttggtgactaattagttttaggattaataagaatgagtgagttgatcataattagctattggattaatcttaagttacactaattccatagtgagaaacacataagaaaaattacccaatcagttccattcttatcaatatctccaacttaataagttgaacaaattcattccaaggaatagcatgaaacaaacattgaattatataggcagtgaatagtgaatgtatattgagaaaatttggcctattagaaatttacaatactttagattcaatttagagagagagagtccaagatcatagtgagtgtgtgtggagggatgtgaaaaggtagtatcactcttgaagtgatttccctcaatgtgaggcatttctttgtaattacttgctgtgttgagttgtaatcttgggctcaatctatggtgtactactgactattcctattcaataaagatccattattcatccattattgggttaagttttctttgtcttatttcaattaagttcaagttttggttttgtgattggttttagtttttgatttgtgtttcttgaacattgttactgctgtaacaacttgttttgagggtgaagattcaccacaatcataatctctagtttttttctctacgatgtgaattaatataattaacaaaaataccattagtgttctctgagtggcagacgagaaataaagatcaaaacaaatgatttgttttctttgtttctgaaagaaagaattggttgaaaagtataaagtattataaataatttccgaaatgaatgagtttaatattgtaccaagtgatacaatttgaaggtaagtaaagaggcattgacccctaaaatgtgtgtaaaaaacaagaaagcatataataaaagaaaagagaatggttcgtatccccttaggaaggtggcgcacctaaatgtgcataaataattaaataaaagactgaattaagctcattcagtctatgcttcccatcccctaagaatggtggcacgtgctactcggttgactcccaatgtaaaggctcccattctcagattgcagttgtgtgttttgcacatgctcttgatgttatggaaagctccagtcatataccgcttaagttcattgttcaccttatcttcatcccacatgaaaccttgaatgttctgaaaataataaagtggtcgtgagtcttaagtaaaagggttcattaaaatgaacttaataagttttgttgtttacctgaacccactcaaaatagctaacagtcaccccaccagcatttgcatatatgtctggaagaatgataactcctttcttagacagaatctgcagatatgaaaactcatataactactcaacttaattgaacctttcttaa

SEQ ID NO: 197295 - DNA, 1097 bp, Cannabis indica
cataactcattctaccaaagtgcacagcgagctggaatcgagtgcctaattttatatgatagtaaaaagtaaagggggggggggggttggaggggcttgagtggctctattacctattgtatacatagatatatattgaagattaaaaagaaaatatttaagcttgacacatatatttttttaaaaaaataatagtaattagttgtttccatgaacaaaatgaaattggagaatttttaaaagcaaactttggcacaaagaatcatatgacatgccatttttcataatgaaagacttaaaaggaatcgtacaaaagcaatacataattggatggtttttttttttttgagaaacaagaggctgctacaagaaaacacaacagaaaccaaacaacctaaagaggagactaaaacaaagccacctagtcttcttctcgcaacctgagagctaactttgcaagggagtgggcgttgctattgcactgacggggaacatgcagcaaagaaggtttggggaatctggagaggaaggatcttatctgcaaaatgagagtagacaatggggagtaatcttgccaattaccattcaccttggagacaaggttaaggaaatcggaaaaaataaatcttgggatcaaattggaagtcatacaccactggaggccttcataaagagcttgagcttcagcaaatattggagaagaggcacctgacttgaaaatctttgaagacttttgaatgtgaaataggccctgcatgaaaaccaggcctatacctgtagctggtgcatcaatactcaaggcagcatcaacaaaaagagcaagagtggttgcttgaaggaggtgagtcaagtcagctgaggaaggggaccgagacatagtggaggcagaggagtgaatttgagcttacttgtattcctgcagataacttgaaacaaaatcttgaacattatcagttacactgggttttttgaaaaaagatgagaaattccttatattccatatctgccaaaattaaaaccaaaaatacggggaaggtcatccttgggaagtaaatagtaggcgtgtgaagagtaaaatactctgatgtctagcctgc

SEQ ID NO: 197296 - DNA, 959 bp, Cannabis indica
agtctaggcctctctctctctctttctgctttattattaagagaaaagttgtacagaaagagagagattccaccatggcttacacaagcatacattaactaattaatttattatttaagcactaattagttaattaacacaactactttttgaccatgttagtgctacaacttttatttccattgttaattaatcaataaatatatattataacatattctctctctctcttaaataattagatcattgcaaattattattaattatttaattaatgataaacaaataaatgaaaggctacgtaatccatgcaaacatgtcatgcaactatagaactacaggtcgtttttattaattgatactttacaatgttacataacagtgactgtgacactaaccatatggccaatttgcatgcatcgagcccccgaaaatatcccatatatttatatatttaatatagcttaggtctttacaaaactttattctttattatgtaataatacgtatatatataatatgtggatgtggtgatatatcactgctttaaaactgatgcttttgtgagcagaaaccatcctgatgagtttctgtatttggcctggaatgaaaattaattaaattgagatcttttttagtaatatttttctttttattttttcttttatgaggttgaagttaaaataatatgtgattgtacagccgaggaataataatatcgacaatgttacacattttcatcatacaaaaaaagttagcagacatatatggaatacttttcttttttagttatatatttatatatataatatagtagtagtactatatccatttatatatataggtagggaatagagatcgagagtccacaaatcagcataatattagtactatttaggaacatgtgttgaacagatcttgctatattaactactttctgctagtgtcacataatatat

SEQ ID NO: 197297 - DNA, 1069 bp, Cannabis indica
cgagttcttgagctttcttcttagatcgatcattgtgtgtactacatcttcaaggatctcttcttcaacatcaaccaaaaatgagtaaattttacaccttcccttttttgcttaaaattatttcatcattttgcatgtaggttctgcaaactgttggttgaatgttcttcgttcttggatcacaaatctacattttgcttgttcattgttttgtttaccctgtttgttaagggtcgaccaaactctcgcttcccgtatactttaatttttaactgtgctattatgatttaaagcactttagtaatttaggttttcaagaaagcctaaaaactcttttttcaaaacttcatcaagaagatgaattcttttgggtttgatccaaatttttctctgattggaggactggaggtgtttttcaatgacaggaacttttcaagatgttctgtgcctcacctctctatccttatattatagatgaaatcaggtgaatttcggagaggtgatcatcaaatagacgacgacctgctcgagctactttttgaggactacccaacactctgagctactagttcatcttcatcattaagtgaatcttcattttcttgagaatcctttgaggaaggattttcaagtgactttttggagtccaaattccaacatatcactatatcgaccaggttggtcatgacaattacgatcgacacatttgggaactgaattgagcttggaggcaattccttccggtctcgtgaacctatattgtttggtcagacgtccaggatagtagagcgctttcataacccgagccaaaagacactcgggcatagaaagtaactttcaaccttgtttagctaagattgcctgattaaaatcttctaagtcatggaacctaatgccaccttgctcttttagcctacacaactttctccaattaccccattgtagcttgtgtatttttgtggaggaaccccatcaaaagcgagcaatcaaactttcaatatcatgaagaatccctttcatgatccgaaaacaattcatgacataacacggcaaagcttgaatcactgcc

SEQ ID NO: 197298 - DNA, 1323 bp, Cannabis indica
ttgagagatttcaggaaattaaggacttcaatgaaactcttcaaacatgcaggaaaattaaacctcattgtaaactttagccatagcttcaagatgttcatttgtagttctgctacgtgatgtgatcccagctgtatacaataaattattatcagcttcggcatcttcagtctgaacttcttcccagtcactgccctgcaacatgaattaaataaggaattggcgttttgtcaaagtatttattttttattttattttttttttggtggaatcaaagtaaattttttgacaagacaagacactacaggatattacctcctcatcatcagccaaaacctgctcttgtatttcaaccaatgcatctgccaatagagccagtatctgcaattcccaggagaaagggaaacatgaaaggttattgctcatgtaatattctgcttctgaacaagtataccttgagtaaatatttcaagctccaaaaaataatcattcaaccatgccatagtttataatatggtggtgtcaaacaaaatattgttcactcatactcaactgagtgatgaattataatttaatgtacctttgcacgaagtgggaccacggtccactgatctggtgctaatttagctttggagcgagtggttatccctgcaacagactttacaccaaaaaagttcaagcatctgaatcagtaagaaagactcagttactgttaggagtaaggattgaaccttaattagatgtccttgtacatttacttttgctaattcagcatgcccagtagatagcagtaaggctaaagcagtcgtagtcactttaatttggtatgccccattaatctctcctgcacgcaattgataagtagaaaatctgtaaagtacatctcatttcgcatggcatacaataaatttttgtgctgtggaattactaaaaccatcatatcatgatttatacatacacaggacattgtcaccatctgaaacattattatttacacggcaagaagctttaccttgttgtttagtccactccaacatcaaataaacaaacgaattatcatgaccttccgcagagatagtggtcagtaaatcaataaactgttcgacatttggtacactcaagtgggcctgtatttagataaaaacacaccatgcagagctcattttaagaacgggacaatatgtgaatcacaaagctatgcacgaaaagaagtatcttttagtttggaaaaggaaaaagaataatacataatagtctgtttttgtagccttcctaaacctgtagagcaggactaatagtaattaaaattatttatataaatat

SEQ ID NO: 197299 - DNA, 1460 bp, Cannabis indica
aataaactctaccccaacaccaataatgggttgggttcgagtccaagtttgggtttgagtcagggtcctgggtccgggtctgagtctcgatctgggtctgggttcgggtccaagtttaggtctaggtcagggtcttgggtccgggtcgtagctctcagttcgggttcgggtcctgggtctcggtccgggtttgggttcgggtccaagtctgagttcgggtcgcgggtctgggtcaaggtcctgggttcgggtctgagtttgggtcttgggtcccggtcctagtttgggtttggattcgagttcgggtccgggtcccgggttcaggtcccagtcctaggtcccggtgcccgtcttgggtcctagtgccggtcggtcttgggtctcggtcccggtcctgggttccggcctcagtcttgggtcctggtcgcagtcttaggtccaggtctgggtcccggtcccgggcctcggtctcgggtctcggtcacagtcccgggtcccagtcccgagtcacagtccctgtcccgggtctcggtcccggtcctgttctcgggtcctgggttcggtcctggtcttgggtccagggtccgatcccgagtcttggtccgagttcggggccgggtctcgatcccggtccaggtccaggtccgggtcgcgggtcctaggtcacggttctaggtccgggtctaggtctcggtccaggtccgagttctcgggtcctgggtcccggtctgggtttaggttcgggttcaggtctgggtcctgtgtcaaggtccaggtttgggtcctggtcccagtctcgggtcttagtcccggtcctgttcttgggtcctgggttcggttttggtcttggcacctgggtccgatccctagtcctagtccgggttcggggccgggtcgagtcggggtcttgggtcggggtcctggtccgggtcgcgggtcgcaggtccaggttcgggtctgggtcccgattcgggtatgggtccagttctgggtccgagtccaaatcccaagggatccgagtctgggtccgagttttgaattaagttttttttttaaaataaattaaaatcgggtcggatcaaatgagatccgatccaaaaaaaattaggcggggcgaagcggatctgatccaagatccaataagtatctgaatgtttcggatcagaggtgatccgtcagatcggagctccaacccgctccaactaaatggatctttttcacatgcctaaatcgatggggtggtgactagcatccaacgtccagtgggtgtgactcacgagtaaccactggcgaaaattgtaggtgaggggcgaaccaaagggaaagagagggggagaggggatccgttctggtgggaatcgaatgtgaaagaagagagagggagagggaggggttggtggaaatcgaaggggacgagatccgatgggaatcgaaggggaagaagagagagggagaggggg

SEQ ID NO: 197300 - DNA, 2291 bp, Cannabis indica
tagagcttctctctttagactttatatctctagatttttgagtttctaacacttagtctattgttgtaattacaaatctcgtgagaaatttaaactaatagtaaacgtagtcctattactatcacgatataaggggtgaactactataaattattgtgtgtcccttattaattactcaacaaattattcattctcaccaatctagcaagcgggtgtggcttagaagtctaatccaaatttctgagtcaatattttggtgctttcattgagagccacaactcaagtaagttactaatgaagatggttgcatcacgttctacaagtgttgatagaaaaactccagcagctggccaaacaactggggacacgccaattgatggagttggaaccaggattacttctgtgccccaagtgccaggagcaggcctcaaaaccatctcctcaacttgtcctccaaggccaccaccaactgctcttggggctggcaacaatgactagatcccacctggggagccacacgtagatatagaagaccctgaggaggtcgatcctcaagtagcccagcttagccaaattgtggctgacttgcaacaatagctgtgagactctctcgataagcaacacaaacagttttaacactggtttgtgtaaaactggaagaaaattgaaagccaacgcgttgagcaagaatatcagagagccaacttgtctcaacggattagagaggcttatcgctctaatcgtggaactacttcccgaagaggtatttctgagttggtgaaagagacaccttgtctacccgttgatcatgtgggaactagtgcttaaggaaaaactcttaatgctcggaacaccactactacacctggtaattgagcaagcactaggcaaacacaaggtgtggagatctcccaagggaaggtaacttcgagcaagagcctgaaaggactcaagttcgagggcaccaattaatgggccatcccttaacgttgaacgaccttgaaacaatgagagaaccaacaggactcctccactaagtcctcccgaacgttctcatgagaccaggccttgagaccccgcaaagggaaaaggacgtgctacttaagctaaaggaagtagtaggtgacgctactttgaaaccgaatgctacaaaatttgacaagtaaggactaatgagccacttcatacttagaagcactttcgagatgaaagaggggagttgtaccgttactttgcccatggccccaatggtcaacagtacgagtactttcctcgagtacatggagaggaattgaacctaagtgaacaattcaattctctttgcacttaagatcctactgaagactacttggagggaagtagccactacaatgctcataatgagcactctcacagcgattcgtcccaagacgatcctgagttcattttggaggcctcactagagttgccttcacgagcctgtggtcaggagacaactacaagacctaggtcgattggagtacaagaacgacctggaagacaaagagacttgcgtgaattattgaataagaggagaataatggatgtgggaacttctagagaagaccatatccgagtaacagaagctccatctgggatgcagaccaccactcatggggtcaatcaggcaaaatttgataccttgactgctttagtgaaggggatcacgacacctaagttgtatgaattcgagctttatagagaacaacgctcgccactctccaaatgaatcaaagctcttcccattcctctgaaaacccttcctggcattaatacaccgagaaggaagatccactttctcacatccactactataatatcctaagattaaggaaatggattagtgaaccctaactagtcgattatgtattattatgaaattatattattatataatctattatatgtgaattaatttgataagtgacatgttaagactccgttggtgagccaggggcatttttgtaattttgtccaaagaagggtaaaattgtaattttaatattatgacgtgcttgtggactatattattatatagtttacttgttttttcccatttcaggtattttctgacaagtcagcgcggtataatcataattgggtattttgggtcgaactggttcggggccgaaatacattttcaggattttatattggcattttattgatatatgaatattctgaaagttatttgaataatgtggtatgtgaaggaaatgacaacattgctcttttatgcatgtttatgtggtgtttggccctaggggcatttt

SEQ ID NO: 197301 - DNA, 1110 bp, Cannabis indica
taaaggccaattgcctgtcgttgggcctcccgctcctgccgcttcttctcctttttctttggtgatttagctttataatactcagcaccagcagcttcatcatcactttcatcaacagattctgtaatcaagtactgcaaataattaactcacaacataccacaacactctacaaatactaattactaaaaacaaacaaaagatcaacaaaacacctcaaacaagattttgtattagcaacaaaacataaattggtatagtcgatatcatatccctgaatttctatttacaaaagatattgcattaacttgcattgttacagacctacatagctaaagtatcctaataaaaccgtaaaactaaatcaagtgaaaaaaaaaaagcgaagatagagaatccatgagtgaatttgataaaaggggtgtaatgcttaatcatatatatgtatgtgtgtagatgacctgcatgactagctggggctgacgatgaacttgctccagaagcaggcctccgacgcatccgccgtgtagcagtagaacgcaccacagtttcactttggcgggcctgatatggaaataatcagatgaaacaatttcagaaaatttcttctcgagtagtaaatataaatataaacccctacatatatacaattataagacgaaaccctaacctgaggcggttcgtcatgttcatgagttgattgagaatcttgacggcgcttccataggtaaagggggaccaacgcagcaagtagaagcattgagagaattatagccaacgtttcctccattgttgacctccctggcttacaaagagaaagctcaggaagaaaccgagaacgagacgaagagaaatatttgaatcgtcgatttgatttgaaaatgccttatgattaagaaatgaaagaaagaaaaagaaagcatcgattatgcacaaaattgagtatttttttttttatttaagcttttatatatgtatctatggtatcatttgggactcgaacccaacaccactaacatactacttgagctaacgctaaataagaataaattagattttatattcattttctttacatcgatgttttttgtttggctaattagcaatttt

SEQ ID NO: 197302 - DNA, 1309 bp, Cannabis indica
aaaaaaaaaaaatactatatggtcattgtcaagagaccacattgcatatgcatatgtgggggcaaccccatggagatcgtctaatgtgttatagaaataaaagatattactgcctagcccgaaaaacgtcacctgctaacttaattacgacgtcgtatgtacactcataattcaatcaatttctccatgcaaaacaaaatcccaccaataactgactgccacgtcatctcttaaaaaaactctaattaatcatatataagttatagttatctcctccctcgcccccgtcgccgccgccgacgacggtgtcggactgttcttttcttcgtcttcatcattatcatcatcgtcgtcttcggcattgtttgcagccggaggagattgtggcagtctcgaggaaaaacttctgaaggggaaaccatcgtcggcattgtgggcgtcctcgccgtcgaagttgcgtgaatagcttagcgcgtcgtagtggaaatcggcggagtggtggcggcggtggcgaccgtgcctgatacgcgagattagggttcgacacatgttaaattcatgataatgattttcccggaatttcatccaggcggaggagcttcggccgagaatccgagacttggtgacgtggacggggctgatgggatggtggtttgggtttttatttggggcgaaacagcatgagatgttggagatggaggaatggagtttttgagatatggaggtgggagagtggctttggctgtgtctatggtggctgcggttggggttgcggtcgtcgccatcgccgtcgtcgaccgcgaaaccgttttgatcggtcatgaggagagagagagaaagggaagatggtttttgatggttggaaaagtgttttgtctgtgtgaatttatatgtgaagatactttttgaggatacggagagtacggagaggaaaggttgagagagaggagagtctagggcactatataaccgttctatttatatatattgcattggatcttcttttgtttatttttaaatatatattttttttgagaaaaagatttttaaaagtaattattagttgcattgcatatatatatagtgaagatatttaaatgaaaataatatttaaaaatagataaatgctaaagggcacagtggtatttagcatcttcctatgtacctaatagcagtgctcttaaaaataaatatgataagaattaattattattattattattaggggaattactccatatactatttttttaactttatttttttaactagattgcaaccctagttataatagggatttttatataga

SEQ ID NO: 197303 - DNA, 1999 bp, Cannabis indica
ctctctctctctctctcttcgtgatggacctcgtcaaagtcgaagctcaactccaattgagttgtctgctctctctttttctctctctcgatcttctccctcataggccctctctttcactctcttcgtggtggacctcgccagagctgaagcaccaaggctcttattgagccatctctgagtcccattcaaccatcaaagctcggttttgattgtattttttcaaatctggatgtcttttttttatttattatttttattttagagaaatgttggtggtggtggtaatggtaatggtaatggcttggtggtggtgtggtggttgtggagatggtttttggggtggctctttaagtattttaagaagaagaagaagaagaagaagaagaagaagaagaagaagaagaatctctgaccttgatctagggacccagacttggacctgcacccgagacttgggacctagacccgaacctggaccaaggactcgagacccgagactcagacctaggaccagacctagacctggacccggactgggtctcagactaggactcaagacccggacctaatacccgtacccaggatccgaactagacctcggacccagaacttgagaccccaaacctgggactcaggaccatgaacacaaaaccggaaccttcgaccctaaacccaggatctgggaccgggacccaagatcgtgactcggacccgaacctagattgaactccgaacccaaactcgagacacagactcgatctggacctgagattgggactcggactcgaacttagacgcgagaccaagactctgacacggactcgggaccatgacttggactcggacccaagacccgacctggaccagcacttaggacccagaccgaacccggacccaggacctagacctagatcgaaccccggacccagatcgaatcgagacccagacccgaacaccagaaccagaccagactcaaactcggacccaacccagagtcagtgttggagtcgagtttattgaaaatatattataattttacacaacctattaatacaagctaataccaaacatactattgtattacataatactaatacaatacaatctaacacaatacaatacaaaataatatgacgtaccaaatgagttgttaacaccgatcttcgttaactaataaatatacttcagaatatcaataataataagaatagtaataatactaaacaagaaggcgtacgtttacgtggttttgaagttagtctatgagtacatcttattcttaggatttcatgggttcgtagagtattactaatacaatatttttttatcttcttaggattctcaatttggctgccccttaatttgggaattttttttcctatttataagtgtttggggtggtagttatttcccttggtcttatcttcataacagttcatgaaatgtgaacaattcttacgttttatatttacgatacatggataaaaagaaataactgtttttgtttttatccacagtggttgtgttgattgagtttagttgtgatgtggtattgcaacctgctctatgcctcgcaatatacaccagtaactgttttttgtacttatcttgaatgcagtttctttgtcgagatatcatatccaaaatacgcctcacattcttctgtaatgttgggaatgactagacgtgttttgtgagatgctaataagagtatctatctcgcttttgctgtttgaaacaagtctttagatagtatttgtgattgagtcatttgtgcttcttaaagtcaattatcttgcgtcgtttatgaatatttcgagatgaatatccttttgctcatatcccttagtctttcaatatactcacgagtatgtgagtcaatgagttgcagactcttaaacaattcattatctactctttccagcgacttgtctcttcatattctatacttgttttgtttatcctttactctctgtgtaatgaccacatagttaaa

SEQ ID NO: 197304 - DNA, 3109 bp, Cannabis indica
cctccatttcatcgcttctgaaacaaccttgagctggtttagaaaacccagcaattacttatcctttgtagttgcgcactactgctccaattcctaatttcttgtcttgaaaattagtagcaacatcgatattcattttaaagagattaccttcaggtggcatccaagctatctcattcctaatatggatgatgtgccatattggttatttactgatgtggagggatgcgattgctggtgtgcagcttgccacgaagagtgattctcaagctggtttacatgatgtgcagcccttgtatgagtgtccaaacattgctggtgttggcgggcattcatccggcaggggttatgagaatcaacattaccaaaatgtcctctctgctggtgtgaaaatcttggctgatgtgcactgtgattctgggacagtcctgatgcagttgaactctgttgctaatttttgcagctgttgaccttggcagaacggtagttttccaagtagctgaatgcatatgctactagagaagatgggtcacgttgtgagccaccatgtaggactttattcctatcattctagttacaccataacacacatattaagagttctacttcagctttatgcattgtttgtgccaagtgtattaggtagtccccatttaacataccatgagcgtgttgataatcaattgtaaaatgggtcttttttcaaactgatttggcaaatttacacgagaacaatgcatgtccaatcgattcccaagcattcttacacctcaaacatgacgtagagtcaatgattttccttttatgcaaagccgaggctacaggcaaagaatgttgaatgacttttcaagcaaagattttcacttttggaggtagctgtaaagcccaaaaaaatttccaccagcttttgaaatcatcagaagatgattcctgattcttctcagagatagagtttgcaagatgaaagcccgtcttcactgtatatacctcagtcgtgttgtggtgccaaattagccgatcttgtgattggtaaaagctaaagggaattgtgacaatacgatctatgtcaatttgagcaaaactatcctgaagaagaggtaaattccattccatagtgtcaagaataaaagtggagaccggaaaggatggtggcccggtatcgctaattggtttgaactcgtcatgtcccggaatccaaggatctaacccacttctaacttgataacaattaccaattttaaatcccattccctttagtagcaattctctaccctaatgaattccttgccaagttaatgaaggagaatgtccaagctgtgcttcaaggaaggagtttcatgagaagtacttatgcttcaagagtcggcctagtagggagtctggattttcaaataatctccatgcctgtttcgctagcatagcttgattgaaaacgacaaatgaacgaaaacccattccaccctcaaactttgatttgcataggaatttccatcttttccagtgaatctttgaaccatctttgtttgtaccccacccgaaattagccatcatggattctatttggttagaaaacccaacaggcaatctgaaacaactcatagcatatgtagggatagactgaaccaccgcttttaaaagaacttctttacctcctatggaaaagagtttttcattccaagcatgaaggagtttccaaattctttccttgacattactgaacaattcttgcttgttatgagaggagtaggcagggagaccaaggtatgtttcatgacactcacttatcggcattcccaaagtttggttaaagaaatcatttgcatcatttgaattgttcggagagaatgacatgatcgatttgtgagtattaagaaactggccagatgtactcttttgattgccaaggctgagctattatttgcttgacaaaataagagactatcatcagcaaatagtaaatgagagaccgacggggcacgccttgtgagctttaatcctaacaagttacccctttgttcctcttggtgtagtagccttgaaagcccttcaaaacaaattaagaataggtaaggagacaaaggatctccctagcgaagacctctagttggccacacattccctacaatctctccatttatttgaaaggagaaactattggaagatagacaccgcattatgagagagatccattgatgtgcaaaccccattttttccatgatagcggataagtaatcccattcaactctgtcaaatgccttattcatgtctagttttagtgttgagtatcccttattaccttgtgtcttgtgtttgagatgatgtacaagctcaaaagcaaccagtatgttgtcgatgataaggcgatttggaagaaaagtgctttgagtttccgatatgactgaaggcaatacatccttgaagcgcataactaacactttagaaatcagtttgtaaataacattacaaaggctgattggtctgtaatcccccatagcttttggcttcttcacttttgggatgagagttatgattgacttgtttaagttgctcatgtcatggccttcgtttaacactcctaaaacaacttttgtcacatctgaaccaacatgttcctagtagttttgataaaacatggctgacattccatcacttcctgggcttttatctggactcatagaatgaagagtatccaaaacttccttatccgtaaagggccttaggaggagctgattcatttcatctgttacagtggtgggaaccgactgtgtaacctggtttaatgcagaagcatcagtacctgatgccgtgaacaggtcctccaaaaagagtaaataatttctgtcaattcattcttcgagcctattgctacacctgcataattttgcaacgttttgattgtgttattcgacttcctggatgaggcataggcatgaaaaaattttgtattctcatctccactttgaagccaattgaccctggacctttcttgccaataaacttcctcctgcgttaataattcttccaatgtgtcttccatttttttcagcaaagtcatggagtttgaagttcttacattttggttgttgagatcctccacttccttatgtgc

SEQ ID NO: 197305 - DNA, 777 bp, Cannabis indica
ttgaataacaatcaatggattgaggtttctcctcatcctggagctttagttgtgaacatcggagatcttcttcaggtaaatatacttgtttggcttagacctttagaaaaaaaaacatatcgtcccaaattttcccagtcccaaccctgtctctccaatcaataattactatctatttttatttttttcatctcatttattaatctttccaaacaaactgctctaagtgtccgtttatttctcggtaacctcaaaagttagaacaaccttttccacatttattacctttcttattaattatttaaatatcatcacttaataataataataataataataataataataataataatataactaatgtaaatcaatctccaaaaatcttttggaggtagttgaaatctgatttttatgataatatcttactattttcgtagattgacaacggattttgagccgatttgaacatttgaaggagctactaacaatgagaatcttttatgggtgtgacatggtcctcaaccacctttagtgatgaagcccatattggagggcaacacccccgagatcctcgttgaggggagtgataaacatcctcattgggtgacccccccgggacccaacttgaggggggtgacaactaccatcgtcgggtgacctcgggactcaacttgagggggcttacaaccaccatcgttgggtgaccccctgggacccgacttgagggggtgacaaccaccatctttgggtgacccccctgggacccgacttgag

SEQ ID NO: 197306 - DNA, 543 bp, Cannabis indica
aaaaaaaaaaaaaaaacgaacacagtactacattacctatactaaccgataaaaaaaacgaaaaagaaatagaagaagaattaagaatgaatagtgaaaaagggtgggaagcaattgaataggtgttaagaatgtgtatcagaaattgttgacattgttgtccatatctttgcagatacattgtcggaatttatagcatcattacaatgcaatcatgcattgagctgctatctgtcactttaatgacgaaatatttaaattggatcatatcacattcaatgagaataaattgaacgttgagaattgagatccacacacaccaataatcataattatatacttatatatatatgtatataattagaatatattatatatgtttatgatttccaaacatataatattctcctaattaaacttcataatttatgtccatgcatatacaaatctcgttattgagatctcaataattaatgatgtacataatcattaacataactgtaggtatacatatatattagaaaatacaataataattatata

SEQ ID NO: 197307 - DNA, 716 bp, Cannabis indica
aaaaaagaaatctctccatctctgagtatgttgacaaggctcaatccatttctgatgccctaagtgttgctgctggttcctttgtcaatgatcaagatctagttctttagctccttaatggccttagaagttgactcagagttgtatctgatattacatcaagaagtgatgccttcaccgttgaaaaagtgcaggccctacttgagagtaggttggaatatcaccagaacatgtttgatattgctgttaaaatgcaagttaatcttgcatttgaaaatgggagatctagtggtcttcaactatttcccacttttaagaattcacaatatcaccttcctcaatcctcatttggccgtgggaggggctatccatgatacaatcaataacgagtcatctatcggtttgacaaaaattgggttgttccaagatttaccattattcttgtaacccttcaatgttgatagtggacgatcaaacatctctgagacgagcttgcttgacagagatgtaaccctatttttgagtgagctccgagatcaaatctctttgtgtttttttatctctaaccaacaaagatctttgttgttgtttagctgtgtttgtgtttgggttttgcaagttggtgaggttaggattcaaagcttagaagaagacaaagactccttggctaaggttattgggttttgttcaaattataaaaaagtattttcgattaa

SEQ ID NO: 197308 - DNA, 930 bp, Cannabis indica
cacgttccagcactgagagtgagttcagagctctcgccaatactgctgttgaactcaaatggattcgatctctattacaagagcttcaagtctctgttcataaaattcctgtcatttgggttgacaatcaaaaagcattggcacttgcagcaaatccagtcttccacgcacgctcaaaacacattgaaatcgatctccattttgtaagggatcaaattctggataatcaacttgctgttcgctatgttccgtccgttgatcaagctgcagatgttctaacaaagctctctcaactgacaggtttctgtacttaaaatccaaactaaaaatggctccaacaccatttagtttgaggggagatgttaatatagttgaatagactctgttaagtgagtattttctgttattttgtaactgtttttcaactttcgtctgacacacttatcttgtaactaattctgttatgtgtctctaagatgtatataaatactcttgtctattcaataaagaagttaagttctagtttttactctccttcatcttctctgtatttctcctttatttttgtttactctgttttcttgaacttcatattctgaggttctacaaggggttttgtttttaggtggaacagagtggttttgactcattgacttgttgaagtcaaaggaaataaaatggccagtcttgacctcagcaaaattgataaagtgtattgttagtgtaaggtaaatttaacatttaaaatccctacaatattttttaagacataaaaaaataatttggatgatatataggattacaacttttatttttatttgtcctatctaaaatttctattggactaattctagaaactgagttagctacactttgaaatataaaatggtgtcaggtgaaaatatacaattgggagatataattgcacta

SEQ ID NO: 197309 - DNA, 1790 bp, Cannabis indica
tgtgccttattagaacattttttgagagtcaataacataatcttgtttatatatggatagtattacaaatattagtagtatacacataattaagtaaccttttttaacaattataagtcacctttagtttcacttgatgtcttaaattatgatgggtctcatatgttttttttcttgtgctttcttctttcatgtattttttttctcatatatatgattgtttccgcaaaaagtattttgggcatcttttaatgaagctacaagtgatttcggggagcaaacaaaatctctaaggagccaaaatagggccccaacgcccagattgacattcaacttggagtgtgtagttctgctcctcaaatacaaattatgctctgggcattcttcttattttggttaaaattggtatatgagaccttgtttgcaatctcaaataccttagaagtattaaaacaagctttgggaaaatcctcgagaagcacccaacacctaagttgatgtatgacctgatgcgctaagttctacttatcagattctgattttgtctcaagcatttgactagtttttatagtaaatgagagttacgacttgtggtatgtcaaattcacactacgatattttacccttttaacgaggtggaatatcagcaaaattaaaaagtttcgagtctaccaaattttatcgaaaagcgatatctccgaaaactagtgaacaacttcaccaaacctgataaatttgttaagtgacattttttcactcacccaacgtccagattgacgtcagtatgtcaacttgggcgttgggtcctgagcagcctttagtaaaacggtcataatgccctaaatattaatctgattaacgcaattcaacttgcattctaaagctctttcaagtcatatcccaaaaccatatcgtaagtataaagatttaaagtccaaaatttgtccccaagacaagtgcaattttttcacagattacccaataacgatccaacgaacgagattcaatttctaccattagatcatcatcaatggacaagatcaacccaaagtggatttttttttgtattttttgtattatattattaatattttaataggacatccttccttataaaagaaaagctccactagttcatttttcacattcacaaaagagtccataaggtcagagtatctatctagaaattagagctcttgccttggtcaatttcttgtaattctcgtcagtaataaaaattcgaagtagacgtagctttattaccgttatgatacggggagtggactactataaatctcttgtgtctctctatttattacttaacttatattttttatcgccaatctagcgagcaagtgttggctagatttgtgtcaataaagagcaactattttctttatctctcttaccctccacccatcataccttccttccttcctaccaaacatagcctaaattataagatatgaagccttatggtggtaccatatattattgttgtccaacctagtgtaattgttagattccttttctcaatttgctaacttctatacttaattgcttttcttttgagagaatgtgacagatagagtttcataatccgtgggtaagatgtgcaattttatattgtctggaaaaggtcaagtgcgatgattttaagacttcgtagatacgagactacctacatcaataagatgcctttttttttggtaatccatcactaaggaactcaaaaattaagcatacttgaccaggaataatctcaagatgagaacaacctcaactaagga

SEQ ID NO: 197310 - DNA, 727 bp, Cannabis indica
aaaaaaaaaaaaaaaaaaaacaaaaacaaacccatcaacatgctctaaactagaataaataataagtaaaattttagtattgtgatttatatatttttatattgtgtatattttaaaattttaataaaatataaaataacgtatacatatgataaaataatttttagtgcaataatatttttcacctcacatatctatatagcctatagggtcaaaaccccaattgctgcaattaattcttttttagaaaaataaaataaaagtttgaagttttgaacttttgtgacatattgaattttaaaaatatttttaccactcaaccaaacaactttaactaatataaattgaccagataaatatttgtataaaggctaaaaatttacttagacacaagtccaaaaaggttaggatgggtgctaatttcaggtgactcaattatcctatctatgtcccaaaaagcagccatgcccatcaatcaatatcattcacaatattattatacctatcaaaattagtgaaaagggatatttatagcagaagtattcaaatatatttttttagttattatgtttgtaatactaaaatatttaaataaatattttgacagtgaatatatctaaattagtatatattagtaatactcaagtacttaatttatttttttaaccgtgaactataacaaattttagtatactttgtaggtcagatcttaagtactaaaaataaa

SEQ ID NO: 197311 - DNA, 2234 bp, Cannabis indica
aaactagacaacatccctaagctaaatacctgcaacaaggccaaccaaaaaaagcattataggccttcaaaatcgggtcatcattgcaaacttgcacttactatttagttttatgaacatgtgtagattgaatttcataaaattaaatataaataaagacaaagtactatttgatgctagtgaagcaccgattgatgtcagagttgtaatggtctctgagaaacttgcacttgctattattctaataaggtaaaattagttgccaacttaaatatggagttattatttattcctaattgttcaattcacgcagttataagtgctcaaatatagcatcttagtttcaatttaacctcacttttattttttattatggatattatatctacatgctctctttttatttatactttgttttgatataaaaaataattacaaaaactttaaagtttttgtgctgatgtgtttgtatatgtgcatgtatattttagtgtttatgtgttatctaagtaatgatgatagtaagcataggggttgaagttgaagtgggaatatctgatagagatttcggtacttcgaggctctctttgtttgatctggtattgtatctggccattgaagaagaaataaagcagagaaaatagaaagagagagaacgatgaagaagatgaaaaccagagaaagaaagagaaagaagaagactgaaagagaagccttatccattaatgagagaagcaaaggaatatatacaaagttgttacagtagaaaacagctggaaataacaaacttgtaacaacctaactgctaactaccaaaccagaaaagtaacaaccaataacggtaataaccgaaataacagacttagcttcctttacactcttgatcggtcttctctttctctctcgctcgccctacacctttacccttcaccaatcatggctttcatcctcaacaaaactgctgttgcctctcaattgcgctctcactttcagggagcaagaaacgatgccctttccctctcgcgtcgccaatttcatgtagaaccaggaaagcgcgaactagctctcttggctgaggacccatctttaaagcgattcaagtcacataagcctaatgtgaggcgacttatgagagtgggagatgtactcactatagttgttgtagcaggctgttgctatgaaatatatactagagcagtgatgcgagaagaggctcggaaacaagcaaatgcagaaaattgaagtgcataatgatgagtttatgtgtgtctctctttggccttaatagttcaggcaactatagcaggaatattctgactttcaaatgcagaaaaaatggctacatttacttggtttgaatttatgttttccagcctctttcttaataagatttgttgtagtggtgcacttcaaaattgtcaatgaaagcaacaaaatgctttgttcttcttcaaaaaaaaaaatgatagtaagacaagacacatgatggttaaagaaaaataccttggaaagaatctatatatctatataaaggagaagtatgaggcggtgacgtgacggttcaaaatcactctaaaactatttttcccttctctccttaatttactctttttttctaaaaaaaatacaagttcgcattcgttcttggtttgcttaagtaaggtgggatttaatagttgatggtatttcgaaaaatactattagggtgactttatgaaacttttggtcggttaatatcatcttttagatgaaacttttggcaatataataatatgccatattttggattataaactagatactatgcaaatttttagaatttaaaattttaatcaatatttggattatactattatgtgttaaagaacttttattgttgtttgaactattgattcttgaaaaattattaacaaatttgcaattatttgttgtgacaagtatatttataggaatggtaaaagagatatcgtgtcggatcgggttaatgtcgggttgagctcgaaccaacctgattgacattcttatatctattttatataaagtatacctatataactgaaattcttggtttttgagaattttatgagtgacttttaatttttatttaataaaataataaaatattatttatctataataaaataataataaatatcctaaattaaatatttgaatttgaactgatattaacaatcacctcaattagcaaacagagactcgcctggccatttttc

SEQ ID NO: 197312 - DNA, 651 bp, Cannabis indica
taccagaatcttgaattttatggctaacagtttttcaattcagctttcttaaaaattcttgtcattttctttgttatgtttcactattttcttagccactattttttgctcaagagagttgattggtgctaatgtgttcttgtgttgtttctttttttttatttccatttttttaaaaaataaaaaaatatatatataaaaaatggggcttatattgaaaaaattgaagaaaaaaggggggcatattttcgtgggtttttgttctttgtgagcagttttttcttttattttctcatttatggaaatatacttttattgcatcttatttattgtgtttccttttattattttttattgtttggggatttgtttttatttttttgtgtgatttttggaagtattttttaaaaaatatatgtatgttgttagtttccttttttgtggcatttttgtataaggcaaagattttgggtaagtgctttgtttctttcgtttattcagattttgtgggattaagttatattttcctttttcaactttttgtaaccattgaccgaaatttgaaaaaaaatctttgtgtttcctttttatcaacacgtggtgatcaaggtaagaagtttaatcttttttagtttgagaagacattttgtt

SEQ ID NO: 197313 - DNA, 1582 bp, Cannabis indica
cctgcatatctgggggattcgttccaagtgctggaaggacatgtacacttctttcacttctacatatggaacctgagaatgagaagaccaagaagttagtatgctgaccaaacaaaaatagtaaaggtacgaggaaagtctccttgaccactgcttggagaagttctctccggacccatatccaggaacgtcaagcccccaggtaacaaatgaggaacttaaaaagaaatagaaacaaaatcctaaattaagccctaagtccgtgaaccataagggttccagatattagatcataatttcggcaagacctccgaggagccccatcgagatctacagaattaatagtctagcaagtaggaaagtcttagttttctacgcatggcacatattcaaaatcagcaaaactcttaaaggtctctatgtcatcgcctaaataagtcaaatagacgccccacatgatgatgtttccaattctaatcaatagaaaacccgagtttctcatggttcatggcattcaaacgaaacccattactccaaagaatgatacaaacaattaaaaataaaatactgaaagactaaggagtagtatacttgtattaatcaagactaggggtaggggttgtgagctttgaactgtcggcgaagttctcatctaaaaaatatgaagtctcctcgtaagttcctaggaatccgtttgaaaatttgatgacagggttggcgaagtgatagtcacaagaccagagttcaggaataaacaaatgcaaagttttaaaagtccattgatgagtttggaactgggatcggacatccaccggacatgccaggctttatatcctgggatccaggtgtatgtcgcccaaggggtctctgtgcccctgtaatagtgttgtgtcatactttatttccttctgaggcattgtcttattctttgaataaacaccccgcgcaagagttttcatgtggagatgaatgtacaattagaatacttatcccccatgtatgggcgacatgccgctcaggtttatgcctgggggaactcttcatgtcgatgaactacttgtccagtaaccatgcttgatcttctcttaagaggtcttggttctttagctgtgagggataaatttatactaaaatcacaatccactttcccctaggcagcatatgctatgccgcctaagtactgtgcctcgagcatgctaggcttcaatcctttatttcttactcacttgcagggtaggaaccccacagacttctttcatatgataacgtgtcctctctttaaatatatgtcgtgtcacttagttaaaatattaaggaaaaaaaaaaaaaagataaattgatgaagatgatgaatatgaatatgattattggagatgaggtttgaagaaaattaagaattaaataataaatttgagtaaaataataaattcataagtaaataattaagtgggtctattgaagagtttaataaataatttttagttaagcacccttaagaaagagtattattattataattattattattattgggtatcctcccatacattttataagtcacaccttataattagttagtgat

SEQ ID NO: 197314 - DNA, 2416 bp, Cannabis indica
ttaccaaacaacaccataatatcatcagatgaaaatgacttagtggcgaggtgtttgcgcacaatttcaaattttaaagagtatgacaacattttttcagaaaagaatatcgttattctgctttaaatatgaaaactaagaatttatggtacaagtattccaatttctcccaatttttttctttcaactaaatttcaaaattttaaacaaaacttaaaaaaaaaataatagaaagttaagaaacacactgataggttaagtccatcaaatatatttgctcgctatagacgttttatagatgagataattgaggaaaagcacttatttttttttttttgcatattaaataaagccaccaagataaacctagcacgaatattatcatcataccatcggttataatttctcgtgattgcgtaatcagaatgtttacataatttgcttcaaggagattttacagagacaagttgaaatagatttgcaaaagaagttctattttgattctccattcagattggaaatcaccaacaaattcagttacattgtaataggcataggtattcacatagaattttcatttcatttttattgttattaggctgaaataaagaataaataatacagtaaataagcaataggatataaatataatttaaccataaataaaaaaaaataaatatcaagtttagaatttcaatatgatgcatgagcacacttagaaaaatacataaaataatttgaaaattccatgatgagattatccaaagattaatgttctgcggaaatgtgagacacaaaactcttcattttcaagtggttttcccatgttggaaatgagaaatgtaaaattgtaagtcttacttctctaacttcatggatcttagttattggggaaaactagactgacgattaaaacagaattaaaatcggataagcaaaacccaacgcaccaagccatttgtcaacctgggcgatgggtattattttggagcttccgagatgttgctttaatacttctaagattctaaacttgaggacgagatctcctaccctgtttttgaccattccgaagagaatgctcgaatcagatttggtatttgaatgattgaaaccaacgcaccaggttgattgtgaacctttttttatgacaaaaaaaaaggcctggaatacttttttgagaacttgaaataacccaagttgacaatatgtcaacttgggcgctgagcccagtaccaagtgtcaccctgagcgctgggtcccctttatggccttttaaaagttccatttggtccatgaaaatagttgaatcttaatctttgctgaaaacggagaagatgctcgaaagacttcttggaaaaccttgtcagaattggcccaagttggcaaaatgtcaatttgggtgctgggctagccccatgtgtcaacttaggcactaagccttgcttctagcatctagaaagtgctattattttcattccctcgttttgatgaagaagaagaagatgaaaaattcggatcgtcaatatgatacttggaagtcacccagattgataaattgtcaacctgggtgctgggtgtccagtcaccgagtgctttgggtgctcaaaaatgattttttttcgaatttgattctaatgcctcaaatatatatatggtacgtctggttcatgtctcaatgtaaagtttgacccatttgtactaagactgtctcgaaaattaaaactctagttaaggatgtcaacctaagcgttgagtgaaaccctaggtgcccaagttgacttctggggtgtaggtccatgtaatttcagcttctggggcatggatttgattgcttcatatcttcatggtacataatactaaaatattatgagttggaaacaagttattgaagtccaaacttccgtcccggagttcctgaaatcaacttgggcgcagggctaggacccctcccaggtcaactactatgattcgggtctactcttctgtgacgtcatctttcttgccacgtgtcaaacattgatgtccacatcactagaaaaaattagggttaacaataaccaaatgaatctctcttccctttgcttaaatgatttttatttgtcttttttaactggttgtttaaattgttaaataaagtgcgttctaaattgtaattatttataatgtatttaattttttttaaagggtacactaattcaggttggtttgtatggtacaagtgatttttcaacattcatagcggaagctttgactctttgaatgggattgaattgggcttgtacttttgttctccatgatcaagtttatttttgtggaaattacatttactatgggattttaaaagttcttatgataaatatggcacatttaagtttgaccaatttatatgatatttttttatttttagatcttttta

SEQ ID NO: 197315 - DNA, 747 bp, Cannabis indica
acaagattcataaataggtttaacaactttaaaatagatttcagcgaaaaatggtcaagatcgcacgcagttacatgatcccacgagatacaccccatgctgtccgagctcaacttcccactgaatacctattattgtgataaattcaacacgcaagtacatgtatcgttttaataagtatgactcaagtaagtgagatcgtttccatgagaactatagctaaataccaaacaattaaattcttgtttctgttaggaaatcggatgaagggattttaaaactaaataatctaagcaaaaactaaataacaaaacaaacaaatgaaacaattaattacgatgaaattaacaataatgaaaatttaggatgattaattttgattgcatctactttatatggtttaatataatataattcttaaattccaattttcatgtgatagtggatttactaaagaaacttatattcgggctaggacatataaaccttagtcttttctgctctcgtgataaatttaaacacataggaggcattaggcataaaaatcctaaatgctacataaaccatgtaggtactctcgtcctatatcgaaatctatgtctatttcactatagcataatcaacactcttctctcaaattttgcattaaaatcattaaacaattaattagtgattaggaaattaaaagtaattaagtacgaatgaaatagatgtacaaaaaatagggaaagaactaaatcatattaa

SEQ ID NO: 197316 - DNA, 1587 bp, Cannabis indica
gttaattgtttcaaatctatgaactgatgatgtatcttttgaattcaaagaacgttgctttcttggatttgattagagattgggattattttatgcatctcttatttgatacttctttctgtaataataaagatatattggatttttcatataggttatggcgtctgaactcatggctatagaaaatgagccacagccaattaatgctggtcttccaagaaagcctcgaattttactggctgctagtggaagcgttgcagccatgaagtttgctaacctatgccgtacctttgcagaatgggcagaaataaaagctgtggcaacaaaagcatctttacatttcattgataaagcttcacttcccaatggtttagtgttgtacactgatgaagatgaatggtccagttggaaacaaattggagatagtgttcttcacattgagctccgtcgttgggctgatatcatggttattgcccctttatcagcaaatacactagccaaggtaaccaatggcaatcggtaaaagtttattaattagttcagtctaaatatattttgaaattcatagtaatactctcttatactctggctttttttactcagaaatatatgttggttgttcaaaatggggctttcttgtgatgttcaaggtttaataccaaggaaaagagtgtgacaggaaaagggtttatcgatttgtttcatgcatatgataaagtaaatttcatgtgggtgaatttgagttctctcctggcatagaaaattagttgggcaagttacttggtcatttttcttggcattacaaggcttagtgtccaatattgatcaaaaaactaatattgcattttttgtagtttgtttctgtcctagctgcagagatgatatggaaacatgttctttaatcagttttgagttataacttgtgcatttcaactgcatttatacagtttatactgaattaccttatactagtttgtgagcatatttttattaatctaacttcttttatgatttttgagtttttaattaaactctcacattccatattcttattatggtagattgctgggggactatgcgacaacttactgacttgcgttgtgcgggcatgggactacaagaagcccatttttattgcaccagccatgaacacattgatgtggaccaacacttttacagaacgacatctcatggcgcttgacgagcttggaattactctcattcgtcctgtcagtaagagattagcatgtggggatcatggaaacggagcaatggctgaaccgtctttaatatactcgactgttagactctttgcagagtcacggaatcaacctggtagcagtaataggcagcaagtaccatcatgagcttgttatttgtacttattttcctttttttttttttttaaatttaatcaagtgaagttctaaggcttgttctctttccctttgttttacattattcgaattctgtatgggtctgtaaaagaacacaacccatttatggatcatatatatttatatatgtattacccttgcaatttatgctttatgaacttcatttgaagtattgtttgtgtatatgatt

SEQ ID NO: 197317 - DNA, 914 bp, Cannabis indica
ttgtgttatttgggatctcacaatccagttaataaatgttagttttataataaaaatataggcaactgaaatatagctatcccatacacatgaatctattttgctatctgtggagtaaaagaaaaagatgcctatttttcttcatattggaaacgttcttacattttggtttttcaatagcaatatttaaaaaaaaatgaacaaaatgcaaaagaggagatgtgtttacaaagaaatttataatttcgaggcattttagagagaaaaaagatgaaggatttaattttaaataattgtacaacaaggtattctaagcactaaacactgtcaatgtgtatacaagtataaaaaatcaattaaaacatattaaaagctttgaatctatgactacttacatactataagcaaccttcaaaaaatagaaataaacaaactgctgccataaaaaaatggccatagtgtatatgcacaaatatatatacaaagtggcatgaggagaattttaactacacaaaaaaaattcaatcaaacaaaatttcgcccaatatttttcttagaagatatttcattattcattgttgcttttgcaatagctagatacttagattttattttttatttttattcttagtatcaaatatctttggagttgtagatattcaatgttagaggatccaatttcagcttaggcagtaacaaattttaaataacattcttatgacttccacaaagtatttatatattaatactctcttttgctatccgtggagcaaagaaagaagcctatttttcttcatcttgaaaacttgctctcattttgatttttgaataagacgtatgtatcttttttttactgctttttgcatttttgggtgttaaaagtaacaactcttaacaccatatacatgaacagt

SEQ ID NO: 197318 - DNA, 1286 bp, Cannabis indica
acaaaataaaatgacaagagcctcaactcaaaatattgatatatatatatattattattcctaatttcgtatgcattattatataataaatattcatcattcatgcctaaatattcatcaaaatatatagttggctttctaaagaagattattttaagagtaaaacactcaaaagaaaaagctatttcagttaaaatacacaatagaataataaaatcatatcacattgaaaataaataactataattaatgaaaaaaaaactactataataacaaaacttataaaaaaaaacaaactatttcttttttctaaaattaagattaagttgtactatcaacaactcatattaattaagaacaagaactaatctaaaattataagagcccatctaacatctttaagacacttatttgtaacatcaattatagtgttgtgatatttctaaaaaacattgatgtatgtaattgaggttcctctacgtaacacagaagaagtcatcgtaggctgatgttgataataacgataaaggtgatgaagtgttactatattttgcagcgaggcaatgtagtcgaacacgaaagaaatccaaagagtttgaataataaggtatgagatcgggacaaaggcggaggccaaaacaattagaagtatctagcaacttggtacagcaaggaggagatattgaatgattcttatgtttgaagttagacaagtcatcaatgcatgatccaatatcatctgattgatacacacaaatatcttgtttataccattcatctatttctccactagtacacctcatcaatatgcagctcaaccacaaactcaacacaataattgataataaatattgcttcatcgtgaaaattattaatatcaaagagagctttatttagcagatcgatctaaaaaattttttgttgaaagaatgatttaagttttttagttgatcatattgtgtttatatagattttttttattagatacctactgtgaatatatcacgtaaattttaaatattttataattagttttagttatctttttttaaaaaaacaaacgaataatatacaaaaataatttgtattcataatattttattttttaatgagatttacaggtcaggccggaagatatttttattagaaaaagtagtgtttatttttgaaaaaagtcaatagattttttttaattattatattttaaaatataaaagtttaaattaaatggatataattaaaatgctgaaatttaagtaatactgtagttttattattaagtccag

SEQ ID NO: 197319 - DNA, 631 bp, Cannabis indica
tttaactttctggttagcaaagtgacaagaacccacagtacgtacacataggtagatatcaatcaatcaacattattatatatagtacaaattattgcattattttactacgtacaaggctgtctctctccacacatttcatcatccttacattattattatgactatatatatagttcaaattacattattgtactacgtacgtacaaggctctctctccacacatttgatcatccttatcacctatagctacctcctctatggcacgattattaattaaacacctccaaacatggaggaagagctagacttaaactttaaagagaaaaattaaattaggaggccaaagtacaaatttttaacaaataagaaaaaactatatacgtactatgaaaaatgagttcatttttgtttttttatttgggggaggacatgaccaccttttaccttcctgcaagtgttctataaattaatataaatattcatatataaagtatggacaataattaaattgttgggctccctttcaataaatgagcattcatcttatcatgataatgataatgacagttagtggtgaaactagttgtatttttaattagtgttgcagtttttattattattattatt

SEQ ID NO: 197320 - DNA, 1459 bp, Cannabis indica
tatatattgttaaacgacgagtcgtttattcacttgagtaagcagacacacaaaacaagacacagaggacatgaaaaccaacatatgtgatccgaccccttaacgaagcagagagtgtggtccgctaatggcattgccctaaacctccattaacgcaaccacacacctttcttccttctcttgttcggatttatcttcattttcactctcatcttttgctcaactcaagctcattcttttctctcccaagaaccacagacgcggcggtccagccagcggagaggaacacaccctttacttctctccgatcagactcggtatccatggacgccaaggctactcatgaagctttcgctgggcctggcggacaacgctcctccacgattccgtccggcgagaactctgtttgggctgacgtctctcccctgcttgacgccgcctgtagaggttagttgttttcttttaatcttcttccctctcctctcttttgttcaattctttgcttctctgctgatggtattgcatgtttggttcgcaagaaattagaggaaaagagaatttggatgggaattcatcgtcaataatcagttgtttttattgtattagattctgttaatctgataaacgaacaaattctaaactataaaaaatgcaaagaaacctttttcagtttttaaaattaatgtttgcagatcttgaagacggcgagctcattcatggagataacttcaatctttttgccgccatgtctgctctggaggtatgcataacattctcaattaatctttgtgtcccttgtttgatctttattgaaactttggagcttcttttggaaattacttttgtggcttcataaatttgtttatggaaaattgtgtcattgttttcatggagatgatcgaacctacttacaggagacaattgtataattcactactctataatgaaaatttcttcatggtttggtgcaatgtgtcattttcaaactttttaaaagtttagtttgttttaatttggtctggcacagttgacaattatgtaaagaattgcatggccttgctaacaaacaatgcatttgtgattgcacttttattttttctatggaaatataaatatggtcttttaaatgaattttttcatgttagataatggacccaaagatggattctggcatggtatgtaaatactactctgtagaggaagcaattgaggatggtgttgcaccaattccgattagttttgataaaactattgatgttcgatgcactattgatatcatggaccatcttcttgcttgcgaggtatttattttaaacattcctttctcaattggtgttattattcatggcaaactcaatgctgctttagctgatgcctttaatcatgagatgttattctgtctaattcctattataccgttgtcttgaggtatcaaggaaccttgataagttttatcact

SEQ ID NO: 197321 - DNA, 2254 bp, Cannabis indica
ctcgcatacaccgaccatacaatattaattaaaaacttttagagatacaacccatacatctgcaagcttgcaagtcatgaaaatatccctaaaatcatgagatagattcacaataaccaagaagagaagaaacctacctaatttcctattttgttatatttaaggaacatgaataagtttcctattttatttcttattagctttgggaacaattttatgcaactcttcaagtcattttactattcaaggacacgaaaagaatcatagattcaagaaaggaatactcagaaattattgtaagagctttgagagagatcaagaacttcttgtttctcctctcacaagtcaatacaaatgaaaataggggtaagctattaccatcatcacgggacctaacctctataataaccttggtgttctatttgtttaatctttattattattatcattgctattatttacttaactttaatcgcattaattgatttattgtcgttggttaaaagtaatgtaaataccttttataatggcctatatatcttgtatttggtaatggtctatatatcttgcatttggtccactacatttggaaaaattagaaaagatatcttttcggctctattgctaacaaaggaatccgagaatacaagagaaataaaacaagccaacgatttacatcaaagaaaatggtaaagttgattattgcatgatcagagttttctatcttttctacttcaaaatattattatctaaatatatataattatgtttaatattcacttgaatactgatctatacatgtgtttagacagtaataattgtctgctatatgtaacaggtatgccagatgcaaaaatgttgataagaatccaaatatccaataaatatattatttgatgtcgttattatgaatgtacagaactatgcaattttatatgcatgtcttatgagtaaattacactctcagctgtgtgaaatattagtggaagtagcttcaaaatggacacataaacttgaagcaatttggcagcaaatttttgttggtattatccgatttaatttaatgtaatgctttccaatgcaacgactttttcagttttagttatttttaataaaaatgagaaggctattctgaagcacaattagaaaaataataataactatcattatctatattaaattttattttatttcattcttaataattatttgcaaccaaacgtaccctagtatagtcaatcagaagttgaataaacaaatttatttcaagcttgggattagtaaggaggagttgatttgaaagttggtaatcaaaccaatactaaattaatacaagatgtgaggttgttcataagtgaaataatgaatagaagtataggataggaagatactcgatcacaatactacagaattcccatgttaatgcaaactatgctatgcattccgatatatatttatattcacaaagacaaatattagtagcattgaattggaaatttatgttaagctaatatgcatctaaaaactaacaaaaaccgcttcacaaatgacactcgtccaacctgcttttgtggagttgaaatgcagggttaacccaagctccacagttgcactgcatacctgcccaattgaagtaacccaaccgcgctttgcatccgatgcaatggagtctctcttccacatgaccttcttcaactgaaaagttcaaagtccagaacacgttagtaaactcataagggtgcataatgttgatttccataagaaagcacataaaaattactaggaactagagatttcaaagatcttctaaatcactcacgtggtgctcccatccacttcatgggctctacaaagatggaggtgcattcagttggctcatcttgatggttaccgtttctctttctccacttgaaagatgattcacctttgccacgattatgggtaactatgttctcccctgcagcaacaattctccgacacttcttgcatcgatacacaacttgaggcttttggcttgattccatatcagagttattagcttcagccattgcaactggtcacttttactacaaagaggaacaaataatttgttaagctgctagaaacatgaatcaattcgattataaccggaagcagtgaagaaacatcaatttattgcaattcaacaataccctaattaaaaaaaaaactacaaccagaaaacaaaaacgaattcttatgcaaataatatatagaacgtcacaaaaaaaaaaaa

SEQ ID NO: 197322 - DNA, 1351 bp, Cannabis indica
tgaagactattctcttggatatactatccaaagagaaagagaagttgggagagggagagagagaagctgatttgtttctgatatgaaaggaaagatgagggcgtgtttttatagtgagagctagtcgttgaggtggagctgtcagaagggaccaactctattggcctttacttttgattaatgcaattaatggggtcaccctagctggctttaaccaatatttagtctccaattgtagcctaattggattcccccagtgagccaagaactagtcatcaactgctcttatataataataatataaacaatacagacaacatgggtttattatcttcttaatatttttaatctatatttgttttcttttaaataattccacttcttcacattatatttgaatagccgtcgttgtctatcttagagtaaaagaatcttatttacgaaagggaaactcaatataaacagaaaaagaaaccaggtttttttttttttttttttttaaaagcttcaatgaatttagatgatatttttgggagcgcgtgttggacaaagtataaccgtctgatctaatttttaagagaccttcgtggctgctataatactatgaattattaaataagagctactaggagtactaggagatttattgcttttttggcatccaatggctgctgtgaactttcctagttccttcgacaaagataattattacgcatctggacccagatgaatgatatgatatacatagtcgtacccacatagtttcaaatttgaagaccatgatctttaatttattatgtgcttatatattctctctattatatatatctaaaattttatacttaagcatgagtaacatggttgatttaatgcaaagtcgtctctacaaagtacttctgccaagatttacatatttgtatcactgcagggaataattaatgttcgcctaaaaaattgttattattctgtttctcttgagtttgaaaatggtaatttactatatatacatatatatatatatttataaatgtagaaattgtttgagtatttcaaatttggttctagctattatgaagtattatgataaaaagggaatatgccatgtgaaatagtcaatagagtggatctgcagcttttacagggtttgaagctacatagcaagaaataattatattagggaaaaaagaagaaaaggtaaagaaagaagagcagaattgaaagtgaaaattaagttaaagagaaagaaattctttttagtcgtagtatagcgtagtttttgaggtcgaatgtttgtttttcattgcttgtgcaagaaaaaataataatggtaaacataaagttttatgtacac

SEQ ID NO: 197323 - DNA, 799 bp, Cannabis indica
atacatttttcaaacaaatcaacgcataatctttgttttaattgcatttttcttttcttttgagaattagagcaaaatccatgcataaaccatagtgtgcgatggttctataaatatttacgtcaagctttcgtttggccttacgtcaagctttcgtttggccttacgtcaagctttcgtttggccttacgtcaagctttcgtttggccttacatcaagctttcgtttggcgtcattttgacccaaatgaaattttcataggtctattgcaaactaacattttagaactgttcattttgtttttagcattatcaactatcttttatcaatgtatcgtgtgggtctctaaactaaaagtttcactggaccagcgttaatgacttttgcatagagtttgataaagttcttttggtgatgcaactttttgtttggctattggtttaaggtgattgttttttagatatacttgtttagaaagtgtagaacctaaatttggggtatagattaatgaagattaagacatataatcaaatattggagtttatacactccaagtttaagtttttgcactctacaaatcttatgcaatttattttagaggtcaattgacaacgggtctcagcaaaacttgatttgaggttaaaacgatagtttacgatagtctcatgaaaatttatttttagaggtcaaattttcatggcaaagcagtcttttcttgaaagttaaacaaagtcagaccgagtaccacatgttatttgtatatggtagagcattagcattgtaacaaaaaaaaaaaaaa

SEQ ID NO: 197324 - DNA, 2363 bp, Cannabis indica
gacaaacatgggaacatttcattaccaaattcatgctttgaaaatctttccaaattcggtaaatttgtaatgtcaagactttctaaacgttcaaagcttcttcttcttaagtctccatgacataactcattgtcaatgtactgcactaacttcatttcagatacttcaagatgttgaagagatgttagtttcccaaaaggtggaagttctctacagttatggcaattagacaaatcgatgctaacaacacttccaaggatgtcatcacggaaccaagacgggaaatgggcaccggtgtacttgtgaattttcaaccatttcaaactcgtgggaggagcaagagcttcgagtatgccttctacattcctttcaaattcatatttattccaacacaaattcagtcctttgaggtttcttttggctgacagattagcaaatcttgcttcaattggactcttcacattttctaagtttctgatctctagatcacctcctatgttcaggtctttcaattcatccaattgacaaccttttctcttatccacaatgtaatttgtcaaagtctttaagcaacttaacttcccaatgtttggaggtaggtgtgataatctgctacagccttgaatgtaaagatggcggagacctttcaagcgaatcatgtgtttgggtagcttacgaagtttataacaatggcttaggtctaaagtcaacaaatggtgtagcaaataaatggaatcaggaaggacttcaatattagtatatgagagattcaaatagcgtacatgtttcaaattactgaccaacgaagacatggatgcagcattaagacaaatagctatgctataaaatgctcgcaatgagcgaaaattccaatcattattatcacatgttgtctgattttgtaatgccatgaaagtccttaaggatttagtggttggtatgttagaaaatggtccagctccattaaattgacacatcaagtgaccaactctttctgacatgttgaaagtacgggtatcaccattaaccaccactttatgacatttatcacccattatggattgagctagatcatgaaataaatcatgcatcttgaaacacttgatacttccatcattcggatcattggtgatgtcttggaaaaatgatctccaacataaatcattaatcatctcatttccaacgtcctccacctcaagttctggctttgaagaaattagaccatttgccatccaaagatgaattaatcgtgtcttttctatttcataatcctttggaaatatagcacaataagagaagcatcgtctctgctctactgatagatgaaggtagcttaacttcaaagcaggcaagatggaagcttcttcctccggtaaattccaaagctcactacgcatgacagaaagccactcttcctcttcattacttttgaagcacattaagcctcctaaagcttttgctgctaatggaactcctttgcacttcttcactattttttttccaatttcgacaaggttaggtcgctcttctctgtggttaccgaatgcacgtagcttgaataataaccaacaatcatcatctgataaactactcagctccagcatcggcgttgttcccataatggatgcaacctttttcaaacgagtagtgacaacgaccgaagctccttttgatccacattccaatacgtatttcaacttttcccattcttcatgtttttgattccacacatcatccaaaacaatcaagaacctctttccttgaagcacgcctcgaagtcgtttctgcaaaggatccatctccattgcctcacaaacatgtccagttccagattctataatggctttgatcaatctacgcacatcaaagtcttcagacacacaaacccacatcttcagctcaaaatgttcattgatcctctcatcactaaagaccaattgagcaagagttgtctttcccatgccccctaaaccaacatacagtaaacagaagtatcattgcagttgatggcgtcattaacaagaaacccaacaactcgctccttgtcctcttctctcccatacacatgtggctgagtaataacagaaccagtctgacgactttctctaaccgatttcttctctccacaacatctacctctcgcaagtgaaaattaactcgttctttcccgatctgatctaatctatcaccaatctctttcatctttttagcaatattgtgacgaaagtaaagatgcttaggactcaaacaagataaagaagattgtacctttcggttccatgaatggtcttgtgcaagaccctcctccaatcgaaaagcctcagcttcacaatcatccaaaacatcctccaactcaagagaaa

SEQ ID NO: 197325 - DNA, 656 bp, Cannabis indica
cattggcaccttgccttgcatgatacctattaatctttattaggttgttaaaagctccttgatgacactttagatcatttctaccatcaaatggagtcatgcgtggctccttgaaattgggtagatgaatttgaatttgaatttcccttgagaaagatgattctttagtgaaccaatcatcctccgaatttccctatggtgtagtagcaatcattcaacgtagatcttgcatctctggttctagctccttcattcttttattcatcctttctccaaagatggtgattagaactcaggttttcctggcagcttgcatggagcctgcgattagtactcctctcgcccctcatcgtgtgacttcacactgtgattagggtatgatgtctttcgcttgcattgctcttgaaaagggggggggggggtcaggcgcagtgccctatatcatgagactctttgtgtgaaatcccttcataggatcacgttacgtttccatcattgcaatcttactatggtgagtgactcatgttgccttgattaacttatagtgccattttctttcaatggtccctttctacactcatcgtctggggtgcaatatattgatgacacagagtcccctccacaagtatatgcacttgggatcctgtgctcttgtt

SEQ ID NO: 197326 - DNA, 1633 bp, Cannabis indica
ctaggttactttataatctgtcattcacttcaagaataggatagcaattaggcattaacgatttgggtaaacaaacaacaggattctcctccctattatctcatcttgctcaactttcaattgtgttatttaagttttctgaattactttcattctttttaaatcataaatacttttgatttgccaaatagaattataagtatagtttagtagtaattaatccaattccctgtggttcgacctcacttgcgtaagtatactacttgattgcgagcacttgcatagtaattaataattttcgtaacaatggtgtacaggatcatggtatccaataagtgcacaagcaacggaatacgtggtttgtaaggccatataagatttatttggatgaataccgattgtgagacttaagaaaatatgaaaaacaaaaaaaaaaataaaaataaataaataaaagcaaaacttgtaaaaaaaaaatacttgttcatggtgtgtaggtgcccacacatacaccaagtacacaagcaatagaaactcatagtttgtaaggctatataagatttatttggatgaaaaaaaaaaagtgaaacttaaataaacaagaaaacaaaatacaaaaaaaaaaaggcaaacatgggccaaaaaaatcttgtgcattgtagtgaaacagaaaagcagagaaagaaagaacagagaaaaggaaaagggaatatggattccttactttagtgaatagactaaaccagtatttatacaaaaagatagacaacagaaagaagcaaaacagataacagaaaaccagaaagttagttaaaatacatcccaactaactgatttaacaactttatttaacaacaattagttatctgttacatgcatgatgtgcaagcacccatggtgcatagggttatagcattcaccaagtgcacaagcaacaaaaactcgtagtttataaggccatataagatttatttggataaaaatcaaaattgaaacttaaaaaaaaataagaaaacaaaacaaaataaaggaaaacttggtcaaaaaaatcttgtgcatggtgtgcaggtacccacgcagacaccaagtgcacaagcaacaaaaactcgtgatttgtaaggccctatagaatttatttgaattaaaacaaaactgaaacttaagaaaaaaaagaaaaccaaaaaaaaataaaggaaaaatacaagtccaaaaaatcttgtgcatggtgcgcaagtacccatggtgtacatagtcatggtatccaccaagtgcacaagcattagaaacacgtcatttgtaagaccatataggatttattttgatgaaaaccaaaactaaaacttaaggaaacaagaaagcaaaacaattaaaggccaaatttggtcaaaaaaatcttgtcgcacgacaatggtagcgacaaggcgtccatgggtgcacagatgcccacgcatacaccaaatgcacaagcaacggaaacccatggtttgtaaggctatataagatttatttggatgaaaaataaaattgaaacttaagaaaacaagaaaacaaaacaaaacaaagcaaacttttccatgccaatatttttttgttgagttggaatcatgtttagttgagttttattaagcaatct

SEQ ID NO: 197327 - DNA, 545 bp, Cannabis indica
agggtagtgtggtcgtatcagcatgcgatgtccttttgattcttttccttacaacctacctagtactgttggccatctcgatgagagattgatggctcgttatgatggcctaatgtggtaagcgcaattgagagggatggatgcacgttgtcgagtggcatgcacacaagatgttgttgtgaagcatacatgcatgttattgagaggcacacgtgcatgttgtcgagaggcacgtaggaaaggtgtcgtcgagaagcatgcatgattccgaggggcctcaacattggtcatggtgcgagtggtgaagaggctacaaaaggccattgtgcgatcgaccttagcgagagggaaagaggcatttatacatgtcattgaggggaatgcatgcatgctaccaaaaggttgtgacaggcctcgttgctgcaagtggtcgagggctaggagaggctgagggttgcgagtgaccttgctgctataagtaatcgagggttgtgagaggcctatgggttgtaaaaggcctcgctgctccgagtggccaagggttg

SEQ ID NO: 197328 - DNA, 573 bp, Cannabis indica
tttgagtcttagacttaccacaacattacagcagaggaaagagtgagcttgaaataaggccatatcccagtaaatgctttccaagaaaatccagtccaagtttgattacaagttgggctaagaagaatataaaggccattagaaataacaagaagccaccaagagaagctgagtgaaagggctgcccctaaaagcccaagcccaaaaacatcaacgactatccaactgagaaaaacatggaagacgaagaccccaactgacatgtaggcgagaggattaacaatggtctgagcttgaagaaacctctgcatggggcaggtgagagcgaatgcgtagatttgagggattaggccgcgagcgaagacttgaccctgctcggctatgctccgggactgacctattgctattagtattgggccagagaaccagtaaaggaaggtgagaagtacggcagcacccaagtgtaagacaattgctctttggcatatgatccccattgccctgtattgtttggaaccgtacgcttgtccgcacactgtttggactgcactcgccattcctagcttttttatt

SEQ ID NO: 197329 - DNA, 952 bp, Cannabis indica
aatttcctctgaactattaagatatttgaaattaaggattttttttctaattttagtaagaaaaatttaatatggatgaacattgaacgttcagtgagtttaatttggtacagattaaagttcaagtgatataattttatagatatcaaagtctaaggaatatgatttagtacatggacaatcacagaattagtaaaattgaatgaaattgaacaaatgtccttaaatccaacaatcttaatagttcaggagaaatttttaacgagaaaaaaaaaaaactcaaggagcatgatttgattttgatacatgtcaaaatatagggaacaaaaattttaattagtgtatacatcaaggtcatagtagatttttaaatagaaattttgtctcactattttttttatatgtttgtgcaaaaatttgatttaataacttgaaattatggaatactttttaaattaatgagcagagttatgtaatttgtatgtttatttaatggattattattattgttattgttgttgttgttgttgtgttgttgttgttgttttgaaaaaaaggaaaagtctccatttttttccttgttaattgttagatcaaaagtctccaatatattattaaagacaaatgagagttagttggtaatttaaagaatagacatgatatgatttcactttactaaattaattatgttgtttatattaataattatattgtacacacaatgtaataagtccctttgaattaatatggtgtagtcaaaatattttagagttgtatgtcagaaatggcagtgttgaattgatggcttgagttctttactaagtgatattagtcttcaaccgaccctagctaggtctagtacaaacaattacatgtgcattgaataataataggtaggattaattaggtttaagttacaaagttaatttgttaaactaaaaaaaaaaaaaaa

SEQ ID NO: 197330 - DNA, 1831 bp, Cannabis indica
ccaatagactttcaaaatgtcaaatctgaaaaagtttagcactaaatttaattagtttgatagtaagtgatcaaatacagtatcctactaatattagtaaataatacaatcataatttaataaataatttaacagtacatgattaaattcgtggagtggagttaattccccttgtgttaatcaagcctcgaagcttgatcaccgatattataacttagtagtttcacacttctcctcggtccaagtttgaattcctccaaactactattatggttggaattttgaaaaatttagtgctaaaatttcactcattcttttgttaatttaacactaaatttagacatttaacatttcccaagtacaaatcccaatgccataaataaataaaaaaaccatttttaacataacataattattacccttttcgacttttgatactaatcgctctttccatccctgaggcacatcatagacatactcagccgagtcttgcttgttggaatttccaccgtagccgccgtagttggcggcgctggctgccgtgccgtagtatatttgaaaagaagggtcagctagtgaagggagtggggcagaggaaatgagaaccgcggcggcggcggttgcggctaaagtggaagctaaggtggtgattggggacttggtggaggagaatgggaggtgggttttggctgccggtggagtttgaggtggtcttgcggtggttggagtggtggtggtggtggtgttagagaaaagggctgagggagagaatagagtggccatgttaatgggtcataaaaatttgatctttttgctaatttttgggattatttggattggattttgaagggtttggtaatggttggttgtgattttgttgtgaatggagttttgggattttgctcttatccaatttttgtggttctcaaaggttgtttttcttttttcttttttttttttgaataaatgtatttatgtgtgtgtgataaagagattgaccacatattaaaaacatttactttgtatcaatactaatacaaattaaaaaaattgatttaatgattctcgtatgtttatttaattaaaaaaataatttacgacatagatacttaaatttaacttataattgtaaataaatatttaagtttaatttttagcattaataatacttaaattataattctgaaatttttacaagtaattgactattaaatgttaagcaaattgtcacgtgaaaattatcaaagttagtaaattttatttttttaaaaaaataattagtttaaacataccaataaaaaataacatgtggataatgacttaacatttaatagttaagtaagagttctaaaaatataacttaagtattattatcgcaaaattaaacttaaaaatttatttacaaccgaaaattaaatttatatttttatgttagcctcgagcaacctactctagcacctccttctgcagattactctaattaaaaaagaaaagaaattattttgtttttgtcttactattttatgatatatgtcactcttgttgtgaaaagtgaaaactttgtagtagatgaagtagatacaaacttttacatacaaactattactaagttagcttaaaattaatcccacctaattttgatcctaaagttaagatataacctttttatatataaatatatggttaagtatttttttggtaaactttttgtctaattcgacttttttaactttttttgtttatcgtgtatgtcatagttatttaggatcacttgtaaattttttacaattttttaactaatatacaaaattaaaaataaagtttaaatatt

SEQ ID NO: 197331 - DNA, 1168 bp, Cannabis indica
actaaattatgccttttaaaattttttggccgttaaaaatttctcctgaactattaagattgttagatttaaggactttgatctaatttagtaaaaaagttctaaaatggatgaaagtttaggagtatgatttaatacatatcaaagtttgaggggtatgatttggtagatattaaagtctgggagcatgttttaatacataaacaatgagtgaaacagtaaaattgaatgaaattagacaaaaggccttaaatctaataatctctatagttcagagagaatttttaacggctaaaaaagttcaaaaaaatataatttagtatatattaaagtttggagagaaaaattactaaatagccttgattttttgtttgacagaagttgtctagtgtttgtcaaaactaataaaagtaaataataagccccctcgattaattttacatgtggcagatctataatttgcatgtattaatttgtctgagagttttttcccatacgccccatcactatcactttcaattttttgtctctgccatgtttctaaaaataccattttaataaatattaaatttataagtgttccacttaaaaaaaatcctataaatgtttaatttttttaggtagcataaatgtttaagtaatcttagtttaaaataataaaaaaaaaatactctgttttattgaccgaggatgcctttattgtgcattttttgtaacagatggttgataatgatgatgatcatgttaaaaagaataatttagtatttttttaatgaaaaatgtgatattattaaccaacccaaacaacataacaactccataggaacaacagactccacatcttaaccacaaccagaaaaaacttggatttggacatttatggctgtcatgccctttaagcttgagacagttctttcataggcaaatgttgtttattaattctacggaagatcactaaaagaaaatcaacaaagaggaatgttattggaaaaagacaattttatgaagccaaagagttatatattactaattacattagtgtcaatgggagtagcagacccaaaactaaagttaagatgtttttattaggatttgaactcttaaactcaataatatatgtgagatagtttaaccaatatgccaaaattataatatttgtattatcact

SEQ ID NO: 197332 - DNA, 1454 bp, Cannabis indica
gaataataaaagtttaaagtttttaaaaaaaaaatataataactatttttattgactgaaaatcaaataatacattgattattaaacaaggaagaaatttcttccaatcaagaatcttgttttccatctgtgcataatctcaccatttcgcattacatgttaaagatatacacctagaaagacatataacaaggacctaatagaactaaaaaacagcttcacccaaacacactttcagaaaaagaaagggctaaattgatgacaacttcaggatcactctctataaaagaaatagaaagacccagcaatgaacaactttggacgggagaggagaacgtcttagttgcatgagacagagagaatcttgtgcttgtgaagaagactcacacaaaaaagagaaaatgttttaactgcaaaataaaaaatatacattaataagaaaaatatagaaataaaaaataaaaaataataatcataataaataattatataaaaaatttacaattattttcactacatattaatccaactatattaataaattgtaacaatagcaataattaaaaataagcaaacttatcttgtcaaatgtaattaatgccagtaatagattctggacaatatacttcaaataatttaataactttacaactttaataaccaataaattacaatttttccgataaactaaaatcataaaaaaaaaagaataattgtcaataataaaacatttgtttctcctgcaggcaaattgatgtaaatacttatttttgctaaatatataaaagtaaatacttaataagttttgaaatagcttaaattaataataataataataataacaatattattatgctttagattgtaaagcgagtgctacgtggattgaagtaatactctcttgtgctagtcatgctattgagcatgatttgcctaatccttgtaatgtttgatttgtattaatgcatccagtttaaaaaaaataaaaataaatgagaatatctttatatctcacttaaaattctaacttttataattaataataataataaaaaacttatctctaactgtctcataatttcttcttataggttgcaatggcagaattgagtagagaaagaagaaaggtttcaaatggttcgttcgaggagagaaagaaggcacacgatcgagatcgtagtggagaagcttcaatggaagtttggaggaatggacatggcttcttcatctaattcaaaccagctgagtgatcggaaaaaaaaagaataatatctttttttttatgatttattccttactgttatataatttctttttttaaataaaaaaatcaaatattggataggagactcctttgactaagtaaaaatatctatattttttcacaagggtaaataccattttggaccctgtgttttgcaaaagttacagattggaccctgtgttttgttaaa

SEQ ID NO: 197333 - DNA, 518 bp, Cannabis indica
caactcaatagcttactaaaaactagtgagtacttattgttcataattttcttatgtttctacttactttactcttagtatttaactttataaatggatgtgtagggacaactaaatgatattatacttaagaacccaaattctcaaactacaaataatatgcaataacagtgttatttgatataccaaaatctggttatcacattggccaaggaagagggatatcaaaatcaaaagtagttgttgttaacatactactacaaaaagggacattttcgtcgttttataagtgacatataaagattttgcgtcgatctacagaaccgacgtataatccgtagacgtaaatagtattttatttgtgttacgtttttaaaaatacgacaaaatactaattttcgtctatttagaaaactaacgactaaataatttacttttctattttatttttaagcgtcggttaaaaaatgacgttaaatgtttcatggcattttaaaactgtcacaaaaaaacttatt

SEQ ID NO: 197334 - DNA, 1584 bp, Cannabis indica
atgcatcttctattattattataaatcaaattaactatatttcaaaacattaagttggcatttagcagaaactatcacaatttagtaatgagtttgtagtactaaactatattcttcatttgttattatttaagaatgtagttgagatttcttttgtgtatcataaaataattggggttgctcaccctttaactaattatactttaatgaataaaggtagtgtcatgtagattgagttaatatgattgtgctattctaacatgacttgcactcccttgtaattttttttttaaaaaaaaacattaatagttttcatatatttttgtgtggtgctcaacaatattatatctatatgggttacccatcaaattatattatttaaaatcaagtcgagaaaaactgtgctcaacactatatgaccaactagcaattaaattatctcattggcttaccaatgtcaatagtatgctttaattaagtttattattatcatggtatcaatttaatttattttccgaaaaaaaataaattatcttttacaaatagagactaattaggcctttagtcaatgggggtcttctaaatgggcttggcctcgatttggatgaacaccgaactgggcttgagtgtgtcgtattagagcaaattagactgtatactatttttatattattctcttttatttttactttcttttttaaactctatcatttttatctctttttttaaacactttaccaattttgcccctgtcacttcaatatactccccatatgactctcttatgtcaatgtattttgagtacactacatataaaatgaggtatgtttcaattaaatataaattagagataaatttagttaacttataaataaaataggtatttttcaatataccccgtcgagttaaaattgaccgtggaacttgaaatggagctgtttgggaaactttataaagagttaaaattgttaccgacccaaattatacacaatacagtaattttttttattattattattttctttgttaaaaagagagtacaaataagcaattgtgcaaaatacaaaaatgtataagctcttattttaaataggagacctgcattcaaccacagtggggcatagcctgtgttgtcctgcccataatttgcgcctagattatgtcatctatataatgtaagaatatataaggtaaaagcaaaagaaaaaaggtaatttattataagatttttaatcaagtgataccataaatcaatatggctttctctttatacttttgcctcttacaattacaagacataatccattattccatgccccaaaagtactgcaagaccaatatttaaaaagaaactttttttattattatttttcataataagcaaataataataataaggtaaagtttgttgcctgaagcgtgatgagaatttatcaagcgatttgttgtacggctgtggtattgatgttttcgcatttgtggcaaaaatatcccattgtaatatctatcacaaccaaattaatcatgtatattagtaacaataacaaataattcaatattatataattattttgaaaagtaaaa

SEQ ID NO: 197335 - DNA, 798 bp, Cannabis indica
gtataaaatgcccacagctgaatgtaatcttttcagaacgttgtgttgtgccatgtgaaatgaattgtgatgtgcattttaaatttcatatctacaattattttttattattatttgaaccattcatgtttacaattttaactgtaccttattgttataaaaatacaaccattttttattataattattatatatgaagctatttacaaatgaaacaaaaaaagtcatagaaatagtatagttttttcatggattgatcagtatagctttttatagaatcatatttgctttcttctatttaccatgttggaattatacaatgtatatataataaaatacaaaataacaaatgtataatgataaattgaaatataaatggacaattatactaattggaaactcaccatgaaatagaggaaaggaaaaagggatgatattggcagagctgatcaaaacgaaaaataaaattaatgacgtagaaacatatctatgaataagaaataattttaatgcacgtgtatattaaaaagtactgatttggaatcaaacaagaataacgaatggaaaagaaaatgcttacctttaattttaagttaaataaactttctttcttatttagtaataattaatattaaaaaaaatactagtttaattagaaaacgtactttgtattttatttttttatctttcatatattttattttatgtaaagatggtaaatccaaaaataaaaaaagaaaagaaaacttcaaaagtgaataaagaaattaagaaaaattaatagggtgaatgttaagg

SEQ ID NO: 197336 - DNA, 886 bp, Cannabis indica
tttaatttccattccctaaccttcaaccaacattccataaccttcaaccaaactccacataaatgataccttacttacaagtagctttatattcctggcaaataagaaaaaaaaaagtggacacttacacacctcctttacttttgtttcattgtcccaataattgacatcttttgtttcattgcttcaataattaatatcaaacagaagtcgtgacaaataactgtgcagcaagaaaaggaaagagatgaaaatgaaaaattgcattaggcaggagatattatttcactgccaaacataacatactaaacagagattgtgaacaaagaacatgcactcgaaaatgtcactttgtccacaactaatatagctgtgtcgaaaatgtctcaagcaagcatcatctctacagcagagtgctcatttgattgaacaatcccaacaaccaccaccacgattatattacattacaagttcagacagattttatccatttatataaaatataaaaaataaaagttgaaaacgacacctcatctaaagtagatgattccacaaaaatcaatgtaacagtttccattgtcaagatgcagtgtccttagttaccaccaccgtcaccaaagaggtaacccagagaagatccaccaccaggggcagcatggaccttagttgagggtcgatcctgcaccaacaaccaatagatcaaaagaacattgagaaacattattataatccaagttaaatcatatgggtaaaacacacacacacatatatatatatattgtttttatttcatcataaaaagggaggacaactccctagtattttgtaagagttaatgccgcttacatgttgtggtatcttacaatatctcagtggaatttgaaac

SEQ ID NO: 197337 - DNA, 1877 bp, Cannabis indica
gaaaaaacagtaagtggtgtaaattttccttatagaacgaaaaattggacccaatttaattataacattattaaatacaattaattttatcaaattaaattcaatccatccaatcaaacaaaaaaaaattaattttaatttttaaatatacatatataattttagtataacaatataaaatttaattatttatttaaattaaataaaaatactaattaatttaattatatattatatacattaaattttgtgatacttaaagtcgtatcctttgatacgtttgttgtctctctgttttgagagtgggctgtttttgtcaagtttcaatattgttaatgaactttactgaaagagatatggaaaacaatggagatctcatcagcattgacgaagaagaggttgaagttttaaggcttccaacaagcagggcagaggaggtggcgattgatactcgttggtgcttggtggggaaactactcacagggcgggtctcggattttaatgtatttcagaacatgatggcgtttctttggcagccggggatgggaatgtacgtgaaggaactcaacccgaacctattcctttttcaattttaccacgaggtcgacatacaacgtgttatagacgggagtccttgaacatatgatcggaaaccatttatttttacaagactcaaggagggtaataatccacgtctcgttgagatcaaccagatggatatgtgggttcaattgcacaacttgcaaccgggtaacatgactctgagcgtaatcacagcgctggggaatttcataggcacttttattgaatcggatcccaacaactttgtgggtgtttggcgtgacttccttcggattcgagtccgtattaatgttgacaaaccaataaagcgtcggatgaaagtaagttcagatatctcttcttggtactgggcgaattttaaatacgaaaaactaccaactttctgcttcatatgcggcataatcgggcattcggagaggttttgtcccaggctttttttgaagcctctgcatctccaccagaaaccatataacctggaactgagggcttcgttacagagaagacactcaacatttggagcacagtggctccgttctggagtggcggtgcgggaagaaccaaggcaaaccttcactggcgacaattctgaacagggaatcaatttgatccctgtttcttcggagcaatcagggggattggaaaggagaattaggggaattgatatcaatcatattgatttgctcaatgagaggcgtgctattagggaggatattagggaagtaaatgaagaagatatgactctgcatgtaaacaataatggaaacttttttgattcaacaattactacaattattgactcaaaaaggagaagaccagattctagtgggggtagcattgtgggcccacggaataaagaagattcaagaatagtagatgaaatggatcaagatatggtgggtctcccaaaaaagtgggccgtttggcgggttctggtttccagacccgcccagagttatgagttgtttaagttggaattgtcgtgggcttgggaacccgcgggccaaacaattcttataagaccttgtgtcccaaaagaaacccaatttgctttttctttgtgaaactctttgcaacaaaactagtatggaaagttttagagcccacctggggttcgaaggctgttttgtagttgatgttcgaggccacagcggagggttggctttactttggaaagatgttcaagagttggaaattcaaggtttctcgcgcaatcatattgatgcttcggttcagattacggggtcttctccttggaggtttacaggcgtctacggggagccaaaacgagagttgag

SEQ ID NO: 197338 - DNA, 746 bp, Cannabis indica
aaaaaattacaacgtaggtttattgattttcaaaccaaccaaataaaatatgttactttgctaataaaaacagaacaaatgaaatattgttttcttgtttagtcagaatgttaattacgatttttgctcaataaattttaatatatattaaatcttacttttaaaattttcatgtcattaaaaactttctccaaatttttagattattagattatataaattctattcaattttactagttagacgattaacttagacaaaaattctattaaagttagagtttacgatatcatacatgtcaaagtttcaagagtataatttaatactagataatcattacgttagagatgactattagtaaaattaaattagttcttgaattcaataattttaataatttaattaggagaaattttttatgatttaaaagtttggaaattgtaatttaatacatgtaaagtttggaaatttttttttttttttttacattttaaaatatattttttttgttatttttatgaatttccacttataacaactcgcatagtaatttaaatcgcaactaaaatctacctaacaacccacataaaaattatcggaacaaccactaaagcaatctaaatcataaatttttttaaaaaaagttaaaaaatagtatgtgaggtattctataaaagtacaataaaaccaaatgaaagtgagagaaacaatatcaaaataaccaaacaaattatatataaataata

SEQ ID NO: 197339 - DNA, 1145 bp, Cannabis indica
gtgtctgttgtctctgtagaaactggaaaaacagtttcaaaaacgagcaaagccctggtgcgaaatggaagttgtcaatggaatgaagctctttcagaatctatccgggtttcggaagatgactcttcaaaagtgatggaggattgtctttacaagtttagtgtttccatggtatgtcattacttgtgtttactttgtttgacggttatagtgtccttaatgtttgctttatgtagtttagtttgattagaattctagaaaatataatattgtttccaattacaatttacaactttcttttagtttgttggattcaatgataggctaagatgaataattttgaataaattttgttattattttgattgattagcaaatgtagttttgttaagtttatttttccttatccactttacaactttatttcttatagtttgattcgattgtgttgctaagatcaacaatttttgatgaatgtttaaacagggatcggctagatctggaatccttggtgaggctacacttaatatgacaaattatactagtacaactgcttctgtaccagtctctcttttactcaaaaagtgcagttatggaacaattttacaagtaagtttacaccaacacgctgctccaaattggtatttgcataaaaaaatcaagtttatattcttttggtagcttggaaagacctttgatcaaatacaatcaactaagaagcttctgggaaaatgctaaactctgaaaacattttgctctgtccttttcttattgtgactgtttacatgttatgcttcatttagaataagaccacacccatagattactcaagttgtcttatacaaaattgagaaagtgatattgcgaacactgttctcaagatataaattcgagttcacatattgaaaaatgtctggcttaaaccaccatatttccatatcaccaaaattctgttcattttggtctatttgttcttgttaggatgaactaccccatctcgatttatttgttcactttcaagttcaattatgaatactttaagaaacagcactgcaatatttacatgtatatgaaatttattctaaggtggttgtcaagtgtgaaatgatatcatcataatgtcatatgtgttattgctattattg

SEQ ID NO: 197340 - DNA, 1516 bp, Cannabis indica
aaaattaattttattgtttaggtgaaatgagaatgataaaaatgaaaagatttaggggaaagtcggaaatttggcaattattttttacaaggattgttagtggtgatcatgatggtccttgagtggcatgctcaccctaagaattgtgggactacaatctttaatgaaattgtggctatgaaggttagtttatttcaagaacactagtgattttggtacttctctgattctaaagtaataattactgatacaaaatcccaatttagtttttttaacacaaggccctaataatcaacttctgtttcaaacaaatcaacaaccaactaaggtgtttcttcatttgatctttggaaagtttgtatagcttacaagtctctgaaacgtatttttgtagtttcttgaataattcttgagagttttatagaatcaacttatgctagtgtaggttttgatcaagatcaattctggagctgagttttaactatggtattattagtgtcagacctggtgataccttattttctagctatgataaatggctttcaattcactgcatatttcttgtgctcttttaacctatttcatatttcgtgttggtggaataaactgattaaatattgtgatgctttttgagttttatcctgaatcaatttttgctcattcaaatggcaaattattatgtaagaacttgatggtttattttacatcctaaagtccaatctctttggtatctatctagttttcctcaataaattgccaagtgacagttactctcatattggcgttaatagttgtagataatagtaaacaagcttggagagcataagcctaaggtagtcatctgctgtttgtccagtattagtttttatgccagatcatgagcaaaaaaaacttgcagtttgtacaaattaattaattataatatatttgttttgtagaatctagtgatggctctaaggatgatcaagttttgtaacacaaagatatcttggagcatgtcatagttgaagtccattcatcttcgttagccatcttaggttcctctcaaaactcaaacccagtacttttacatatcctgggttttcaactttcaataatctccttttcctctcattagcaaaaggatacaaattctctctcttctcaaggtactttctttatgttttcaatgttttaagcaattggtatttcagatatccacaaaacccttaaagccataaatagttcttgttcattcttatttacaattcatattaatatccatgtctttatccaatgcctccttttgggtaagtgcaaaaccttcaatttctagtacattcctgcaaaacccaaaaccccttttgtttcccattcctcttcataatggtggctctcgatcttcatcaatccctaaagttcattgtggcatacgagagttgagagagcgaattgattcaataaagaatatccagaagataaccgaagccatgaagcttgttgccgttgccaaggttcgcagagctcaagaagcagt

SEQ ID NO: 197341 - DNA, 769 bp, Cannabis indica
aaaatatataaaaaaatatgtttgacaaaataataaaaaatgtctataatatgtagaacaatgttttgatgttttccaattttgtattctttttaactcaattttcaaaaaattatttttaaagaatttaaccaatcactcccaattgggttttaaaagcaattctatgtttttctttttaaaagtaatttttaccatataaagccaaacaaacaccatctctttatctttcccgatttcgaaaatgaaattctatttctttactttttctcttcctcaaaattcaagttccaaacatataccaattatcctcacaaaagaaacatcacaaacaacatgattttatttaaaattaaagaaagtaaaatagggttgagaagaagacctgttgaggtggttcatcttgaggtggttttgttgaatcaacttcaaaaggccaaacatatttatctgttttttcactcctactaagactccaatcatatagtcttctctcttccacagttgacaaaattgtgtatgattcctatatgtatacatacacattcctattattactcttaataattttggaactaaaaaaacttaatctttaaaataaattagaaaataacacatttttttattggtacttacttacctttaagagttgaagttctttgttgagttcttcttcttctaggcctctattctttaattcttcactctttattctataggcatcattaacctattcaaagtatataaatcaaataaataatataaaaaa

SEQ ID NO: 197342 - DNA, 1676 bp, Cannabis indica
gtgccccaatgctatttataaactattgacactgattagagaactagtaaataagtctcttttggattggaacttaaacaatttgatttcaacaacactattttaaatggaatgttattagaaatagtattgtattgtatatgggtcatagaatctggcttttgtttggaagctcatttaggcattaatatatggcctaaataagttgaaacacagttttcctgtggggatttaatttataacactcactcactcactcttcaatttctctaaactacattattttttaagcaaaaaaaaaaaaaaaaaaaaactaagaatttattaaccttaaagttgtataagttggaacacgttttgaaatttgattattcagaaatactctagctaggaccactttagtctttcacactagtaagattagatagtatagtaaaatgcttacgataactacaatgttttgaaagtttgggaccaaaatgaaaattttgaagttttaagggatagttttgcggcgaaagtcccttaatatttataatttttatacatatgaccctaattaaaaaaaatagcggcaaaaatactttatcttacaattttattgtagtcgtagccttcttttttggtcattaagtgccaactcaaaaacacgtggcgacatattattagaccacgtattaaataagctaaagaaatatgctaccacgtgtttttgagctgacacttaatgagtttaattggcgcttaataactaaaaaaggtagtaacaaaatcgtaagataaaatacttttgttactaccctttttaattaggatcatatgtataataattataaatattaagaaagtttcgttgcaaatattttaaattttaataataacaaatagggagcaactgtatataatatggcctcacctatattttttttcgttattatttgtttttatttttattttgtttttttttgttttttgttttggagaaaacttaccagaattttaaaaaataagtaacattttagtccaaattgatctctttaatatatcttataacaaatttttgaaagaaaatcttattaaaacttataataatttgtaaatctaatacgctcattatttactatgtatacaacaacatagttgatgaaatgatgattttctcaaaattaagatttaaactatattttagtgctgtaacattacctaaattttcaaagtataaataatgatatgttgccattaatgcttgatttcctcacatttttataacttttcccacgtcgtctttgttcgagtgcaaatttttctcgcaaagaataacgacatgttactactacctaatttcttactctatcaccataaatattactctccagtaaaaatagataattaatttagtgtatcaattattatgacatgctaatgctgtcaattagagaacattgtccgacatagattaaatgtaaaagtattgagccatatataaagaacatgggctactccactcattgccaattggttttgagatggaaccccatgattctcaacatagtatcaaggccatatacctagcgggctttcgatccacacctatccagatggtgcaaagacgcttaagatccgaataaaaataagcgagcaaattagttttgacttttgagatggaaccccatgat

SEQ ID NO: 197343 - DNA, 990 bp, Cannabis indica
gtaattacccgatcaagtaattatatagtgactttccaacaagtaattacatagtaactttcaaatacgcacttaattctagcatttattctccatgggataaagaaacatatcaaattgtctaaatgtgaaagaagtaaaagtataaagggtaaatagtgacgtaagtacttaaagttttaaatttgtaaataacataaattcaatatttatttttagttgcataagtactcaatatttgtaaaactgtaatttttatctaatttcatctatagaaactatattattatcttaaacatggcacatataaagcttagattctaaatcattgagtctaaacagaaacatgtaattacttccaaatattcttttaataaattcaaaaaaaaatctatactaacgaaattagaaaaaagttacagcttaacaaatattaagtacttatgccattaaatacaaatattatgttgatgccgtttacaaacttaaaactttgtatttatgctttatttacccaaataataataaaaaagtttggataccaacatagaatgttaaatccagtacttacttttacatgaagaaatatgatatatcaagttcttataattgctcatataggtttttaacctcttaagcacatgggttattattaagtggtgctaaacaccaactactgtcttatagcattgcttattatatattattaaaactcaacatttctgcataatcatattctccacaagaaagctctctcaattcaagaatatttaaattgtcataaaataaaataattcttttcaataatcactttatacaataaccttattttgataacttctttataaactatcacttttcacccattgctctaataaataaatatatatatactaataataatcaagaccaaatattcaagaaaccaaatttggcaaaatggatagttcttctatgccacaaaattattaaatttcaacactttatatt

SEQ ID NO: 197344 - DNA, 568 bp, Cannabis indica
acattcgttcacctcgcttttgatgcgatggagtaactgcctcgctaatacctttcaaacgacaaaagagaaccgcgagaagcattgtatcttaacacttagcattttttcctacaaagaggattaagaaagataacgtgtaactggcgagaacaatctaacacagttatcataatcgtctgtggataaagacaaagaatggtttaacaattatttaatattatctcttatgcataaagataaaacgtggaaaatgtccacgtttcatgagcggttatgaattagtagatttcaagagaataactatcatcctatacatctatagatagggatagaacctaaggtaaaagaggacagccaatctagagaaaaaagaaatattattgctacttatgtcattgtattctgtatttaaatatcattattcttaataagatggacccatggactatgaaaatttaacttcaaaaacgttaaaatgttagaacatctttaatggaaatacaaatgtaaaagggattttctacattttctatatatagggctttttttactttatttttgtaaa

SEQ ID NO: 197345 - DNA, 693 bp, Cannabis indica
catattcactaactagcaaaaatagtagttctaatctaaacacttcaaaaactcatgcatatcacattcacatttaaaaattcaacctttttaaagattgtacataagggaagtcatattcactaacttgcaaaaaaactcattcttcttctctctctaatttagaattttcatccaagaagaagacagcacatgatatcatccatacaaatcgtttgatttcattcctttgatcattaccaaataatacaatggaacagttacttccaatatctatccttccaaacttcatggagaatttgtaaagcaaactaattaaatcaaagcataaaaaagaggaacctgaatgcctcctcaactccgagttgctttgagtcaccaccttgaagggtagcttatcatcacgcaaagaagtacctttgccacgagaagtcgatgcattagcaagattgagcgaaccgcgcctagagtactgatgggcgtagtgatggcgtgagcgtttcaagaataatgaccggcttaggctttggtgatgatgtccagtagaagaagggtggtgatggtgatgatggtgtgcatcttgcagcttcatagaactatccgcaatatccaagacagatgaaagaggctttagttcactagaatcaattgcatgcaaaccattctgtataaaaaaaaaggattaaaaaaaaa

SEQ ID NO: 197346 - DNA, 918 bp, Cannabis indica
gagagtagagagagatgactaaaagaataacctcatgtttattatgaaagagatacaatgatatatatacaagttgttacaaaaaaaaaaaagacagctgtataaccaactaacaactaactaccaataattaacattgtaactaactttaatagacttaacaaactaatctcattcacgctcttcctaaacttagaatttgtgcatacatcaaaaccaaatttgtgacgaaacaaagcaaaataagaattggagatagccttggtaaattcagtagcaacctgatctgaagtaggagcaaatgattgaccaagtttgtgacaattgttgtaagaatatcttttcacgaacaaactatgactccaacttgatatgctttgttctagcatgtagtattgggtttgatgttaacaaaatagtactaaggttgtcacaccatagaattggaggtttagccaatcgaatttcaattctgaaaacagagaatgaagccaggtaagttttgaaatagcttgggcaacactgcgatattcagctttagtattggactgtgagatcgtgtgttgtttcttatactaccaagcaattaagtttgaaccaaaaaatatggaataaccaaatgtagagtgtttgtcatcagggtcactagcccaatcagcatcactaaatgttatgactcgaattcaaagagtggttgaattagcagtccatgcgatacagtgccactcaagtatctcaaaattcatttaacggcatgccaatgtgtggtcaacggattttccatgaactggcacactttattcacactgtaagaaatctcaggccgtgtaatcgtgagatattagagtgctccatcgatacaattggggattggcaactggatctccctcgtaagtagacagttttaatccaatagtc

SEQ ID NO: 197347 - DNA, 1042 bp, Cannabis indica
tattgctaataatctacacttagtgttcctattttgtatggatattagaatcatagcaactaagagcaccataaccgaaagtcagtccccaaaacttatccttcgcacctgtgaaagctctaaaggcctcattgcctacaagttttggtcacaaatattcgatggcagtttgtgtcatgcttcattgtgaatttgttctgaagtgtctactttgaaattcatgaatttctgtacattgcaaatgaaaattgacagtagtttgattgatagtttggctttcgggttctaaaatctacagtggcttgtataatattttaattagttgagccacctatctatgtattatgtttatattgatgcatttcttttttttttttggtcaagtttatctgtgatttaatctttactgtgtttccattttattaaagctatatatgtttttctaattagtaatataacagcacaggggtggaaaaagttgcttgatatcttaagtatgtgctcgatgatgtttatatttgatggagtaataaaatgtataatatggaatgcttttttgggctgaaaaacattatctttttagtaagttatgttgcctcgctaagaatataactgactgaaaaaattcaaaatatttctctacaacactaaaaagtgggtaaaattaattggatattgtattttgaaggaaaattggcacgaaatatggtgacctgattgcacatgtgcagaattatctatcagattggatctttctagtgtaaatgatatcagccaacaatttgttttccttctatatcttctggttcttactatgatttatttgggtatgatatgactgattcacaacggtatgactaattcacctgcttgcgagaaaactgaggggacattgtttctagggaagtttgcgatttaagcaaccaatgcctatttatatacactgatggtggtgttcatagtgcaagtggctctcttccaatttggattattaaagaaactgtaaaatcgatttgatttgttcctaaggaaaaaaattctg

SEQ ID NO: 197348 - DNA, 807 bp, Cannabis indica
taagattgtcttacttggttttattgaagtgttttttaaactttttaaagtataactaaaataataagaataaattaaatattatacaaaagtatcactatccttacaaagaaaaaaaaagcattagtatttaagttatcattagaaacttctataacgttagaactatatataaatataatggcatatatacgcagtcatattatatgagaataaataatgaaaataataaataaagataagagtaagaatgataaaattaatatatatttatttttataaaaagaaggatgagattattgtggttggtgtgagctgagtgatgcttggcttctaccaccaacctctccactactcgtttttctttggtggtagatagatatggagatcagagtatatgagcactcaaaaaatattataataaagttatatatatatatttaagttgcaatcaatatccaatatcaccctccttcacccacccaagacgtatattttctacttttaaattttgactgaaataccttttttctgataataattagatagtaaattatagtgttagcttttagcatcttataagttacaataattacgctgatgatttaaaatttatatatatgtggagggagccagggagattacctttttgtcatgacataatttcactgtatttgcgattgattgatatttattttaataccaacaatttttttttaactattttctttataaaatttaaaatgtataaattgaatttgacaatagacatgtaccaattacagaactgataggaaggaggaaact

SEQ ID NO: 197349 - DNA, 654 bp, Cannabis indica
aatacacatctctaagaatgttgtcttctattagcgcacaaagcatgttgatattgactgtcatattgttcgagaacaagtcaccaaacaacgaatcaagctttcacatgttcgccacaacattgctgatatcatcatgactaagcctctttttcccacacaattcaagttcttattgtccaaaatgagtgtaatgactctctacatgacttcatcttgagaaggaatattaaagttgttagtattatctataaagttagttaaagttaattacaagctggttaagaaggttattatttcaaatgtaatcataagcaactcaaccagtttcttgcttgagttgtattaaattcatgtatatatatcttgttttcagatcaatagaatttaattttttatcattaaatttttttaaaaaaggtgtattagaaaattttactatatttattctgattaaaattcatcagtttaattcctttttgttaaggagttagttctacattaatataatatgtgaaaaaatttaatattattacaatgtatagcataaatttgtaaagatgaaaatatatatttctaccatgcttgtctcatgggggcaatttcttcctcaatttttttttttttttgctaaggccccttcaatttactaat

SEQ ID NO: 197350 - DNA, 1148 bp, Cannabis indica
tcctttgctagtaaaacagcataaccattgcttgaactgacctcttttggaccctcttttgacttccctatctcaacattcctcatagcttttttcttaggagttaaccattcgttgcttccttcaccattatcctttttcccctcattgttccccttttgatcttctttttcctgctgggcagtttctaactgttttcccattgtatttcctgtgtccctatgagcatttccttgctctttagaaccaactgtctcagccactgatttcttcttccacacaaccttcttttccttgttacaatgggcaaccgtatgccccaaaccagcacaagctacacaagtagttggaagccattcatactctattgtttgttctactagttgctgtttctcattgataaaagagataaatttcggaggttcatccgatatctcaatatccacaagaacacgagcaaacttcaccatagacctttcttgagtcactttgtctatcatgattggcttgcctattgtgctaactaaagcacttagattcttcttcccccaatactgcagccccaatccattcaatcttatccacactggaaccgaattcaccattttcattgaatcaatttcagtagaccaaggcctaagcaccaccggttttctatcaaagtgaataaccccagcttctaaaatgaggtcacgagttgcttcatctcgaaaattgactaaagtgcatccagagtgcatccgaaccaccttatcaatccctaggttaccccaaatcctctttacaaatccttcaaacactctaaatggaggattggcccctaagacaaagcaaacaatagcattcttccaaaatgatgcctcaatttcaatctcctctaggtcaagcttagctacaacttggtcacccactctcattggttcagtatacgaaagtttagaagaaggagttggtacctgatttgagttaaatctgctccacaagtctctcgcatcagattggaagtctgctggtctcgcatcagtatgttccatttcatcagcccaagaagctggtctcgaatccatctgagcagtctgctgcatttcccgtgccatttgctccaactcgcctctctccgttccattctctggaaccaattcttcgat

SEQ ID NO: 197351 - DNA, 6151 bp, Cannabis indica
tggtcaaagattatgactgcgagtttccataatcggtaagagcatcctcaactttgttgtcaaaaacattgtctgcaggtttggaattccaataaagatagtatccgacaatagaactcagttcgatggcgacttattcactgagttctgcgagaggaacaatataattaaaagcttctcgtcagtatccaggcctcaggcgaatggacaagtggaagctattaacaagaccttgaaggatactatcaataagaaattagatgctgccaagggtagatgggtcgacgaactacctcaagtactttgggctcatagaacgactgagaaaattgcaacgggacatactccattcgcgctagcatttggctcagaggcaatgttgcctgtagaagtaaatatctcagctcacagaagagagttttgtaatcaagaagaaaaccaagaacttctaaaattatccttggttctacttgatgaaaatgtactgagtcacagattactaatgcagcataccaacaccaagtaataagatacttcaacaaaagagtgaaaaagaggcttttcaacgttggagacttggtgctaaggcgagtgtttgcaaatatgagagacgcatctgcagaagtattcaacccaaactgggagggtccttatgtgatcaaagcaatagtaggaatcggggtttacaaattggctcagctgaatggctcgctgataaagaactacgagaacgtggaacatttgcgaccctactaccagtaaattgatgttgtaactcatatttctgatgtaatattttgaacttcagattttaataaagttaatcattttttcaagtaattacaaagtgttgttctttaaaattacttgaggggcatatgtgtatgattaaccaaaatctatctggaaatacatgatatattgcaaacccaccactttaaaatttttcaaaattttttaaagtttttttttttcgattgaacctttttgacgagaaaggaaaatcaaaaattgtgaatgacgtttgattaaacctttctgacgagaaaggaaaatcaaaatttgtaaaggagatataactcataagttacatgaaaaactgaatactaacggctcgcattgtataggaaagtattaaacaagacaccaagatgtcttggaaaaaaaaatacttaaacctaatatatgaatagacggcctaattattcatataagcaatcaaaaatataaaaagtgataatcattaacagtgtattaaagttttcttaaaaacagattataactgtttatgcgaagcagaatcgataactactcgtaaatctaaagcagaacataatataattactcgcacacatagtagattgctgactacttaaataataccaaaggaaatcacgaacaatggaaaggccttgagtattttaaatttgatcaaaatatgattgtttaagttgtgaatgaaaacgcacgcaaacaaatatatattaagttcaaatgtaaaagtacgaagcattcaagaaagataaaataaaagcaaagttggccatcgaaccttgtaaatatgtctttacaaaagtgccacaagaggcaaactactatctcggccttagggccatttggccattcatttgcctaaaataaaataaaaataaataaaaacaaagcctacatagtaggagacttggacaatttttcttctgctgccacctcaacatcttcttcctccttcctagtcttcttgtagaaggccaggatttcctcctcaaattctaacaagaaactcgtatccatcttcgggttttccatccaagcttggtaagtggtacggaggccaacggtgttgcatcgttcaatggtttcagcctctttcccatcaactgttaccttagctgcatcaagttccccttggaacttctcgcatgcatcggtcttgtcctttgcctccttcttggcagcttcaagattcttcgacatcctctcggcatctttagtaaggtgagtaatttccagttgggcatcattccattacttggccataacctcgtgctggcctatcaagttatggacctcacccttcagatacttgatcttatccatgcctcaccgctgggcggctaaagaaatgaaagatgtctggaccaacaaacaaaaatacataagtattttgaaggatagaagaaaaaatatgtgagcaaataaaggaaaggaactttactgagagactgtgagataaactccttgtgagcatttcccctagatccccatgattgattaaatcccattcatgggggaggaaagacttgaagtgacgctagcatattgcgccaaactctgcagtatactctgagccagtttttttagcctcgacaggcaaagttttgagggcttcgctcgaggaggcagaagattaggtcgctttgggggtaggctcgttggtacttgcggaggtcagaggagggattggatcctaggtctctgtttcagggaccttgagattagcattctgagaggctcgcttcttgttagccttagtcttcttgggcctcttttggggctccgccttgacgttcgatggggcctccgagatggctagcctcttctttcccatcctgtggacgagaccctcgaaattcatttcttcaagacaagataaagtgttagcatatattgaaaaacaagaaaaggggagattggggcataatttcctgcctaaggaatttaccataatcagtagaagatgacgaagaaggactataatatccactaaaatccctacaacctatgatcctgaatttaacatagggattaattggttttaaatctcagctcatgtctaaatgacttgccctatctgttatggttccgtatagctcggccatcccataatacgaatcaacacagttaatttggacgtggaacctgagataccaactatcaaacttatgtgtaatatgatctataaggaggggattccaggtgcaaagttatagcggatatcttgatatgaactagagtattacgcttggccctaagaattatgggtgaccaaccacattgattacctcgggatgctccttcttcggcttctcgaggggcggtattctggaggtattgtccccgagcaacacgatcttgagctctctcctcgtctgggacagggacctgctgccaagaaatatacttgggatatttataatcacaagtaaactccttctcagttaggagatcaacagacctcaggttgacctcattcagaagaaagttgcatgacctaagaccgtatgggagggtcaacaagagcctgtgtcgctcgaccatctcaagagtaggggcaggtctttttgagacggctgtcaaaaataaagcaaagttacaattaggtaaacccgaataaaaggcatggattaatttaaccaagtcttgtgaaaataatcacttacgtataatctgaaagtggttgtgccgatgggggagagactggtcgtccagaaaaattcatccttgaaggaagttttatttggaatatccacaatgatcttgcgattgcctgtgtgagtcccaagatagtaaaaactcttgttgcattcttcctccctggaacagccttaacagagtagagatactctattttccaagggagtggggcactcccaattcaagattttgtataaaaccctcaaacttgtgaggattctatatgtaatgggattcaattggaatggggcaagcccgaggtggtttagaaagtccttgaagtagtatcgtagggggattattactccagccctgatgtgctcgaggctctaagcgtctattctagtcaagccactagtaatggtctcaccactggcgccctcggatgtttcgcttgtaagtcgcacttgaggatagcaactaaactcaccggcacgtaccgatctaacccaacagtctctcctatattcgaccccacaagtcctcaaggtgttacctacatagtctctgatggctcgcacctttgactctattagctcagccttgaaggtgacattagggtcttaggaagtctttgatttacgtggcttggaagacataattttaaagtccaagtcacctggttcaaaagcaattgtgacattgggtaaaaacaaatgcttagacaaaggaaatgaagacacattgagaggttcaagccaagcagcatctcacaagaaacggcgtatgccttctgtaatttcttgcaagaagcgtctatggcaagtagcaatgtcatcatggtgggttttcagtaagtgctccctaatttttgcatcatttatctccaatttttatttggcttctgaaattttgggtttgtatgggatggcaagttctgtaggatactctatttctaaatcttctggacgataaaattctgaaccagattgggacactgctggaaggagaaagcaatcccaatccctgaaagaaatttatcaaactagaagttggtaaattggtgaatctcaaaaacctacgttctgtctaaaccctaacatttacccagatacaatttggccctaaaattgctaaaatctaatgaggtgtcaaaggtgctaactaagaaattagtaatcaaacccggaaatacaacataaaaaatatgcaagaaaataaggaaaaaagtcacttactgtttggagttggtttctgggacgatgagcggctctgcaatctacgaaacaataaacgacatgaagatcccttgaaatgcttgaagttaaaagtcaaatcagatgaaactcgcaggaagaatgttaatgacaaagatggcatgcaaggttttgggaaaatctgggaatggttttttggcagaaaagcttgaaattttttagagtttctgaaatgacaaaagtaatgcaaaggcggttccttttctcattttatactcttgggttaatctctattagatcagggaaacaattgatccaacaggtagaatttgaaagagaagtggaaaagatggtcactaaatgttgatgtaccttgaaaccataaaactgccaaaattaaaggacatacatttttttcaaaagggattataacaaatataccctctgtaatcatttaaaaatcacttttcattaaaaagaactttttaaggggcaaatgttatacccgaaattcagctggcacttcagaaggggacacgtgtcaacctaagagaatgtgaatcaacgaatataataattattatattcaaagatatgaaaattgaataactaattaaatgaaaaactaataatgtatatctataactcgttggtaataaagtcttaagcgagacacagatgtaccatctattaattcacatattgacgagaaaccatttcgtatatgaagacgcaatcataaggatgatgacatcagtaatacaaaacgaggccccaacctcgctacgtatgaagagatgtaaacaagacatgataactgttaaaacacttagcttataacatacattatacaaactaaacataacagttgaataaacttgaacaacaaatagcgaggcatccatctcgctgtaataaggcaaactcatggtaccttcactaataagcttcagatatctttcaatgagattcactgttccgtcgagtccgctctctaagatagaagctgacattcaaatgatgtttactgctaatgtaaagaccagttaacttaaatttggaaaatagcagataaatagggtttaattatgaaacttgcacattagtatgaattatcagtttacggagatttacttgaattcagaatgcattttatatgtcatctatggaatttcatatttttgcatgttttgtgcccagcaacattagaacgcgacgtttggctattagaatcacatcttaatatttttagtatagcggggcaacatagttagacattgggaatgttgagaatagtcgagattttagaatttgactaattacccctaagtaattttatgactttttggtgtaggcaagggcattatggtctttttgcctttttggatttttgtcctttagtgtgggattaagtgattagttaatctgattgttatggctgatattatttaataaaaccttttcttctattcatttattttacacaaaaataataaattaagaaaaaagactttttctct

SEQ ID NO: 197352 - DNA, 734 bp, Cannabis indica
ttatttcttttaaaatcatataaatataaccttataaatttgtgtataaaaattattatgttgtgactaaaagtcacatttagttacaaaaaatttatgttgtgactaaaaggttatcactaaaggtagctttattttctaggttgcattcaaactgttgggttatcaattcaagtctcacataagaagaatagacaagagttgccttgaatataaaggttccacctactccattagtatgagacattttgggaaggtgcccaaaacaaaactgtgagggcttaagcccaaaatagataatatcatactaatattggagtcaggttgagatggcggcccaacaaggtgaaagaatagggcttaacaagtggtattagagctaaaagttcaaaatttgggatagtgggttgctggatgtgcaatgtgtgggagaacccctcaatgtgatgacctcgcaattgaagatatgtatggtgtcttgacaaaattctacttaatattgtagtagtcaagtggtgtgtctcgttggtaattacgttgatataagatgcagatatgtgtttcgtgtcttgtgttgaaagtcttcctagcaatattgaaggtcagacggtgtgttctatttggcgatagcagccgtacaaagtggttttgctggagggtaggtcacgagttggtccttggtttgagaggaggattgttaggtatcaaccaaagtcctacatcgaaagaatagg

SEQ ID NO: 197353 - DNA, 832 bp, Cannabis indica
tcagtggagtttagggcccatggtctcaacggcacaacctaccaagcacaagagaatgtgtgttcaaacatataagaaaagaagaagaaaaaaaaagccaaaatccgaaaccgaaaaaatggatttcaaatgataacacccttgtggccttggtggttgctctaagcaaagaaaatggagataaaaaaaaaacacagagataaattgaaagaaagatgaagagagagaaggtgtagagagatatatatgtaagggtcaaaacccatacacaagtttatagtttgttttcatttcttatttttctacaagaaaaaaacactacgaaagaaaagtagacaaagattcaaacaaaaaaaaaatggtgggtcacattgcttcacaaccccaccaaatgcaattaagtaaaagagattttctagtatgtgttgacccaccaccatcacccacatcattctttttttcttcctactccaccaagggtattttagttattttaatatgacggccctttactaatcctgatgatgattatatttgtgtttttaatgtagcgtaatagtattttacaattatatattagcttaatagtttaaagattttgggttcgaagcaatctttttttctatctctcccttatcactaagttagcgttaggagtgttttgtccctccctgtagagtgattttgtttttgtgtgtcgaagcgttgattactggttccaaagttttgctatggcctcctctagcaaagaagatcatgctttgaccaaaagatgggctgatatatgtctagaagatgaggaagaacacgaagtctccctggctgacgattg

SEQ ID NO: 197354 - DNA, 1337 bp, Cannabis indica
cgccatttgctggtagcgtgtagcgagctgagttgtgagccttctataccagcttcaatgggcaaggggaagaagggctcgaggaagaccatttctgggcgagaaccaaagaatttcacctggtgtacagacccaaggggctgttcagtggtgctcgtcgcagtaggtgcagccttttctggagattttgtaggctccatggtgagttggtttgaagatctcttcttgtttgtagttgtctttggtcttttgggttctttggtagaacctgaggcttcatttgcctgagctacacattttttggattttttgtttataagggtggggctgttgaacatgtcttccgaattgggatccatatctgcgaggcaaaagagacacatcaacacttgctcaaaaatagataatagaaagatggggaataaactccctctttaaggaagttaccataattatcataagatgacgatgaagaactatgataattactaaactccctagacccggttattacatatatatcatgagggtttattggagacaaatcccaatctgaatccagatgactcaccctatccaagttggtaccatattgctatgcaattccgaagtacgaactagtgaaactaagttgtacatgaaacataggataccaactatcaaacctatgggttatgcgatctatacagaaattaccccaggtatagaagttatattggctatcctaaaaggttactagcgaggtacattctgtctaaagtagtgaccatccacattgattaccttaggatgcttcttcttcagcctcccgaggggttactttcttgagatagtggatgcaagcagcgtaatcctggtcttcctcattagctgggactaggaccctctctcacgaagagtattttggaaccttgtagtcataggtgaactgatccgagccaaggaggttgacggtcctcagattggccttgttcaattagaaatctactgaccacaatctgaaaggaagacccagcaagattttatgacgctcagccatctcgggggtggggattggtctttaggtaacagatgtcaacacaataattgtaataagtaagcgacctcaattttacaaatataaaaagaactctaaaccaagtttttcagatagaaatcacttacgtataatgcgaaacatagttgtgttgataggggaaagactagtagtctagaagaaatcatccttgaactcgttcttgtttggtaacctcacaatgatgtgggtaccaaggtaataaaaatctcttgaaccttgcttccttgcgggaaaaactttgacggaataaaaataaact

SEQ ID NO: 197355 - DNA, 849 bp, Cannabis indica
aatataattaattatttttactttatattatattgaagtaaatttagtacaaattttaaatacttgtatttgagagtcttaaactatctagaggtaaaaaaaaagtagctaaatataaccaaaaaaaattaaataataatcattaatgataaattaatatgaataaattaaatatatttatatatatatatatatatttttgaaagttttgtttgatgagttgggaggaagataaattaattatcaattacccttgtttggtattaaaatgaaagttggaaagatggaaataatatagtgctaataaacaatacaaattaatgtttttttggtaaatacaatacaattaatgttctttttgtttccttcctttctcttctgcctataagatgagggattaagatgagggatcaaaaaatgtgtgccctaagtggttgtgtcaatccggctcttgacgaggcttttggagtgaaggaggttctggataaaggaatctagagtttctcaagttaccgtcgaaacggataacctcataacagttcaagctttccgtaactcagtgaatacaaactataacagttcaagctttccgtaactcagtaaatacaaactataatagttcaagctttccgtaactcagtgaatacaaactcttctttctgctgctgcattgttgaatgcaagagaataattttaaatttgaataatgtttgtttacgttttgttaaatattctgctaaccgtgtggcttataatcttgctcgagtttcatgattatatgctgagcgtaattattcgattgctcgatgtaattgtgcaagaatcgcttaaataaagtttcagctttta

SEQ ID NO: 197356 - DNA, 1296 bp, Cannabis indica
agagagagagagagagaaatgattcaaacgagaaggaatatatgcagaagaacacatcccaactcatactcgtgtgaccactcaactatcaataaatggaaaaacgccattaatgaaaaaacttcagtttatttgaaacgtttttgcatgacagagagaaagagaaaaaccagaaaaaagtaataaagttttgatttttatatattttttgatacctgaggaatagccagactagcaatggtgagtccagaaatgatatcagacttgagaagaccaacattgtaaagaggaccccattggaaaatgggtaagaaaaattgaagacccagaagaaatttcttgaaggaacttgtttggtaacgaagaccatgaagagggttgtcagggaaaaagatgtcagtgactcttctcttgaatttttgaaaagttgtctgttttggaggcaaacaaaccttgtgaatctccatgtttggattattatttagtactgactctggtatttggattctcactactgtattttcttcatggcttgaaaaatcttctactctgtttgagttcaaacccattttcaaaaatcacttgtatttttttgttatgatgatgatgattagaaggaaagtttcagacttggaaatttagagaagaaaaaagttgatgaaaaaaatgacagtggagagtttcaatttatagagaaaatattttgcaatgtgtcaaataatggcagttattgttgtatttctcatttcctcgaaaggctattttagtcatttcaccttctctcttctctttcggtatgaatgtaagaaagttcggattcttttttaatactataaattacggggtaaaatcgtcatttcataaattaaagctctctcagtctcacacacactcacactgttcaaatttgtgactcaaatacttaaggagagagatatctcactaaaatattatattatttattaatatgattactgctctaagaaaaagaatttaaaatatgataaaatatttgtgatggaagaaaataaataattaaataagtttaaaggaggaatgttttgtttgctactaaatttggtgaaacttagccaaaccatatggctattaattaatgaagatatttgtatttttgtaactattttgagtgaatagctattaaaattatctcaaaacacctacatcaaatttatgtttatatacattatttttattattattatatactttaattaattttaatatttaaaaatagaatgtttaaatcttgtaaaaaaatatataataaaattgata

SEQ ID NO: 197357 - DNA, 844 bp, Cannabis indica
cacctctttcttttcttgtttcctccagaagcattccctcctttcttaaaatctcggaaatcgtttgtggtttcagctgtgttctgcttcttcaacgatttcttgcctccgaatccaaatttggaatccttaaaatccctcttcttcttctgttgttttccctgtccaactccacctcggctttctcttgctttccctccagatcgatctccaggacgcacaccaggtcgctgcttatttgatctctggaatgattttccatcttcaaaggaaaagtccaactcgccatctttttcaccaccttcaggaaacccgctctgctgcctctgtttcctccacttcttaacggattcaatgtcatcctttttctgcttagccctctctttcatcttctgggcttggacttctttagccaatttctttgactctcttgatttccttctctcctcagcctcttcaatattcttcttctcctccaaaagtcgaccctttactttctccatgtgagagtctgtcttcaccatctctgcataataatcaggtggcctgagaaaaggaatccccatcgactgaagcttcccgaatgcttgtttcgttccctccagagcttgattgtagaaggcaagctccctggtcaggtcatcattcacatccaccgcttgctgttgatcaacatcaacagaaagcttgtgtatccactccacattgtctggccacttaatgtcaccgagtttatcgagcattccatcagtgttgtaaatggcagtctttgatggttccaccaatttcacatctccatcttcatcttctgattcagtttcaaactcagaaccagattcagaaa

SEQ ID NO: 197358 - DNA, 4390 bp, Cannabis indica
tatgttatttatcaatagcagtacataaaagaaataatcgtgtctataatattctcaaattcgtgacatgtataggtattaatttataatttaatatgtatttaaagaaatgaaaataagtaaaatataaacaattaaaattaaaaaaaaaaataagaggtaggaaaataaaaaagatacattattatatatgcattaattttttgtgattagttttttaagaggaataatttattttctaatattttgtgagtacgtctagtagagttatattcattaaagttttgattataatattataactaaattttttaagtggagttctatttacactttacaaaataataagtacaccccaatatttaagaaaatgaagtttaaagtattcttaaaaataataagtactcccagatctctaaggtttcggttctaataacttgaaccttttggacttcagtttatgtttttactcacaccttaattgatcaatttcacattaatttttagaggtacataatatactatacccttaagtatatttttctttgattttttttttctatttttttattcaactatttcttacccttgaggtgtacatataagagaaaagaaaataaaatgcagtaagataaaatggatctagacacccccagtttactgataatatcgatgcaggtggtccgtatttcatgctaatagaattttagatttatcaagtcttttgagctggtacattccatcacacacattatgttgtattttgtatgacccttcccagttaggtctgaggatccccactcccggctcttgagaggccgaaaacactattctcaagacgaggtcaccaacttcaaacctccaaattttgatttttaaattgaagtatcatgcgatctttccttggtacatttttgttggacttgagactgctctcggagtttttcgattaaatccaaattcatgaagtagagcgttgtttcgaggtaagttttttgcctttgagaaggatcaatgttctcaactagaataagtgcttcacagtcataggccattgagtatggagtgtgccccattgaagttctctttgttgtccagtatgcgccccaaagaactcttggaagttatttcggccaaatgagacttgcaagcttgtaacttcttttttaacgtggtcttcaaaattttatttcaacttccacttatccattttttgtggtttggccacaacttaaaaactttttactattccatgcttgacgcagaaatctgtaaattaattactgtcaaattattttctattgtcagatataatcttgtgcggaagtccataatgacatagtatgtttttgatgaaaaaatctaagacctttttggaagtgactgtattcatgcttcgacccacttggtgaagtaatcgacaataataatggcgtatttaactcatcctttcctagttcgaagagagcctactaagttaattgcccaaacgaaaaaaggtcatagactgttcatcagagttatctctgttggtgaagctctaagaaccttaaaataacgttggcattgttcatacttttgaacgtattctatgcaatctttcttaattgtgggccagaagtatcccttctggatgatcttctttgatagacttggtccgaacgtgtggtctccgcagacgcctctgtgtatctcgtgaattactacactgattttggttctaactatgcacttcaaataaggtaccgataaccctctccggtaaaattttccatcttgaatcacacatttgggagcttgatattgaatcttcccggaggaagccttatcatccatatatccccaaaacttaagaacttgtatatagggcctatccaggaagttgaatgatcgatgacgcttacccttaataattttgtgcttggaatagcaaggtgggctatgggaactaatccgtattgctcgatttctatgtccgttgctaatttttccagcatgcccgccaaggtattttgatcttgaaggacttgtttggcagtatatcatttaaaactttgaaccaactcttgagatttagatatgtaactagctattttttcacctttaatctgatattctccaaatatctgatttaccaccaattgaaaatcgttgtagagttcaatgttctaggctctaacttctttagccaattacaagcatgcaatcattgcttcatattctacttcattgttggaggtaatgaatttaaaacagagggcactctggagttgatgccctcacggagaaatcaaaatgattcttgctctagaactatttcatttaatgctctgtcaacaaaatccttccaaacttttagttctagaatgggttcctccagattgttattcattctagtacattccacaatgaaatctgctagagcttgtcccttgattgagattctttgctggtaatgaatgtcaaattggttgagctccataaataatcttctagatgacttcggcttctgtaacacttgacagggtgatttgtgagtaccttgatggcataggcctgaaagcatggtcttaacttctgtgacgcaattaataagtgataggaaagtttctcaatcatgggatatctggactcttcctccaacaatcctttgcttatgtaatacactgaaagttgtacttttctttcttctcgcactaaaacggaattgatggcatgatcagacatgaacaaatacgggtacaatagttctccctcaaccaatttggacaaaattggagcctttgcttaatgttctttaatttttagaagacatcttcacacttgacagttcattcaaatttattgttttcatgcaaaacattatatatatatatatatttatatgttcaacatttttttttaaaatagatagatttgttataactaaaatatatagcgtcatataatttaatttgcatataatttatttacgcattgaaaattgaaactattcttataggagaaaaaatagtctggcgtgttgtttgaggacgttatagttttattgtttaaattctttagagcagttttgcctcatgtggctcacttatttcagcagcttatggtttgacaagacatgccatttagttagacaataagctaccctaattcaaaaaagttcttgcgctaattatgaatatctgtatcatttataattatttcaacaaaaaattccaaatctattaaatataagcatggtgtatttaactacactatatatcaaatgcatacaaaaacataacagatacacaaagatttgtgttagaaggatttaattatatcatcttttttctaatcaaatctattaatgtccatgacacaaacacatgtttttgtgcttttgctacatctttttatgcatttgatacattgagtatatatgtaattattcttgggctatatataaattgaggatgattatactaaagtacttaatcataagttagtgttaaagagtttcaaggaaaagggttgccctagatgcaaaccagcatccttaagagtctgtcccacttggtcaactccataaatttttcttggaaagcttgagaccaatctgtagtttccaatccaaggcaacctcagtgagtctataaatctataaattgactgcactttttctatgcttgaaaacctctgctctcttctttccccatttgataaccttattagtatctgatccaaaaatgaaaaagggtaattaataattcagtaattaattaattaaatcatcattatattaaagttattgtaagaatctaattactacctgagtagcctgaggatctttgcctgtgtttaaagcttgtttataattagattgaatctctatactaatagtagaaggcttaattgtataacttgctctttttgcagcttctgctggtttctgcactctatgatctcttaaagctagattcttcagcctttccttttcctttatacacattaaatcacatcatcagttagcaacctttataagaaattatatgtaggaaattagtataatgaatactcaatattatatttttttagtacgtattaatacttaccctattttggaaatggaatgttggtaggaaaaaaaaaggtaagaaaaatgtagaaacaattaaaaaaaaagtggtaaataattttttactttttctttttttttttaaaaaaaagtctcatgttgtatggtataggaatgacaaaacacacagaaagaaacttaattacaataaaactttccatatcaaatgtaattttatttttattcaacacactttttccaaacattaccttaatgttagttacattactattgctatggttaattctatctaactagactttcagctttgta

SEQ ID NO: 197359 - DNA, 1019 bp, Cannabis indica
tcgaattaataaaaaaaaagtaacttagaccgaaaaagagataaaaaattaagtagttaagtttagtataaatacttaaatttttcttttattatttattattaaattaaaatctaatgatttaacatttttaaaattaatatttatagttaatttatttgagtgccatttaagtatattactctgttttatataaaatatataaatatatatatatatatattgcccatttttttctttaatttatatatattattattagtttccaagtaatatatatattaaaataaaattttgcaacctctactatatagagatctaattatgatgataaacaattataataatatataggttaatttagaattttgctagctctcaattttgatatatgtactaaattataatttttgaattttttaagtcgttaaaaaattttctaaagtattgttggatttaagggaattctgtctaatttaattcaattttgctaatgtgatccatatactaaattgtgccccaaaactttgatatctattaaatcgtgtcttaaaattttaacaaaatagtgttccataaaagggaattctctctaaatttttattttaatcaaatttttttaataaaattgaacaaaaattcataaattcaataatatttatagttaaaaaaaaatttaacgacgggaaaaattaattaaaagtgaatgatttggtatatcaaaataaagtttagtctaatatatataggtgttacttgatgtcaatatgcatatattatcatgtatttgattggtgttctataaattgatgggataccaatatatcatatatgtgtatgttaacattattaattaattaattaattaattgaggtttggacgttttcgatatcaagaatacttgtcaactttgtttggttaatatgtaacaagaatgaagctttgggttgcttgtcttgataactaatatatacgaatagtgtagtacttatccataacatactcaattattttaatt

SEQ ID NO: 197360 - DNA, 999 bp, Cannabis indica
tctaacaaagttgtaagaatgtatgtgtatgccacagacaaaaagaatgtatgtgtatgaaatgaaaaagttaatgcactgtaaaaagtacgagcactgctatagctagaaccatttagaggcgaggtgatattttaggattagttagttgtgatattttataatatttattaaattaaattttatgagatactatatttagttttgtacgctttattattatttaaccgtataataatgtataatataatacttgaattatattttatgatatatatttttttatttcaaattatatgaatactgatttttataaatataaaaatatataatattttagtataaattaaaatataacatcatattatataaaaatataacatatagttccctacgtacaatacaatatttacgatggatcaaataagttttaactgtctaatagagtgatgagtaacagaattaaaatttgtattctttttttgaattcactaaaatttgtcacttattaaataagaataattaatgaaaaagaaatacgagagataagtttattagtgctactgttaattttctataataattttttagtcgacttctgtgcttaaaaaataacttggaatattttcttaatttttttttatggagtattcggtatactcacaacatcatctttgtaaatttaaaaaaaatttcgaaataatttatagtatcaaaataaatttgatatttatttacatacgtgtagtatactagagtataaggaactttatttttactagtataaattatattatttggaatttttttaaaatttataagaataattttgtaactataatgcatactactgtgaaaaaaagttaaataaaaaataattttaatatttagtatttctaagaataaaaattagactaaaaataattataataaagagaatataaaaataaacaaaaaaattagaaaaaagagattataattaatactatgttagtataa

SEQ ID NO: 197361 - DNA, 630 bp, Cannabis indica
agtaatcgatccaatccacacttagtgttgattggatgttgttttaccaaaaacgtacggattggatcggatgaacaaccctaattttagtaggttctctatctatttcgacatatggaataattttttagtcaaattcttttcttgatcgtatacgttacagttatttaagactacttgtaaattttcaaaaaaaattaaataatttacaatgataaaaataaaatttacatattttgttacatgcccgactattttttcttatacacgtagtaagtaattgtttaaatttaatttttggcattgtaaactgtttggaattttttaaaaatttacaagtgatcctaaataaatacaacatacgtgattaagaataaaacttaagtgatcctaaataaatataatatatgtgattaagaataaaaattagactaaaaatttattcagaaaacagataaaaaaaatctatcaaaacgtccttttaatgtgtattataaaaatttccaatactcttttttattagtgaaagaaatacctatcttataattatcttatgtatgagtacaaagttttcaagactttagtctgaaataaaaaacaaagttgattactgttgagaatcatggggtt

SEQ ID NO: 197362 - DNA, 720 bp, Cannabis indica
aataagagattataattaatactatgttagtataataaagaaccatctctttggactctcataaaaactggagctaaaattaacttgaaatgaattaattaatctaattccaagaatattataaattcaaagtttataaacctacttttccaaagggaaatcgatctatattttagaaattaataagctttggcccaccaaacttttctattgcatgttatcatctactttttacaggaaatcgggtttttccaacttttttctttcttaatgtgtaaaatcgactttctcaaccactactagccatagctatttattttgccccttaatttgtaagaagaagtaagtattgttttatggattaataatatagggaagctcagcaaattgaccgaaatggaaaacagcaataataacacatacaagagtagtaatttgcaataatagtaccactaaaccaaaagaagaagaagaagaagaagatgttacccatttcttcatgaacatgccgattttgagagacttagatttgggaagaccgtgactagagagatggaaacctgggatcttcggcatctctggaagctcatcaacaaacattttcaacttccctggatttagtagcctgtcttctccccatgactcaccactcaactctaatactattaccaaccaaataataacatgtaacgagtactactactcatcatcatcatcgaa

SEQ ID NO: 197363 - DNA, 682 bp, Cannabis indica
cattcaggttcgacattaagaaaaccggtaacggctcaccacgagcactcatctttgacatacgtcctgaccctcatctgatggaccaatcaggtaacctattgtctctgggtcttctttgttcactatgactatttcacccacgtttatgttgtcgcactcaggatttaacacaagagttacttgctcaaatgggactcccacagggatctcatcactctcaagatcctcaatcaaacaatctggcaaagagcttttactattctctactgaactatccatgttttccatagcatgagaacccctctacataggagagtctaaaacctttgactcaaagctctacatgaactactagcaagaactcaatacttggacttggacatattttgctccacccaacctaaaaaaattaacaaaagataaagaccagtcaacctccatggctaactatcatgcatggatataactcaattcaaaaaatgtaagtggactccaagaatcaattcacaagcaaataatattcacggtcaattctcactccacaagcaaaaactatttacggccaattttcactccacaagaaaaaaaaatctaccatcaattctcacttccacaagcaaaaaatatccactcccacaagcaaaaatatttacggtcaattttcactcccacaagcaaa

SEQ ID NO: 197364 - DNA, 2094 bp, Cannabis indica
gttctctaaaaaccaattcaagtgcattgtcgaacttgaattttttaatcatgcggttaaattggttttgaacataagaaaaaaattaaagaataacacttggtgcatcagatttttgttttaaaagataagaccatgtaaatcttgaatgatcatcaactaaagtgagaaaacaatttatgtccagaatgagaagtaatgtgataggatccctaaatgtcacagtgtaagagatcaaaagtattagaggtaaaattgttaatattaggaaaagaaagttttctttatttagccatatgacaaatataacatggagatttttttatgcaagtttgtaacattacatttcagtttattgctaagtaaatgtaagtatttattggagaggtgtccaagactggagtgccaaaggtcggcagctatgtggagaatatgcaattctacaggtgaagaatccaacatgtatagaccattcttggactcactttttccaatcattctcttgtggatggtgtcctgtatgatgaaatgatcattaaagaatttaacatagagagaattttgatcagtgaggcaatttactgatataatattgtatttaaaatttggtacatataggacatcatttaggatcaaatgaggagaaatggcaacataaccacttttacttactaataatttgtcattgttaggcaacaacaatctagtattgttaacattttagatgaattgagagagtttgagattagaacaaatgtgccttgttgcccctgaatctaagatcctagatccattaacagggaaagaagacacatttgagagaatgatacctgtgttgcccgtagaagtgataggttctgatgtggtcatgcttatttgttgaacaacaagaagattcagaagttgctggtattgtgttaaggtgagttgtggaaggagtgtttggctatcaccagaagcaccaatattctcattactattttgaacttgattggctaaggcttcttttcttttgttgttcttgttataaccagatggttagccgtgtattttgtaacatttcttaattgtgtgtccaagaatattacaatgagtgtagaaaggtttgttcctcttatgtggaaatgacttgtttccattggaatctggtttgttagatttgcttttgtctccttgaaaggcaaaagccatgctttgattttgtttaacaccagaagttgatttttcctttggttttcctcccgtgtgacaaaaacacgatttaccttttgtagaggatccataagaagtatactgcttttcacttgtgaataggaatcagaaagccccattaagaatgacataatatactccatgtggtagtgttcttggagtcttttgacacctcctaatttcagccattgcatacacaagtaagacgatactaagacaattgttcccaaatcgtcttcagcttggtgaagtacatactaattccctggttgtcttgtttcatattcatcatacctttccttaagttgtatatgtccgggctattcttttgataaaaacgaaccttaagatcattccatatcgttgtagtagattcgtcatacaaaatactagaggaaatctctttagaattagaattcaagatccatgatatgacaatgttattatttccagtccaaacattatacaaaatagatttggaaagttaaggtttaggaatagaaccgtccaagaacctgactttgttcttgactgaaattgccaattgcatagctctgctccacgacatgtagttatcctgcccagtgagaagttgagagacaagtatattgcctagattattaacatggtggaggtaataaggattagaaggatcttcgagggggtttctctgctgcatctagcttcttgatcaactaaattcgtaggtagcccagaatcttcacctatgaccgcaggactagattgatcgtcatttgacatccttaaaacataaataaaaagatcaggcaagaaaacactgatcaaaagaacaagaaacaaaagcatagagctgaacgaggcaccaactctggttcaggagttcatcggagaagagaatag

SEQ ID NO: 197365 - DNA, 676 bp, Cannabis indica
taatatccaaaaactgacccttaagggtactccaatctgtggagccgcaagaccaaccccaggagctttcctcatcgccgcaaccatatcatcaattatcttttggatcttatctgacccaatttctccgacctcaacttctttcgcgggttcgtgcaaaaccgggtcacccgctttgactatatcgggcaagcttgtcttcttcttttctccaagacccaaaagccagcctgctctggcaattgacggggacgcccgactgtaacttctccggttcgtgaatatagtattggatggcagtacttggtgtacatgacccaaaacgggaacacatgattttctgaaaattgggttgaaaatgccggggtttaggcacttttcagattgaagtagtggaaggaaacggaatgagagtctataggcgatctccatagccatgaacaatattatgaatcacattttactggttaaggactgtgtttgacacaaggtttaacgacgccgaaattacgaatatgccatcgtgaagatagttcgggggtttgtatttgtaagcttgggcttgggcttgggctttatgttgcacctgatgaggcaggggtttgatgggctgaaaaagggcctcaattggagggaatgaaagggattatttcaacaaatacacaaaaacaacaaa

SEQ ID NO: 197366 - DNA, 593 bp, Cannabis indica
attgagacattaacatgatgaaatatttcagatgtaacagtagaaattaaatgaaggtaagttggatgagaataaaaagtgatgaaatttgtgactttattgatggatttaatgttggggctttatctttataactaattctccttacctgtatattccatccccgaattagtgaggctccacaaagaattgtagcagcggatatcctctcatcttctgttccatcaattgcaatctcaaatactttttcgatttctgctaagcttccatcaaatccatgagcttaaattcagtggctttacctatgaataaatttactgaaaaaagcgcatctgacatacctggcttcaggaaagaaaaagaagtgactgaagaccaggcaaaactaaaaaaatttataattttaaagtcaccgggaaggagttttccctcaaatatttcatggacaagaactaccatcaaaatggggaatgcctcctactcttaaaggacaatgtatagaatatgacatgtgtaataagaccttagaacatggcacacaccttactaaaaaacacacttaatttgctcaagccatcacgtatgcaataata

SEQ ID NO: 197367 - DNA, 996 bp, Cannabis indica
atctatctttcctaattgttatatgttaacctttactcttgttaataagggtgtaatttgagaaaaaaaacttaaatataaatatttatataagtttaagagaataattaaattggatgccaaataaataaaataatttttttaaaatattaatcgaatccaagcaatcgaattgttgcgaactggaatgaatcttttattttttattgtacgatttatctttatctttcgattgtaccgagcgttctagttttactctttacattgtcttatgaattaattttgaacccaaaagtcaatgaatataaaataaaatgtcaaaatcatgcattgctcttagttggatatggtaaaaaaatttataactcgtcagaatcaaaaaatgagaaatgaaatattagtagaccacatttatgatgaagtaaaaccttattggattgtgaacttgagtgcaggaaaaatgattttggacggattgcgagagatacacccattaggaaaaattttaacaagttttttctttactgttacagtcgttagtgttatcttaaaatctcaccttccatatctcaaaaaatagttaaatttcatagggaggaatcctggactgttttccattacttttctattggacaccttgagagaaaacttagttttcaaatgctaacaattatttttgtcaaaatagtaaaaatttcacatttttgataacgctacccctttctgaaatatggcccggacctatctcaaaatatttttccccactggtcataatgaattcgtactactaagacgtgaatataaatatttttttcgcattaaatttggttaaaataccccgctaattcaaaaattgaaaatattcttcttttcaggtaaattttaataagttttttttactcttacactcgttagtgttctcttaaaatctcaccctatacatttcagaaaatagaaaaaaattatagggaggaagccaaaccgttatccatcact

SEQ ID NO: 197368 - DNA, 563 bp, Cannabis indica
ttttttgtttctacaatttgaatttagggatggagtaatgatttttgaagtaggatgatatgtgaagaattattagaggaacaagtgttggtttctttattcataatcctccactggtcagaaatatgtttggctattttatgggcatcagaagctgttcccagaagacctcttcttgtgaacccaactgtgtaaagcccattctctcccttccacccctcaggaaactcccttctcggcataccatcttttgtgaaaaaatcacaactctgcatggcattaattaattaattaaaattaaaaacatagaaaaaggcaaaacaaaaaccctttttgtttttgtgtgaaagaaagcgatgtgtgattcataataagataaagctaaatctaaaaaataatattttcacattgttattaccttcagccaagtaggaacgttacttttgtacccagttgccaatattatagaatcaaactctttctcttgtccatccataaatttagctccatttctcgttatctccttcacagtttccgtaatctaaaaataaataaaaaaaaaa

SEQ ID NO: 197369 - DNA, 1038 bp, Cannabis indica
atattcaattcaagaaaagtgatcaaggaacccagaaacaaattaaccatacctaatgcaaaaccacatatacactaaaaatatcattccaaacacacaaaacagcaacagtagcagacataatatcgtatctacataagattaacaggcaaagtagattaatcaataaattgaaatcaccagaccaattgccaagaacagtaaaaaaattaattaatagctgcttcaatttcagatagatcagctgaataattagctggattaagacaataatttcaaatcaaataattcattttcgctttccaactgttaaaaatcgaatacacacgccaaccttttacaaggaaaaaaaaacagtgatctcaaatcaatcaacaatgaatcaaccaaaaaaaaaaaggtctggtccgaaaccctaaaaccctatcgaaagatccagaatcataatagcaaccaaacaaataaatggagcaaataaaaagaaagcagaagaaatagggaggtacctggctaaacttgagagcgtgctgttcgccggcaagctggagattgccgctgacgaagacaagcattccaccggctgggccagagggctggcaatcgacggtgctgatgttgtgcttgcactgctcaaaaggaagactagcgagcttggctacgatgttctgggccccttggaacttctgaccttcgaaggtcaacatggaggcgtcctggtatagggtacccagattggcacggctggtatcgaaggtggagtagtagtgctccacgaatgcctttgaaactgcgtctggatccatttccgactccgatcaaggcctacccaccgccaaaagcgtttcgtttttcgcttaagtttcacgctaaatgcaaatctaaataagagaatgaatgagatgaaagactgcgagggaagtgaagtgatgacaatcctatttttattattatttttatgtttaatacattagcttttttaaaaaggacaaaaataaaatgggcctactattagttttatgggctttttgttgatccttt

SEQ ID NO: 197370 - DNA, 681 bp, Cannabis indica
tattcttatatcaccacaaatgttatataaatacaagcctctctattcttgagcagaggttttttattttctgtgttttgtttgcttttcaaactatagtgacggcttcatttttaaacttgacctagcttgcaactttacagtcctaaaacaaggtaaaaaagaagcatagaagacataaagatcactaaatgctatttattttatattttaaatggtccaacaaaatggcatattaatattgctataaatcaatatggagtttcacatgttgcaataacagttacacagtatataactcatacactcataattttctatacctacattatatctatgagtgttaactgagatatatatatcgatcgagtacgtgatttgctgtcatattaaaccattagtataagctacgcccgtctgaggcaaccaattatctgccagtaaaaaactcgacaatgtgaaattctcagcatcggtagcgttaatcacgtgataaccaggccacgtcactctcttcgccgtctccgatcccggccctctattatcatgctcagcataatacaacgtactcaaaccaaaatcaccattccattctcgccaacccgccacatcaaccacattatccatataagactgcatataaaccgttctagaatactccttccatggccgacccagata

SEQ ID NO: 197371 - DNA, 1644 bp, Cannabis indica
ttagtagaacaagtttatcttcacccacaccttgagtcttcatttcctgcaagttcaagttcaaaattttaaacctttattctttgtgatcaatgatcatgctccttttgagactactaagattattatttctttattccttacctgtggcatatccactgagtaaataacatcgtcaaaagaaatggaatgtggctcaaatggcagaatcattcccttctttgcaatttgattttcaccaatgttcggactattatttgatagttgctgcatttcagtggccctgttatcatcttggatatcgttttcaggatcttcagatttgacagattgtgctttctcaaaagctgcatgataaatatatggaattagttcaattcttattgagaattccattagtgtatcctaaatgattactcacggttaaggtaagtgagagccactgtgtataaaatgtttagtataataatgaatcctgtcattgctcccaaaccaagccagtaccaatatcctctagtaaagaaccctcttgattccaagacttgaattccaagaggttttgttgagtttggtccggtctattaagaataaacaaatcaaatgactgattaacaaggaacaaatccaaaactttcaaaccaataagttgcaagaaacttacatgtctccagttttctccaagaaactcgttaacaagaacagcagtttgaccatacattagaggtgacgtccagtaaccccaaatccaccagccctttatgtcatctgtttgcataataagaagatttaaacatatatgtaattaagaaaagaaatggttgaattttaaaatttgagtctgacatacctttagagagaacgaaaccacccaaagttataagcataacaagcacaaatgtaccaaatgtgttggctacgatcatgttcctaccagtagctgcagtagctcggaataatgctgaggacatctgattagcaaatatcagagccacatattgccgaaacaatctgaagtcatgcacaaaaaaaaaaaaacaactgttgagaaaaacatttaagcataaaacctattaattcaaaagtgtagtctcagtgttttcttatctaccttccaacatttggatctagtcccattgaatagtatgtaatggccacccatactgctacttctaccaaagttattgggatcttgagaatccaagatggaagagcatatgcccaagctggatagaactgcaggtccctttgcttgtaaaacactggaagcttagcaatggtcattggaatctctgacattccattgaacataatcattattacagtgaagaacaaagcaccaaggtaaattccaccatcatctacagtattacgtttcatctcagttctcaagaaaagtgttgtagcaatcagcgccatgaacacaagctagaagtagggaaataataagtatgagtattcatggccaaaggaaatatatatttaatagtaataagaaaaacattgatgaaaaatctcacttgtacaatcttgaagatgtagacaaatgagtttctcttcatgagcaaatattctcttgagaaacaagctttcaggaactctttcttctttacaccatagtttttggttgtcaaagcagcaggatga

SEQ ID NO: 197372 - DNA, 875 bp, Cannabis indica
tgaaatggatacaaataaaatatttacttctagttacaatagataaacatctttgatgaaactgaacataatttgaatataatctgtcaaaaaaaaaaatagactttacaaaatgtaataacaacaattaaaaaaataataatcaactttacaaaatataataataatgataaaaaaataataataatcaactgaccatcgaatacgtcgccatacatggatcattttacattgtactttttcaattttctttcccaattaatggatatatgtatatatttgtatataaaacaaaaatgttgaccaatatcttgaacatataaccagtttcgtttgtctcattccaaaactttgccaacataaatcagtcgaaacaatattaatttgctacttgcgatgaaggtataaatctccagtccatcatcacttatcctgctttttttaaaatgattgcatcgatgttttttttttttcattaatttataatgtaaatatttaatatgaataattggttaacgaaatgctcgaattataattaagatgcagtacttcaaaactaatattttctgcaagtttacctttatgaaatattttgtatatatgcccgcgaatattattattattgaattaattaatataacttcagagggagagagagaatatcagagaaagaagatcaaattaataatggcaatgctctttatttttcatgtgttgttgttggatatagggcgtcgtacgtacgtggctgcttcttgcactgcatgcattggccacgtaaagtagagaatgagtagctagctagctagctgctgtctgtccaaatataaataattttcttcttcaaacataatatttcttttcatgattaatta

SEQ ID NO: 197373 - DNA, 1308 bp, Cannabis indica
aatcaactttacaaaatataataataatgataaaaaaaataataatgatcaactgaccatcgaatacgtcgccatacatggatcattttacattgtactttttcaattttctttcctaattaatggatatatgtatatatttgtatataaaacaaaaatgttgaccaatatcttgaacatataaccagtttcgtttgtctcattccaaaactttgccaacataaatcagtcgaaacaatattaatttgctacttgcgatgaaggtataaatctccagtccatcatcacttatcctgcttttttttacaatgattgcatcgatgtttttttttttcattaatttataatataaatatttaatatgaataattggttaacgaaatgctcgaattataattaattaagatgcagtacttcaaaactaatattttctgcaagttcacctttatgaaatattttgtatatatgcccgcgaatattattattattgaattaattaatataacttcagagggagagagagaatatcagagaaagaagatcaaattaataatggcaatgctctttatttttcatgtgttgttgttggatatatgagggcgtcgtacgtacgtggctgcttcttgcactgcatgcattggccacgtaaagtagagattgagtagctagctagctagctagctgtctgtccaaatataaataattttctttcttcaaacataatatttcttttcatgattaattatttctacaagagttggtaagggaagaggagagaaagaaaaaatacgaatcttaactaaaagaaaaaacaataaatgaaattcttcacaagatacttatcaaaaaaaagaaaagttcttcacaagatataaaataaataaaagtattacatgcgccccattattcaaattattctatgtatatggttctgctatatggagagaaaaacacctcattcgatttgcttcaaatgctgacccttttttattttctatgttcatatacattacctcaccgtagtgacgatgggtaccgctgacattttgttatattaatttcgctttcagtgataactaaaatacatatttttttaatgcaagaatatcattaaatttattccaaaaaataatttgtacaacctaatgacattctataatttgaagaggattcaaaaaatatttataaaatctttacaatgtttttacaatctttacaaaaaatatcattaatctttttcacgactagttatatatttaggccaaatataaaaaaaatttacttctgattacatctttaattttgtgc

SEQ ID NO: 197374 - DNA, 1182 bp, Cannabis indica
aaagacaaatatgcaaaaggtacacaatgattgtcttctcaatttttctttgatacatcttttgaattccttttatttgggttgttcatggaggagcatgtgacaaatgattttgcaatactatttaggttcaaaattgttctacatgattgtcttaacaaatttatattagatttatatttcacgtttgccatctgcatctgatttttagtttcataaaaagcaatttaattgtacatttctttgtttgtattgcacttgttaatgagtaattgttaaaagtagtatttttaagtatcatatggttgcttgcatgccaaccacttcactctcgagttcaaaaccatcttgacaaggaaaaaacatagaacatgcaaactcttgcttgccatgatggttaactgcatgaacaatctcttcctatgagctatgacatctttgaacaaattgcttccattaacttttggatttgaattaacttgtcaatttttaacctgccaatcagattacgggtaatgatatcaagaacatttgtgaggaagatttacattcttcatcagaccggccatatctttgcactggttatgacatctatttagtgtgggagccatgtgctatgtaagtagatctacttcatcatgtcatttttgattggttgtttcaaactgattttgattttatgaaattgagaaatcgaatcttattgttaacatcaggtgtgcaatggccctggttcaccagagaattaggcgtatattctatgcttttccgaacccgaatgctggagcactaggtagtgtccataggctacaaggggaaagaagcctgaatcatcattatgctgtattcagggtgatggttccagaacaggttctttgatggaacccaccagacttgacttttatttatacaacttcaaactcttagtttaaacatgacagaaaatcattcttcttgttggatgattttcttatatgtttgattttggaattttggaacactatgttaacaggtgcactgaattttaaaaccctatcaacggtgacaaaaacgaaatgtattaggaaaagatttcatacatgcaattgacgacaaaaacctgatattgcttaatccagactataaaatttggaagcttgttttagttacatctctccccggtacttgggatattgctaaatt

SEQ ID NO: 197375 - DNA, 1331 bp, Cannabis indica
aaaattaaatattctattatatgcccaactaatttttcatatacacgcatagtaataattgtttgaactttatttttaacattataaattatttaaaattttctataaatttaacattataagaaataatttgatgccaaaacaaataaagaatttaagagaatacctcggagagtgtagaagataaatttggtattagatattagattgtagttagaataaataaagtatccaaattggaatattctagtcatatttgttgtgcttaggaataagagagaatatgccatagtttgaatgacttatcccattcgtatattcgcatattatattaacttcctctgcccaatactactcacttttggactctactactcccacattattcattcaaattcataaataataaattttaataaataatccaaaccaattttaatatccaaactatatatatatatgatcattaaacacactaatactaattttattatattttttatctataaaattaaaagataagtactaattgctagtataaatctcttaattaatttttatgcgtaaaattacatatcggtttttttttttataatggtattcgttatagttacaatatcatcttataaatttttaaaaattctaaatagtttcttgtaccgaaaactaaattataacgaatactgctacgaaaaaaatatattctaatatatattttcaggaacaaagatggattaaaaaattgtgatagaagattaagagtaacacttctaatataaaaaattactcctactatgagaaataaaaaaaaataaaaaagataacttttcaaatataaataatcatgtcatcattgaaatttcaaactaataacaacaagtataaatatcttttggtacaaagtagactcaactcaaccaactagccaatacaacaataccatgttcaaaattgacatgggttacctatttttcttttgtatttctatcaaacacaattttttttaatttttttaattttgaccctttttggttttctatataaacaacccaatcatttgcccttttaaaaatcacaagtccttatatacaataaaaaaatatatacatataaatctattcattattatggcaaaaatatatgtatctatattctatattttgagtattattaatttgatgattttgttagtatcatcagagcttgaacagttcaatcactcacccaaagaagatggctcactgagttttctggtgattggagattggggaagaagaggagattttaaccaatcccaagtctcatttcaggtttgtttttttttttaattt

SEQ ID NO: 197376 - DNA, 909 bp, Cannabis indica
gagctcctcactcattctgaaacattcagcaaattccatctaaagagagttgagagagcgaggaagcccgaactccaaaactgaagctatcgcagggattgaagctcaaagatcaatggctggaggtacatcgatcctttcattgcatatattattgatatgatttcattatattttccgcattttcatatcattgtatatgctatattatatacactatatatatatatagtctaacatctttttgatgtgatgtaatactatttaattatatttttacctaattaagtaaactaaaataaaaataaaccttatgaaatttattttaatttaatttttaatatattttatgttttaactttcttcttttggtaatgaaattagtttcaagtttaattttgttttcttctttttaaaaagttcagtttacatatatattttttatattaaaataaaaaatttcattagaaattagtttagaattagattcattatattttaagtctccttttaaaatttaattactttttcttttaattttttaatcacatacgcaattatatggatgacccgtcaatgtattatctaccatgtcatacattttcagctcaatttataaaaagtatagcaaaagtctaaatttatactaattgataaagttaagaggatatttttaacaacgcttatattataagggtacaatcgtataaaaaataaagtttagggagaaaatagttttattctttaacaaaaatcataatttttactagctaatgaagttaagaaggtatttttgacaacgttaatattacaaagagtacaattatataagtgacaaagtttagggggcaaaaataaatttttattctataaattataatatttatttacaaccaaaaaaaaaaaaaa

SEQ ID NO: 197377 - DNA, 635 bp, Cannabis indica
tttcataactaaaccctaattatatggtattttctaaatttaaactatgcggtctttacaatatgtcactaaaaaaccaaagcaaaaaggcttttatagcatgttgttgctacttttatagtctgacagtgcatgactctaaaagcttacagtgacgtgcattgagagattctaaaagggtttagtgatccacactgaagagtcactaaatactgtctttccagtcagccacaatagtgacgcgcagtgaaaggtcactgaataggtttagagtctctcaatggaagtcactgaaagccatttttcaagtagtgtatgttattattttttctaattcacaaaatacaatgaatttaatttcaataaaagaggaatataattaaataataaatgtactttaaaaaaataatgattaattagtatttttttttcaatgaatgattaattagcattgataattaaagaatataataagtaatagaatattgccatagtagttaattaaattgaaggaaattttgcactttacacttttttttatctaattataaaaaataatttggtcaagcatcaataatgttttttttgtttgagtttgtttcaatacctcatttataccctttctctctctctct

SEQ ID NO: 197378 - DNA, 849 bp, Cannabis indica
agaaataatatccaaaagatgataaaattttcattctaaaaattaacaaaactagaaaagttagtcattatagtaattccaattttataaaaatgatcacatttacctaaaaaataatgtcataacttgactatatgttctccgtggaagtggctttataatctctgataaaatagttcaatcactgtacacaatagatcaaaaatgtatcttttaacaattagtgttaacttaaaggaaccaaatcattctgataaatcaaaaggtaaagaagattcgaacagacacacacacaatatgaaaaaatcctaagtaattttgttaatgaaataaaaacaaaagagccccatttaccagctagcaaaaagtacctaacgaagaatagaacaaacccatttttatattcattagtattcaatccctaagtaaatgagagggataaatatgtataaacacaaaaacatcaagaagaagagattaatcagtatataatacaatataataatatgagagacagaaaaacacagacgagagaagagagagaggcattgatcaatttacttactctaaatttaaggagatatccatgcaaatggaaaatcctaaacaaccatggaaggattgtgtatttatttttctctccgttatttggtttaaagagtagtattttttcgataaggagtggtatctttttcccatttttgatgcaagggtttttagagcagtgagtaaaattatttaatgaggaatttaattaaggctaattaggttttataccctgaactttgacatgtaccaaatcatgccccctaaatttttaaggctgttaaaaatgcctcctaactaatg

SEQ ID NO: 197379 - DNA, 676 bp, Cannabis indica
ccaggatttaagagccaaaaatctattcttctccacattacagttagttttgtggtactaaatcaaataaccattgaaagagttttgtattatctaattatccctgtaccattgtggattggacatttagtattcacaaaccgatacattaaaaattgagaaaaagaataattagttttactaaattcgttaccacatacaatacacataaaagattaaaagcataaataaaggaattgagaagagaaggcaaaagtaatgatgcacaaaataaacataaagagattaagtcagaagtcaccgaatttgattgagaaatcaaattaaatcttcttagactcgacgtattgaagcaatattatccaagaaactttgtttcaagtctctgctagggttggctacaatcgcttgtagcttaacactcatggaataagttatcactgttgattatggttacaagtttcattttctggaaagctaattgttactccgaaaaaagttacagaaagcttagtgtttatctggaaagctttgttcgtaaagttgtcgatggttcttctagtagcttgtcatacatccaaagacgtacttccagatagcttgttgtcactcttgaatgcccatttgaaatatgtgtattgtccatgcagaaagtgcatttctaaagctgatgtgg

SEQ ID NO: 197380 - DNA, 1254 bp, Cannabis indica
ttctggtagatagacatttaacaaatatctttgttagtacccttattttgctcttgtttatcattttttttttttttgatgaaattgtttatcagtttagaatggattatatatatatatataaatatttataaattaactcaacttcttttttttgtttcttgggtttctttcacagctagctattatcataaaccaagggtcatggttggatttaagaatcggtacatggtggtggaggtgaacttgaatcccaatagagatttagggacagatgatcccataataataaccgcatataatgtgactaaagcaattaaagacaacattctcatcaactttggtgagtgtggtcttgcttcttctttaggatctctccaaggtaatccattaattcccaccaaattaactcatcataatcaaggccgaaattttgcccttatcctaccaaattctttcaatgttttgcattagttttacccctgcaattcgttttgcttatctgcattttgcgtttttcagttaagtatgtgaatcatatcacaaagatatgtatcattcgagcttcaagagaggaataccaaaaagtttggtccgcaatcaccatggtgaggagtattggaaatgtgccagttgtaattaacttattggacctgactggtaagtgaaatatcatttggtaacatactcaagatttgcatcttgttggtgttaattgaattgctatataaataaatacttgatttcacttttatactttcttatcatttgttatggtttatgtggtgtaggaagcattaaggcatgtaaaaatgctgcacttaagtgtgaagaatcaaaatttgagcagtacaaacttgtggctggtgcttctctatcagctgttgttagcaagcagatgcaagactttattgagaaaataaaaatgttggagcattagaagttgttcatcttagcttggcaaaatgcttggtgtggcttgtatacatttactatgattacaaacatgtctcttttaggttgtgcctcaaaattcaaggacttattggcaacacttcatgtcaatgttgtctaaggcttgtaacttaaaggttctaacatctagttgatataggtaaaatggcagctttgcaaagaattgagtctccatatccttgttttctaaagtaaccggggatgggtaagtcgagtatagtcatcaatcctcaccgttatgctttcgtcagtgaggaatatacctctattggggactta

SEQ ID NO: 197381 - DNA, 936 bp, Cannabis indica
atttattttaaatatatttttagatataataaataataatatatttttattaaaaataaatttattatagaatattttaatcaaaacagttttctaaaagttgggttgtaccagctttagcttttaactgtagctttcctataaattctttaataagctgtttttaaactatttaccaaacacctttttatcacaggtttttcaaaaaacagcttttaacttttctaaaaactgtgccaaacgttccaaaagatattcagaaagaaaaaagattaggcatacttactttcaaaaatattatgaaggtaaccctgtaaatatggaggtggcttgagtatttaacaaaagattattgatatgtttttgaccctaaaatttatagtgttccaatcaaaacaacaaaaacagaaaacaaatgaagcacccatcaactcaaggtacaaaattaatggcaactcaacgtcacaaatttatcaatgaattatggattcatttaataaaattatatttttaaacacactaatactgatatgaatacaaaaggagccagatcaatatgtcctccatgcttggaaagatattcatactagaaaaaaagacaaagtttgggtcaatgatgtgagttacaataatattttattcattttttttcttaaaattatgaaactattgtattttaaacaatttttatctatggttagaacgaattgacccatgagatggccagaagcagacttgaaagcaaatttcgacaatgattctagattctcaaaatttacactgacatgaagagcctatatatagacagaagtaagtatgaaccaagactttaattaaacaaaactaacataactaattctaacaactttagactacgtgaaaacaaatttgattatgttctttcatttgccaaaacagatagaaaatctatcaaaa

SEQ ID NO: 197382 - DNA, 1818 bp, Cannabis indica
gggtgatgttaactttattttgaggggctctgagcgggtgggatctaaaggaaaggatcagttcctcccctttatttctgacctgattaattgccatgctctgtttgatttgcctatgaaaggggataacctgacttgggataaccatagcggggagtaccacatcaaatcggccctggatagggctctggtcaatgaagggtggttaagcttattccctaaggctgtggttcagtcgcttcactcttgtaactctgatcaccgacctatttgtgtgagtacggcaaatcttgatcctagatccaagaggcagtttcgctttgaggcttggtggaccagggatcctcgtagctctttaatagtggactcggcttgggcgtctttatcccattcctgggcaccggctagagtgttcaagaaattgggagctacccgtcttgccttgagtaaatggaacagggagcaatttggcaagcttgatacctttatctccaatttggaacaccaactccgtgagatccaagggcggccggttgggtcgagaatctgggctgaggaagtcgaattgagaaagtctcttaatgaggctttaaggcggaaagctttatattggcagcaacggtcccgtgtttcttggatcaaggagggggacaagtgctccaaattctttttcctgtctgccactatccgtaacaggcgcaactctgtggagagaatcttaaacaagaatgggatgtggattacgaataaagcagagattggtagagagttcacggggtttttaaaggacattttcactaatccgacactagggccgttggaaaacgtagaccatctcatcaatgatcatttaacctctattgagcagactgaaatggaatacatccctagccctgaggaaatcagaagaactcttttctcgatgggtagtatgaaagcccctgggccggatggtatgtcagtacttttctttaagcattactggaactcggtggaaaaggacttctgtgaggctgtagttgatttttttcaaactggggttatgcatagaggtttcaatgctacaaatgtgacccttattccgaaggttccctgcccgaaaagagtctcccagtttagacctatctctctatgcaatgtggtctacaaggttatctcgaagataattgctaacagaataaggcctatccttccgcgtttgatctgtcctactcaggcggcctttgtcccgggtaggagcatccaagataacaatgttttaatccaagaaatagtccactcgtttaaacgcaagaaagggaaggaaggcttttttgctatcaaaattgatctggtcaaagcttatgataaactaagctggcaatttattgaccatgtcctctgcagctttaaggcccctcccaggttctgtaactgggttcggcagtgcatctctactacctctctcaaccttttccttaacggtagcaagatgagcaactttactcccgagtgtggactccgccagggggaccctctctccccttacctatttatctgggcggctgatatactgtcccgtattcttgagaaggctcttcagtgcgggaccattcgtggcattcagttgagtagaggtggccctagactctcacacctgttctttgcggatgacctaattttagtggggagagctaatattgaggaagcccggggtttttgggactgtctggagaaattttgtacctggtcgggacagagggtaaacaagctaaaaacttcgatcttttttagtaataacacgactgagagtatgaggagaggcatcatgagggatat

SEQ ID NO: 197383 - DNA, 532 bp, Cannabis indica
aactttttaaaaaataataagaaaatttaacaatattatgagttaccctatcaatagaacaataaacaaaaaccaactagtttttttatagtcgtaaataataatattaaaaggagaaagcatagaaaaattgttgtaaattgcctgtacagtaagtaggcaaattgattcactaccactggagatcattagtcgtgttttaattcaagctattttaatttattgatgtaattagatatgtatattttaatttaataattcataaaatattattttgtagtaatttaatactactaatatctagcaaacattcttattttcttaagaataacacacattcaaattacacatatttatcacatacttatatattaaataaaaattctatacactgttgatatctaagagaattttattgttaaatttttttttcataattatatatgttatgatgtaaaattgtaaaaaaaatcaaaaaaaaaattaacatacctaaatcttaaatcctatatcttggtaaggtgcatatata

SEQ ID NO: 197384 - DNA, 1277 bp, Cannabis indica
agtaaggtacatgatttagtacatgtcaaagttcaggggacaaaaatcctaattagcctttatcaagcaatccaaaataaaacttgtcaatttatttaattttaagaaaaaacaacaaaaaaaaaaaaaagaaaatgtagtggtaccctttaactccacgcaacctaacgtctacgtcattctttttctttcacactcattttgctttcatctcaaccattttcatcttaattgtatgaaagtactatttgtgtgtctcttctctttttttaactgatatctccttctccactcatttttcttttcttttcttttattttctcttggttcattttttttttcccttttcattactgaacaaaagctcatttatttttctttaaagggattgatgacagcagttgaggtcttaaataaacaaattgttgaggagataggacttgaatggctaataattacgttgtacaaatgaggatacatgtttcgctctcattttactatgacaaaaacaaatcatatggtttctattatttttcttaatattcctggttcataaagaattgggttccacacatgttggatttttcttttcctagtacaacaaataatataagtagggttgttggtccctagtgtcagtcatgagactgtatttcagactaataatttgtgccaaagtcattgtgtaaggttttcgccatggacggaaactctgttgagaagcctcttctgttgcctccgactgtggagcctagttatgtcaagaggaaaacatctctttttacctctttggccaaattcatactcaaagttctaatgtgggtcgtttttattttatgggttggtattgcatttttgttgccaggaaagttttcaactcacactatcactgtattgttcaatgcaactggtggaactgtttttgggtttacaggtttgatttccaaattttctgtcccttttcacactatttttttatttgatggaacttttgggttctttatacttggtgctataatttgcaggaagcttcttcttgttgttcactggtcctgttctgctcatttcaatccttgcctttgcttacattatcatttctggtgaagaggatttttcaaagtatgtcatgatgtggtttgtttcaaggcagtctttagtttttattattattatttaatctcactaattatgtagaagttcactcttcattcccaatagtaataatttaatgtgagttgtcatggcaagtttgtatgcttacaattacagtgattaaa

SEQ ID NO: 197385 - DNA, 874 bp, Cannabis indica
atttttttcatatttatgaaattacttcttaatcatggtatcaacaataataggagataaaataggacccatttttgtatagaaaaaaaatagtattcaaatatgctttaaatattttatttttttcctcataaaactaatttttttaatttatattattatatgtttttatttttatttctacgtgtattttttttattattatccaacataatttaatttttatcctaaataattttattttatctgtatttttttctgaaacataatgcactaataaacatcaaacaatacaaggatttgacctaatttctagtattccacagagagaaacacagataggcagcaaatttctagtattcacaatctccgaagtactgcagaaggccatccactcactgcgaattccatagcaactgctaaaccagcaggctttagcaaaaggacaatgaaaaaagaggtgaaggagggagtcctctccatcattgcacaaaacacagtgagactcattgccaaacacagttcgaagacgggagccgcaagggaggatatccttacaaaccttccaaagaaacaacttaactcgttcatgaagaggagctttccaaatttctttctaaatattagagcccaccccaaggcaaggcttaatgagagataggtaggcctggctaacagagaaggacccatcaataaactcctgccagattaatcgatccttgtccccattagacagcaaatccacacgcccaagctgtcgccccacatggggagaaaaccagtcagccagaacattggccataagttcccccttctcattcaagaaattgcttaacagagtaactcttggccgttgaattcttggattgaaggc

SEQ ID NO: 197386 - DNA, 1240 bp, Cannabis indica
gtttactttaccttcttttatctcattttccaaaatgtttcttttattttatttttaagaaagacttgggaattttattcacaaggaaagaagggccaaatctaatacaaactttgatagaataagacaaacatttgccaaaaaaatgaagtcaactaataataccagatctaaaatcaacttccccaaagaagccaagcctataagctcttgtgtattctgtgttatgttatgggtgaataccattttgacatgatacgagtatggttaatatatatggagtacatgcctacaagttaggctaagaatcacgaattttgattttccaacagaataaaatcctaaactaaatataaaatattaaaaataatataataataagaataattacatatatattctatcaaactagtccttcctgagttgtttgctttgaagatgttttcattgaaatgaattatttatataaatgggaagattgagaagaagtgatcccaataatacacacaaactaataaaaatgcatataaataattatggttctttttcttcatcggattatgatctctctcacaataaggtttgtccatgtcatgcctacaagtattttctaataataggaagaagtctacaaatgatttatttgttgtctcaacttctttgttcttgacatcttaccttataatagtgataatgcttatttttttaatgataatgtttcaagacattgactttatcataatttattctcttaatttaacgataccttatttttatttatttattaaattgcttttataatgtttgtgttgtacaagtacaaatttcccttttaattaatcactcaccaaatttatttgtgatgaaaaaaaaaataacaaatagagaattcgtgttgttgtgaagattagtatctaaataagagtattgctattaggtatggtgctagctaatgtttttatgaaataaaatcttataattagctaatgcttttatcaattaattgataaaaataatagtctttaacagatatgaatttattttttattattcttttcctaatcaatgatcattaagaatcttcaacttttataaaatattaattaaaaaataaatccttaacgacgttagtggcaaacacaaatcactgaaatagaatcccataaattcagaattccatgtctttcacccttattaccaatttacataaatcaaactattaagggtatgttctgaaaaa

SEQ ID NO: 197387 - DNA, 560 bp, Cannabis indica
ttttttatataaaatattcatttatttagttgtatgtgaaactatgttttcttatacaaatgtattaaaacatggaatattaagttttaataaaaaaatcattaatatttaaattaatatctaaaaatacttaaataactttaatgatgtgtagctcactaaaatgagcagctccttcttttagtattttaattgttattaatagttaataaaaaattaacaaaataaatataacccatgtttatactaaaggactcaacactataagatttcaaaaagtacttcgagaagagctagtaatggactaaataaagagcgaaaccaagtagcagacatattcactaaaggattcaacactacaagatttcgaaaactctaaaaaacaaactcagtatgatgagtcggtatcgagagggagtgttaaaaagatcaaacacctcctctacaagtatctagaattttttatcatttgagtaatattataaaattatctagaatcatagagggttaatagtcattaagaatttttgagaaatttttaagctataataaaaatgaca

SEQ ID NO: 197388 - DNA, 1054 bp, Cannabis indica
cgatatagttttttttttttttgttattattattatggttattggtggaatatacctgctatatatttagtgctgttctttgttgataatgcaccgagtaaaaaaagaataaaacttgtttaagcaggtatcgaatataatttcaaatagcgtaatacaaaagatggtaattgtaatatttattaaacatcaagttacaagtatattttgttccaaatcggatcacgactaatcgagcatataaagatataaataatacataataaaacaatgactaaacatttaaagtaaaagtaaataataataatattaatataataattaatggaagaaaaagatgggcattggtctctctcattttttttgataacacaagaataaaaatcaaataatcaaataatgatatcattaggtgcttcagttaaacgttaatatatattctttccgtacacacgtgccatatatgccttgccttgactggaaccaacgaagtgccaaacagaagagaagagggtgggagagaatcactatgtatattaacttatatatatattaaatttcaaagtttaattaattattctttattttaattaatgaagtgtaaatttgaagtctaatgtggaccttttctttcgaagcaaaccattgatatttacataaaaaaatagataaataactactactacaactacaaataataatacaaaaaataaaaaatgcacggatgagaatgtaagttttttctaatacttaatttttatttttcaatggtttctacaatttaattattattattttgcactaattaataaaaagagctaaagtggtgaagtgggatccaaatgaaatgaacatatgttcttatgattagttataatatcaaatataggaataataacaattttactcgaaaaattgtttacgggtaccagtagggtattacctatttattattagggtttagagttggaggagagtacaaaaatatatcaaattggctctattatcctactcagacaataaatatatatatagagtaaatatatatatatat

SEQ ID NO: 197389 - DNA, 502 bp, Cannabis indica
attaattaaaagagaaaagaattctaatagacacatcatatcatataaaataaaagttaattattatgtgtgtattattatgatgattcgaataggtaaaaaagtcttgtattaatttcatgtaatttcttagcaattattttcttcgttaaattataacttctccatcattcaaaactccatttatgaattggacctattatatttattgttttctccatatatttttattgtcatttaaattgttttttttttatattattgtctttaaaatagtgtgtgtattgtgaacattgagaagaaatgaaaagtttatatcatataattaaatatattaaattacatgttctatattttcttttcttttcttttttgatgccttttaaatattttttttattctacatatattaaaagagctaataattattactattcataaaatggtcaaccaaaaccattggtttctttcatgcacacatatatatcaataaaatattaat

SEQ ID NO: 197390 - DNA, 775 bp, Cannabis indica
ccgaagatgggctgacagtcgtaagaagaagaagatggtttagcatttttaggttaggtagatactgtagatagagaaaagaaacgaatgaaactatagatagtttgatagagttttcctctttttttttttcaactagatattttataatttatattattatgtgagttgaacctattttctttttttttcttttaaaatagttgtttatgaaaatttccgcacaagcctatagtttagagaagcagtaacataaatacttggtgtcgaacgttggtgccaccgacttggatggaagtactaacattgtgttgctacgcatgggccgaagttgatggaattaagtgatgggcttgtagaaaagaagcccaacttgattggaaataatgatgtttgggcttacttccactactttgaacgtgatacccatgaaaatgttaccatcttaatatattgaagtttttacaaaaatattagagtttgagcaaaagtttacaattttactactatacggaagtttttataaaagtactattcttataaattaacagtaaagcaataaaacagataattaaaaacaacagtgaaacaattaaaaacaattgtaaaataacagtaaaaacttaacacagtacacagtataaaaatcacatagtatttttgaaaaaaaatacaatattttttaaaaaaaatccgtcccacggtagaaaaaagaagaaaaaaaataaaaaatttgagtatgtgatcaccccttattatataggggaaattatat

SEQ ID NO: 197391 - DNA, 2951 bp, Cannabis indica
ggaagagaagagtcggggctgtaggttttggcaagagtcgccaagaggtcttccattggcctagatgcttcaaaaagaaataaacaaagtgtcaaaatggccataagaaagtatgcacatgaaaacagaacggtaaagctagttctaccctgattatctaactctgccctagcaaagtcttgcactacaatactggcttcgtcatcccctagaaagctgtccgaggggagaaattagctggaagacaaataagctgagtgatccagacggatgggtgcaggaggtctgaaacccatccgggaccggcctaagaaattacctaagttggaaaaataaaaggccttggcatgatcagcccaccgagtgggggacatcctaaatctaagaagatgctcgtcaaatcctataggcctacaccaggaatattcttggacagaaggaacatgatgcaccgttaagggagacttaccggatccggatgtactggcgtcgggagccccagtattaagaatcgggaccggcgacttaggcctagaaggcgtccgatctttgcccatctccagtcgaagggtcctcccggcggttgcctgagccttgatataggccaactcctgttccctcttaaagaggtacttttagtaccggtcctctgctgaggctatgatgtctacccggagcgccttctcagcggctggggtacgaatgtttgggcagcgaacctttgagaggtggaagtcatccactgactgactcctggagatgagcttggccttccggcagttttccattgtgaccaagtctcccacattaagaactttcttgtcataagtggagaaagtcttggcatgctggaggaacagttgggtaggagcagtacggagaagaggaggaatcctaacccactccgtgagaagctccgggcggtccacggcttggaggccgaaagagaagaagaagcgatggcagtattcctttaccttcttttgaaaattaaaagggaccaggctctcattagaaggatgggcccggagagtgaaaaaatcgtctctaaacttgtcccctttttggggacagatacaagttcataaaaatgtaaaattcggccgagctaggtgaagcccaacctcttgctacataaaaaataaataagctggatagctggcgataagcttgtggaattagtttgtaaggcgcaaggcctacaaaagtaagaaagttaatgaagtaatcttgaaggggaagcatggccctggacatgagatgggtctggctccaagctccaaacccccggtagttgttaattggcgtctcttgatcccgaggcaggcgatggaaaaccctagacgcggacggtttaatcccagcaaccgtcacaatcttctctagttggtgagcacaaatcattgtggagtgtagttctcttgggcctctgggcccttcatgacctcctccagggtggctagagcgactgcccccttcttagaagattttgttcctgacgtaggggtagacatgtttgtttcagaaaaaagaaagagtccagcagttaggccccaaaaaaaaccctaatgtcaaaaaaaggaatgggggtcccctaacagctggaaagaggcctcttccgaatgtttgccaaaattggaaacccaaagtacttttcttagcaaacatcaggtgcaaaaatcccaaaggaaacaaaagtagagagagatagtaaaagaaaaaaaaacgcagaaggtggggacaacaatcgccccatgccctaaacagtctttcgacaaagggggacgattctaaagagaaatggaggaaaatagcaaagacacgaataaagaagattatacggattacgcaacagattaagtctgagtcatttcccaaaaatccaacactaaaccgagaagttatatcctaacatgcaaacaaacgttagaaagcacaaagtgtccagagaacttacatgaaagttgagaactaggggtcggcgttgatcgacggtataaagtggactcgaaacggcgaaggaagagcagcaagaaatctatggtgtctgaaattttttctctccaaagtgttcttgagaaaatatggcgaaatggagaaagtaaccaaatgaaaggtaaaggctggcttttataggccaagaacaggtgcgaagcagctgtgatcaggcgtcatcgtgcggtgagaatcgcaatcgattcgtattctgcagatctaacggttgggataagtgctcaccaggacggctggaaacgcttgagtatttgtttgacacccattaaatgcgtcggataattaatggacgggaaacgaatcgttgcctgccaaaagtaataaattttaaggatgacagtcataacttcagcccacgcgcccgaagtacgtgccaggaaatcaatgagatagctggaggcacctaagcaagcctcgtttacgtcacaccaaacaaggcttgggggtaaatgttgcccctaatttcgcccaaaatacgtggaccaatgtggctacgacatgtggatctaagaaatatgtctcttacataaatcaactaagtccttttagatcaggagtatcaacaagaaaatacctcccggaggagatatggaagctccacgtactcctagagaccaggggaacgccaagggacctccgggaggaacaggacataatttgatcagtcacctcgcatttaatgccgcatgggagaaaacgtattagaactaccataagcaataagtctgacggcataacccctctgatgcagctaatacgctatgattaataaggctagtgacgactactttatgagggatcacatcaatcaagaagggataaaagactttatccacctaacccctaagatacataaggtataggtcatgtatttcctattgtgtatctgttgggaatatgtgcacctactgaaagtacacagaaagacaagtgcttca

SEQ ID NO: 197392 - DNA, 2303 bp, Cannabis indica
aaaataaatttttttataataaatcagatatagtttataagacaggatcccgaatataaaacacatttacaaaatacatttaaatatataaagttacgcaatattttttttattacaaaatacagggcggttcaaaattctataagaccgaaaccctccaggttgcactgccgcgatatgtacaatccttacaaagctgtaactcactgctcctccagcttagctttttccttacctacacagggtaacaaactgatgagtcaatagacacagtaaaatatgcataacgtgtaaataagcagtgttataccgacttaatgtttaagtcgtcctcagcccaacaactgagcttaccaaatgattaagaacgttctcaacgaaagtacgactactgtaccatatgcactagagttccaactccgtactcgtgttggtagggccattattgtactcttgggagttactaagtattgtaccacatgcacgatgtaccctctggtactcgtgttggtaacacctgccctaaaactctacactgtactaacacccttaaaactacatcttcgttagtgttagtagtgtaaacaattaataacatttatacattcacatatatactttatgctatcttacttcgtttccgtgctcaggtgtgctggtcagcctaagtaaaattgcagctcgacgtttcacaggaccctaaatcacatcatttgtaattttggtgagagacacactaaaatacttttggggactctaaaatcaaactaggaataaccctatcgatgaaagacatgaccataccctaaaaattaataatttcgggaaaactagggttcctggaaaaaccccaactggtaaaccgatttcccaaccggttaaccaattcactgggtttcttgagggacaaaactagtttaccgatttctcaggtcccacaaaaccggttaatcggtttagtgcagggaaacctaaaaattgaccccctaaacacaaataactctaagctttccaataatcttgagaatacatgtatacactataatgaaccaaattcaaataataaaacaccacaaactttccagaaataaaatcaccattggagctcaaagcttgagctccaaaactccaatctcaaccaaacaccataactaacaaccaacctagcttaaaacaacttaaataaacctaacctaactctagaataccaaaacaagctaccttaattcatacaacaacataaaacccaagttcacacattaaacctaacttaggcttaaggaaaatcaaggaaagaaaggctagggagagataccttgaatcacaacacacaaattctaccagaaatccttgagatcactcgaacaattccaaccctagctgttgccttgaagaatcgaaagagagaaagagagttgtgaagagagagaaaaatgctcctttttcaaaattctttccttccaacctaagtaaaatataatttctatttttaattaaattctatcccattattcaggcactaatattcacaagggacaaaaagaagagtttctaacaaagtgactattttgcccttaacaaaaggataaaaactaataacataaaagggtaatttggtcatttaaaaatctcaacacttcccaacattcccaacatctaacaatgatctcccgctattacaaacattctaaaccaaataaaagcatgactctctaatggccccacgtcgctttccacagtaaccgatcacaaccaccaaaaacgagtaattcccatgtatagcataattaatacatgttaaaattaaataattttctacaaacatgcaaatcataaataataattaaatctcataaattaaccctaattatttaataatctgacatataaaacttaagcggtatttacaattacagataatactcattaagtataattaataaaaataaacaatccaagacgtttgtaataaagatgaaaatcttatcatcttcaactaaatgactcataagtgtgagctgtagaacatcaaaactgtaacgccctaatgctaaggcacgtgtaacaccctaaataattagacacgctacccaagatacattaaaaatcctaatcccctaaacaggattactaatgtaaatagcgcggaatttaaactttaataacaattggaattaaaataaacttgtaatactttttttttctgcacaaaataatagatacatgtattgggatcccggaagtattttaaaaaatgttattataagtttgctttctctatccgacctaagcggcaaaacaga

SEQ ID NO: 197393 - DNA, 2534 bp, Cannabis indica
gtgcccctgctgcaacccttggcccccatcagcatccgcctagacagagacaactatccatactggagatcacaagttgttccagccatccgcgctcacgatctcgacggatttctctttggcacaagaccagttccacctcagcacatcgaagtcccagacgaggtaaaccccgatttgcagcaacagcaggtaaacccccaatttactctttgggttcgcactgaccaagccattttgagctggcttttaaactctatttctgaggctatgcttggccatgttttacgttgtcgtgtttcctatgagctctggtctttgctagaaaatctcttcacaactcaatcccgagctcgcatacttcaactccgatttcagttgcagtcactcaaaaagggatccatgaccattcatgactacattctcaaaatgaagtctattgctgatggtttaaactcagctggccaaacgttcagtgatgatgatcttattctatacatcctaggaggtcttggagctgaatacgattctgttgtcatcaatcttacttctcgagcagatcatttaaccctctctgaagtacagtttcttctacaaagccaggagatgcgaatcgaccaattgaacactgcctctacaccagatcttgctgccccatctgctaattttgcgactcgcggaaggagaaattttcccccttccaacgctggcagatctaatggttctcgtggccgtggtcgtggccgtgggcgtggaaaccaggggcgtataatctgccaactgtgcagcaagcctgggcactcagccaacaagtgctactatcgattcgatgttagttttattccacctgccaacaacaacaacaaccaaagtcagaatacttcctttagcagcaacaatactcatcacggatccaaccagcaggcctttgttgctaattccagtcagaatcctagagccgatgacactaactggtatgtggacagcggagctacgaaccatatcacagacaatgccaacaacattcagacttctactgaatacaatggtaagactcgattgacagtaggtaatggccaatctcttgctatttctcacacgggtaactcagtcataaaaaccagcaatcaatccaaatctgtcaaattaaacaatattctttgtgttcctaagattgcaaaaaatttattaagtgtttcacaactcaccagagacaataatgcctatgctaaattctatgctaactcttgtgttttgaaggacatggattcgaggaaggtgcttcttcaagggaaacttagcaatggtctttatcaactcacaacaccaatatcacaacatgcaagtcacagtagcagccatcaacctacacctaagtcacccaaaagcagtcctagtactaagtttaatgagtcttgttttctaatttccgttaatgaatcaagtttgtggcatcataggttaggccatccttcctctaatgtactcaaacatgttttaatcaatgaaaagaagtctttaccttctcacttacaattttgtcaaagctgtcaattaggaaaggctcatcacaaaccatatcctgctgcaattaaagagtccaaacagccccttgaattgatacattccgatatatggggtccttctccaaccatatcaagacatggttatcgctactatattcattttatagatgactatagtcgctacacttggattttcccactcaaaaccaaagatgaagccctacctacatttaaaaactttcaactacaagttgaaaaacaactcaacacctccattaaaaccgttcaaaccgattggggaggtgaataccgtaagtttgaaccatatctccaatccataggtgtcaagtttagacatccatgtcctcatacccatcaacaaaatgggaaagccgaaagaaaacaccgacacatagtcgaaactggtcttactctcttagcacactctagtatgcctcaaagattttggtgggaagccttccaaacagccacatttctcattaatcaccttgccacacctgtactccaatacaaatgtcctattcaaaaactttttggactctctcccaactataaattcttgaaagtttttggttgtgcctgctacccctaccttagaccttacaacaccaataaacttcaatttcggtccgctaagtgtgttttcataggctacagcccgagtcacaaaggctacttgtgtctccacaattcaggtcgtgtctacgttgctagtagtgtgtcctttgatgaaaatgattttccttttgctagtggttttacttatcctagtgcacacaccgatcctccactacaacctagtaactttcctcaatggcttccttacttatctattgtgacttcagattgtgatactggtgcatctgtgagtaatcaagatgttgtctctgctgccccaggagaaaatctttcctcaagtccacttgctaattcatcacatcagaacctctctccacttgagcacacaccaatgtcaaacaaatcatc

SEQ ID NO: 197394 - DNA, 1738 bp, Cannabis indica
ttcggcccaaaatcacgcacatgggattgcaatgctcgtaatgtccagggattcccgattccctggacattccagcttaagattttcattgtgttcggcggccttgattatcaaggctcgccgcttcaatctcagaacaagaggaaagtaaatccatacaaatagaaacacctacctctgaattaatatcatctcctctggcaacattatcaacatcaagcactccacctgcctccattcgaccactgttcttctcaggtaaatcagctcccatattaccatctccacttttagcctttgcccgtgctctgtttttgatggatatacgttttctactttctttccctcccgaactatcccctttgccttccatcgtacaccctggattgtatttccccgaagccaccattgcttccatcgccacctcttcaatcggccaaacaccgctaccacccccattacccagtcgaccacactgacgcttcctccctgccccctcagtttcagtttcaacctccacccgttcctccacctgatcacgcgatcttgcccctttactgttaatctccttcaagttttccaatgttacagtcgaacccttagcagatgtattctttcctctaaaactatttgaatcattgggctctttttggtcgggcccaagtgaacattggccagctactaacttagatgggctgtccacataatccatctgggtaaaattatggcccacttcaaagcccatatgcactttccccttaaatttttgaattaacggatctcctacaactgccttcccactacgcacgccagtacccgcttccttctcaacctgttgcatcgtgggagtcatttctctgtgtaagtcggtggcctcttgccgtcctatctccggccggcaactcccttccaccaccacctcctcagtactttcaacaacccgaccaccaccttgctgagccagaagctggttatgtgcgacaaaacagttcggaacaggatcctcatccttcaaccaaactccatactttgggacttggccgccagaaacactatactccatcaccttctccttaacacaatttgcttgatcatgaccccaaatgccacaattaaaacatagtaaaggtaatcgatcaaacttaaattgaatccaacgtttaccaccatctacagggatatatcttccaacaaacacctcccgttcaatcggaaaatcgatcttaacccgaacatatccattcaaaagtacttgttgtggattattccaaagaatatcccgaacctctcccgccatgtttccaatcctcttaacattattaatggtcaaagttttaagagggaaacctctcatcttcacccaaagggaaactctatctaaccgagcatctctccacactccactttttggccattcatcaaggaccagaaaaccaccattgaatacccatggttgcttctccagaatctttttagcatcagttcgactttgaaaagaaagaccaaaataaacattgtctttatcttcttccataaacttaactttccattcccctaccgatttccacatcctagtgaaaatgcttttgaataaaccaagactgaaactttgtttcgagactattctcccaatcagcgacttctctccaaactcagtagcttgttcttcattcacttcccattcctcctcttgatccattcccaatctatcagttaattgcacaatctcatcaacaga

SEQ ID NO: 197395 - DNA, 616 bp, Cannabis indica
tggttgattacttgattttatcatacgcgttatgttttttaattattcttttgaaattatatggtaagatcgatataggcaatttaatttccatatatacgtctttcttctctgatggacatgatacaatccatcattgttggacttgaaatacttaaaaaaatttaataacactatatatgttggacttgaagaaagagacatggaaaaggttatttgcatattttagtatatgacatattttgtggtgtacgctgcctttaatctatatatatacatataaatacagttatagctaaataaagaaaaagagttgatcttactggtccaagatattttatgcactgaagattaagcacagttcttgggcatttctcaagagtgacttctttcccatctccaacgtccaaccttcattgttgtttgatcaaattattaattagaacaagaagaaatattgttgagagctcttgggtcaagtacttttacataccaatagaagaaaggttgagaactcttgctttcaaaccaagcattataatatatgtgtagattgtgtccataacgatgacgtggatcaatctgtgcacagcaagtatatagttgatataaatat

SEQ ID NO: 197396 - DNA, 1227 bp, Cannabis indica
tccactgaatcctcaatcatggtaggccaaaattaccgttgtttgagtatctttttggaaaatttttgcctttcagtgtgatttccatcgaaaccttcatacactttaattaatagccgttcatgctcttacttggtggcacatagccacgtctgtacataaccccatccaagatgaggtacaagggacctttccttctcatttttcttgcctccttcttgtccactggtaggactcctaattgtaggtatgctgctatggtgtcatccatgtaggactgtcatcaaggatgtctatttcttcagaattagtaatgtttgggtctttcaagaactaaatgggcaccaaattggtcatgcctgtcaaggtgttgttggctagtctggcatgtgcataggatattgtgttatcttctctggggacttgccaaatggtgtaccatttgagttgacataacaagcctttaatctttcttaagtaggccatcattctttctccttgggcagtgtactcaccaaggacatggttgaagaccagttgagagtcactatatatgtacaggtagtatgctcgcaattcatgtgaaagctttagtcaagtagctaagcattattattggaggctttgaaaatgaactttattgccccatgcagttgttgtcccccaagtgtaatgagggtaatgcctgcaccagacaggcagtccgtacagctttcatcaacatgcagcttcaaggttgaattttatttctctcacttcttctcttgctcttgctctttcttttctcctaaatcttgagatatttcaagagatttgcctatacattcagcgacgaagtcagccagagcatggccttctttcaccactcatggttggtaggtgattttatattggctaagctctatttcccattttaataaccatccatatgcttcaggatcctaaagaaactgtcagaagggttggtcagtgtacactcttatttgataagcttggaagtatggtcttagctttctcatagctaggagctagaagtatgttaacttttcaatgagtgggtattgaatttcagcgtcaataagtcttttgttgacataatatactagatccaagatgccattttcttctctgatgagagttgcacttataaaaaactgtgtgacttccagttatatgcccgattcttcattgtctagagcctttaataggataggaggttgagctagt

SEQ ID NO: 197397 - DNA, 985 bp, Cannabis indica
tctcccacatttcctccccgttcttatgatgactgctcgaaacggcgtcgcatttggcaaactcgggaagctgcggcagccaattcggaatatgcggagctcggagtggattcggagacgggtttgatttctctctggcattggtatccaagaatcgccgccgcggaattggctttgcgaacggggtttcaacgttggaatcgacgaagtgtaatagctcggcgagaagggccgaggttagaaggcagtagttggttcggtggagattggaggcgcctgagaagccacggtgggattcgaggtcatggagggcgttggtgatgtcaaaaatgttggattgggagcggtttgaggcagcagcgatggaggcggaggacttggctatagcttcgatgtagtttgtggtgacgagagttagggtatcaatggcggagaggcgagtgtatttgaagcccgctgcgttgcatatctgagctacagcgattttggcgatggcgaatgagaagtcagggggtgttgattctgattcaatctctgctgctggtgtttgagattttttttgaggatttaggttttggttttggtttcatggtggattgggtttgggatgttgagtttgtgttttttcttcttctacttaaaccctaagcatatcaaaacacactctttaacagggtttatgttttgtactttttttttttttgtactttttttaatataattactgtcatttttttagaatgtctaaggacaacactctttagagcattgagtattctattttttcttcaagcttagttgtccctctcagttttaacatttagtaaagtagtaatttgctagcattaatatctaagtttatttcaaagttgcagataaatactcaagtaaaaatttggtggtaaaatatcgttgttggtaatttggtaagttcgtagatacctctcgttgagtgatatgtaagtgttcacatgtcatctcgtca

SEQ ID NO: 197398 - DNA, 766 bp, Cannabis indica
aaaatattaaatgggtccccttggggcggagaatgttatttccgtccctaccccgtttaatattcaaggataaaaaataacttccatactcgccacgttttccatttagacaggaaatcctcgccccattaaaggtgggtatggagctcatccccatgaagaaaatatgcatctctagtcatattgttaactaaataagtattgagtctcacacaatttaatttaataattaattgtaaaatatcactaactatttacaagacgtcactattaacctcctataccatcttctataaaatgtgtgatatctatacaatatctactttactctactctctactccatctgtgtgtggattggaggggtagaggtgacaattcttataatgggtcgtattgaggtttaggtattataagtaaatgtcaaactcatatcctacccatttatcattcatgtcataaactagaactctaacatgtttataaatggattaccttgatccaacccatttagataaaaaatcgtgcttaattttggttaatttttttaactggttgacatgtttacaacaagtttaataaatttacaatcttttttatggcacatttatgagcaatgtaatatatttatttaattaaaaaaatataatttaaatataataaatttaagagtggatacacccgtttaataaatgaggtagtcgtataaaacagaaatgacacaaattcatttaaggaaaatctaaatccatttattttgtacgggt

SEQ ID NO: 197399 - DNA, 1375 bp, Cannabis indica
aaaaaaattaacaaagaatatataaatatttccccaaaatagaaaatatccacataaataatattttgaagggattgccttactatatccacatacactagattacaaccatattataaatctgaacattttttttttgggcatgtgaaagaaagacagaacagaatcatagtcctcttactaaaatataataataaattataaacccttcttagattccaattaacattttttatttcttaatttaatttttctaattcctataataaacaaaaaaaaacaagatttgacattggcttttcctttgtgttttttcttttgtcattggctaaggttttcattatagaaacagcaacaagaagaagaggataaatattgttgtctctgtctctcttctttctctctctaaactcaagatcttccttgctttcggtgcttttttaatttcagagtcctctgtttctttctctctctctctctctctctgcccttattactcgatctagtctttctgtaatctctgaatcgaaaacagacctcaaagttccatatatttacaggtttagttatcttctagcttggtttttcttcattgagtttaatgctttggttatcaagataagctaagttaagctaagctttcatttgggttgcttcttctacaagatcttatcccaactctgcttacaatttaagctgaaaaaaaaaaaagagagaactttaaaaattttctcaggaaagtgaaagaagcaaaaaagaaaaaaattcccagaattttatgggaaagatagaaagagggtacgtcttcaaatactggcacgagctcgtatagattttaagcttaaccctttatagagagaggaaagtaaaaatcaaaggaagaagctttcatggattctagtcatcaacaacatcagaatcatcaacccaattcagggttgttgagatatcgttcagctccgagttctctctttgtgaatttcaatgataataataagaacagtttttcaatggagggttctgaatcagagagattgttctctggattcgttaattatagtggaagcaatggtagtgaatcttgtccgccgagttttcgagatttggacgataagtcttcggttatgggtggtggccaacagaaccagaggtataataatagtgggcttcctcctcattatccaagacaaagctctaatatgagtagctctgttttggataatggttcctatggattaatgggttcaatggctatggattcccataatactcagcctaataagtctctcaactccaatcttcttaggcaaagtagctcccctgctggccttttttctcatatctctctcccaaatggtatggttctctcttctca

SEQ ID NO: 197400 - DNA, 3456 bp, Cannabis indica
tatatgtattttagttagttactaaaagatatatttatagacatagtattagctttagtgtaatggttaatctaaattgcatgtatggaattaacctactaaaacacaatattgcaataatatccattgatgaactattagccatgtcatatctagagtgattaaggaacaaacaccatgaaagaagcagaaatttctttaaaattgagaacaaaatcttgtatgaatattacaacaaatttatactattgattcaataagatgtacatatatacacaatttctaaatcttagaacaaaacatgataaactaaaccattaaaaaaaattggatgtagaacagagagaatcacttgagaaaaatcaaacaaccagataaagtttcaatcttttctctgcctgcataataaaaatacatgaatttggattacagcataacataatcaaatcagtatattagcacacttctaaacaaaactatttttcagaagaatgagagaagtaattgtacctctgtgagtgaattaattgtttatccgatgaatgagtgaagcgcaggtggtaatgaagggcaaacggaattcctcctcctctccgaccagctccgatcagtagggaacgaggttagggtttagtcacagaagaagaagagagagtgtgagagtgaactgaagttgtgaaactcactttggttgggcttgggcttgggcttgggcttctgatattgggctggggcttgggcttctcattccaacatcgctccctaagaaattccatatttataaaaaattcccaattcataaatagttaaagagaaaattacattttatacccactttttgttttatattttaatttttaccttaattttactactctttaatttatatctatttttataagttatattctcattatgtgcattaagaagtctaattttaatgatttttgtaaagttatatttggtactttgattgattataaaataaagtatatatcaattaaaattatcttagagttatatttaattaatgtgtaataaaaaagagtagttttcaacttatctcagagtcaaataccaaaagagtttagagttaatattatttttgacctgtgtttcttaaaacttactagttggatcatttgtggatttttccaccacatactcaattttttaactttttattttttcaatgggatagaatttttttaaaaaaaaatactatgtttttctaaaaaaacactgtgtaagttttatactgtattgtgtaaaattttcaatgttgttccacagttattttactgttgttttaattgttctgtttagttgttttacagttgctttataaaaagatagtattcttgtacaaagatctcgtgtgacagtaactagatgacaccttaaatttattaacagtttagtagtttggaaggttttaccgccaaaatttaagcttagagggttgagtgcaagtataacgatagttggcagggtttagccgccaaaaattcattagaatataatttatttggtcccaaatatattattggataaatgttttactgtactacgtacttaaccatgagaaaaaattagactaaaaatgtgaaaaaaataaccttccattggttcatctttataacatataccttaaaaacctatcatttaacttgccactaaaatttacaaaataacctcaccttaatttactttatgtaactatagttatttttgcaaccatacaagatctatttgctaataaaaaatttcataaggtaattttacaaaatacttcaaaatatatatatatatatatatatatatatatattgtactcaaaatttgaaaaaatagtcttttgttggttcatctttataacatataaggaaatttacggcataaatatcttatatttttatattatacacttaaatactatttttttcgacaaattaaatacaacatgttaattttcatccatttttgttaatactattccattaaatgctgactatgtttattataatgacacgtgttagtgtataatttgtccacgtttatttttaattaaattttaggaaattttcagaaatatcattcttttatgttttatttacaatattacagcctgaactttttacttagaaaaaggttaattagaatttttcccccgaactttaatatgtgtcaaatcatgcccttgaacttttaaggctgttaaaaatcccctgtaaactattaagattgttgaatttaaggatttttgtctaattttagtaagaaaagtctaacattaatgaaaattcagatgacatgatttgacacatgtcaaagtttgaaagacatgatttgttaaatatcaaagtatagggagcatgatttagtactagtcaatcactaaattagtaaaattgaatgaaattggacaaaaatccttaaatccaccaattttaatttttaatggctagaaaagtttcaggggcatgatttaatacatatcaaagttcagaaggcaaaaatcctaatcagccttacaaaaaaactcttgtaaaattttaaaattataaaaatacactttgctcaacaacaagtaaaaaagaaaaaacaactaaaaaataacgaaaattaaacctcaacgatactataaaatcaaactataaatgtaatataaaacaacaaaaaataaaccagaaaaacaacctcatgataatataactataaaataaccaaaaaaactaattcattatgtttactcaaagaggaatttttgtacataaaaaagttctaagagtcaaaataaatttttttcaatattgttgtatttttataaattttttcatatttttagtttactatataaatttttctttaaataataaacagataactaaaacatattcaatctattttaataaggctaattatgatttttagttcctgatctttgatatgtactaaattatgtccttgaacttttcggtcgttaaaaaatcttcttgaactattgacattgttagatttaaagacttttgtctaatttcattcaattttgctaatatggcgattgtctacatactaaatcgtgcccctgaactttaatatttataaaatcacgcccttaaactttaatatgtaccgaattatgcccctaaattttcatccacatcagattttttttttaataaaattaaacaaaaaaagttcaagaaacataatttagtacatataaaagttcagagacaaaaattcaaattaaaaaaacctaaatcttctataataaaattagacaaaagtccttaggtcaaattttctttagtaaaattagacaaaaaaattttaactaaaaaaattgaaaagatttaatttggtaaagttttcaaataaaaattcaaacaagcctaaaaataatagggtgattccaaaatgcatcccgaaaaaatttttaatctaattttt

SEQ ID NO: 197401 - DNA, 1211 bp, Cannabis indica
gttattttgtggtatggtataactctctaattaaatgtttggttgcaaaagtaagaaatattagatatgcgaattcaatataaaagagacatatagaattgacattgacaaagataccataaaattacacaattatataacatgcattaattccatatatatcaacccatgatattttcaactgcttttatatactatttaatgtatataaaatacattaataaatattctattggatgcatgaagtagtaaaaagttattaatctcttttcttgtttttcatttaattttctttttaacttacattagataaagcatggactacaaagcaaggcattacaaaaaaaaggtaaagaaccatttcaaattaccgactattttataaaatgccactgttactaatatttagtgacattttatatttcactaattgtgctacaatgtacattttataaaatagtggctaattaacacaattatgaactaccttattttgcatgctattagaacataacataccaatagtcccggattgaaagataatgagtatctaatacactttaaacatccccaagaacagaattacaacaaattttactacaaattaagtttatctactaaagctttacaatctgttagagccatgaaaaccggcatccaaacaagctgaacccaatttatatagtttatctactacatatacaatattaccaatcataagctgaatgatacctgcccattattttaagaatcagtgaccactacactcaaattgttttcatgttagttacgatctttgttttaattttttttttgttttttttttttttgtgggtatatacagaaagttatatgtgtatatatttacagcgtgatcataactatatattcgaaaccaaagaagaacttacccgggaatgagagaccaaatccgtgtacgcaacaattgattttggcgaaggatttatagctttaaattgatggtcccacataaatttaaaatttattaagaaagttggcttggaggtcggggattatatatcattttactaatgttttaagaaattaatatatgctttattttacaagttaattaaaatttaagtttaatatgtatattgttggattaaaaatcctatgtgggcacatatgtataatgtatatgctattataaagtgtgatacaaaattaagtgaccaattatgttatgt

SEQ ID NO: 197402 - DNA, 2456 bp, Cannabis indica
tttgtttatggtttgaaaagaaaaatatatgaacatatattcacattaaaatggactctccacgaacttaaacctgctgcaatacctattgtagtaaggaatatattatatatatatatttatatatatatatatggggaatgagctaaaaaggaggctaataaatgatcccaactaactgccaagtcatgaaccatacatatattttaattattttgtattatagatcgatcgatcgatagatagggttatatataataatagatttggctaattgtttgacttccttcatgtacactcatttaaaaattaagaatatataattttccttttcttatttttcctgcttagtttttaaaactgatgtttcttagtttctaaataatttttgttgaacaataataattaattattgtacacaatgttgctagctagtcaatcaagctatatattgtaattataaattgttcgttcaactacgtacgtacgtactactacgttattatatatatctaatttaattattattagagagttgtattttctgcacaagtctatatgtcgatcgataaatgacgatctataataacaataataattaattggattacaagtcatgtgttaggttcatattgagaattgagatatagagtatggtgatttattatttcaaaattaattgataatgaatggatggaatagtttttaaatataatttattgaaactttgattaatattttaacaaaatatggaagtgtcgtcctaatgtgtatgaagtggaaaaagtcacacatgggatatgagcagttgtttataagggtatatacagggccggcccaagcattttgggggccttgtgcgaaattttaaaattgggccctttaaagaaaaaaaaaaaaaaacatgtacattaaaactacaattttgttagttagttttttttttaaaaaaaattgcttcataaattttcaatttatttttttttatgtatgtataaataataagaaaaataaagaaaaaaagaccctttttttgaaaaataaaataaaaattaggccttaaaaaaatgggggccttgtgcaatggcccaagctgcccaatgcttgggccggccctgggtatataaggtgcaactttgccactaattgaattaggacctcaaggggtatctaataaaataattatttttatttaattgagaaacgtaattgaaactgattacttagtcgtattagttaattatgggacacattcaaccaactactctccatgatttagaaaatgttcttgttcccgttatattatttgaatttactcatctatatgtaattcgattgaactaattggaagaatacatcttttttatatcgaaaaaaatacagttttcactacaaagttaatctatctacgatattacaaattctaggatgtattcaacaatattctctacagtaggattccagtacagtacgattaggttattttatcctagggacaactgacaaattccgattgcttgaatattcctgggcagtgccacgaacgtcttaaagagagcgacctagtccgcaactcaacccaaaaatttcattcagttaatatcgttctctttttatttttgttagcaatttattcagcataattcaatatctttacttaattaatatgggacaatgctgtattgtaatttatctccatttataattaagctaatttagatttttactcactgaattttgacatacactaaattatgcactctaaactttttaagtcattaaaaattctctttggattattgagattgttggatttaagattttttttatccaattttactaaaaaaaaaagtggcgtgtataaaaatttaaggggcacaatataaattttactaaggattgttttacttgacttgcagaatcaaaatataaactgcataagttcttttacattagttcagaattggaatagatattttaattttggaattctttttttataaaattttatttgtattattttaaaattttcaaaagagaaaaaaaagggcaatctcacaaacttataattggattgtcaaatctcattattaaatcaaaaatctatgtgggatatgatgaaacttacatcttaacaaacaaaataatagaagtaaatacgataattaattgaatatgaattcttattataaagaaaccaccaatataatatatacgacaaaaaaagagtgaagacgagaaaagaaaaaagaatagatcacaaagcaaaaaaagttatggaaatatatatttttctttttcgaaatatatacttactggtaagtggtatgatcacatgggagggtctcatttttttatggttttgttttttttttctttttttttttttttattaattttcgagttacattctatatatgaatgcatatgatgtgctttcaaagaaaataaaaatt

SEQ ID NO: 197403 - DNA, 614 bp, Cannabis indica
acccccaagctctcgagactcacgagtgttgggagcttgcaacttccttctaaatgcttgacttattattcagacttgttgactaggtattagaatgtggaagaattttccatattaccttgggtaactcaggagtcaatacgctccgtgacactgttgtcaattcactgaagtgtggtgcttgtttagtggagtcgtggagctctcactctgagcctaggcgcatttctcatgggaaacgaatgacggttgtacttgaaaagacgttaggatcctggcacgttggggatgttgcaacgaaataatgagtattgaatactttattcttttttcttctggcttattaaatgcaaaccttttgaattcctaatcgttggatgatatagcttttgattgattcaatatggaccgtgcatttcaaaaatgattaaaccgctgccacccatataaataaaagtcttggcgatggaattcactttttcttcttcaccttaagctacaatcccttgcccagagaatttttctggactaaaacttcaacccagaatcttccgcctagaaagcttcgcccccactcacctttctgaaccaagaactttgtctccttctctcga

SEQ ID NO: 197404 - DNA, 2914 bp, Cannabis indica
acaagtacatcaaagtaaaattcgaaggtgaacattgtcagttttagaaattaaaaatgtttcagatcaaacatagtaaaattaaagcaaaactatgaagatacttcaaatatctaatgacattaagagatgtggatgtctaatataagacgagcattatgaatttctgtacactgcagccattccgtcattcaaaaataattaatgaattcattgttgcagaaatctgttctactactcatttatgtactttatgcatctacactgccacagcagcactaatatttagcatagcacaacgagaaataatgtgtgagtcttgtgtgtgtattccaatttgacctctgcactctattaaaaatataatctcagttttaatacagataaaaaaacattataatcatggacagagaagatagttaacaaaagctacatcatgtacattgtcctttgttatactaatcttccatttcagatagttataaggtagatgtaagaaattagaagtatatacaaacctgaaagccaaacacaatttccagaagatcaaacatgtcagcatctcggtcgccaactatcacataatcatctggaagtctaggaaagtgttcagtatatctaatagcagatattgcgcctctgacctgattaaaattacccaaaatgaaatttcatgtcacaaataacaaaaatttgaccacaatgattaaattaaccaaaatgacataaggtgcagggagtgtgacgaatttaattggaagaatgttctttgtatagaagctagacaatgcaatcaatcagaatatattcaacctacttctgggaatattccaatggcattagtcaatgacggcgcctctaatggtacgatattatagggtgtcaactccccaaataatgttgcctcagatgattttattcttctcaactgaaaccccaagaacataaggtcataagttcaataaacacgtcaaccattacaattgtagtaatattctttccaaagccacagatcctttgaaaatagcataagtaaaaaagcaaaaggtgatgctcatgttcttttaaaaaaaaaaaacagcaatgcccatagttttagcaaacttacgaatttttttataattaccacaatagccaattattaaacattataatagatataaccaaaaatagcagaattaaccttccagtacaatatgaatacagcacttcttaatatataatttagaggcaacaaaatacatcaagtatttaattacaaccagtatctctatagtttaggtgcacattggaaagcctatttgaagaacatgtacctcttcttttataagtccaccaactcccctgggatctgcttctttgctaagtgcctccatgacctctactaacgccctcaatgtagccactatctttttcatttctaaagatttcatttccatcctaaaacagcaaaaacaaaacttgtatcagtaaatctaatgaaacaaattagaggttctgtcattgtagttgtgttcaaacaagttgattttttattgtaaagaactgataagatggtgatattaaaagggaataaaaacagtgaaagttaccaaatatttcacttttcaaaatgtgccaatagagagcaactccataccataaagtagcatatacattaacattataggtaaagggtggtaggtgtttaagaataatacaagacaataactcatcatataaagatagtgtatagcaaactgtcaatgccatatgtatactatagctttctgacattgctaaaagatgaaatgacctaaaataaataaataaataaaaacccctactactttgttgataagcataaactaaaatataagataataataaacttatattaaagaaatgaacctactttccaaaatcagtactaaaagttccagactcccgcattctctgttcttctttccgtatatcgtccactctatgtcgtttcttatagcgttggtaaaaattccagaggtgctcaatatcacgattacggtctattggggctccatccctttttgcaagtttttgctgcatccaaagtaagctccacatttattgaacagttgaaatataactaatattgctctccattcaccaatcaatgtaaacaactcaagcttaaaatataccttgattacagacattaaaccagtcttaaactgaagaacacctctaccatcactgtctggatccaaactatgtgccatactgtatgcctgctcacacactaaaatttaaacatacaacttctgtgaatatgggaacaaaataaaaatacacacatgtgacatgtctacatgactatctgtctttgctaaaaaaaattaaacattggtacaagtaaaagccattattagttaaaccatgccaatgtgacataacaaacaacaactaaatggttggaaagcacaaaaatgaaaaaagttaatctgccgagcaactggtgaagtggactgtaatttttataagaaaaatgaagatattaaaaaaaaacaaattagacagctaagggctttcttggtaacattttacttattggtttgcattatgtttttagaaatgaattgaaattttctcaaaccaaattctgaatcttcaccattcatatcatacttttttttcctctaaagaaaattcgaagaaagttatcaagcaagctctttcaatcaagcaaaacaagtaattctagtgccctctttcaatcaagcaaaacaagtaattctagtgccctacaccacttgccaaattttcacagaactataaaaaacaaaaaagaaaaaaaaaatcaacacacttttcgttaagctcttctacaaaaacatgaaaaaacaagaagaaatttatgacaattgaattggaacgctaattttcaagctcaattagc

SEQ ID NO: 197405 - DNA, 2020 bp, Cannabis indica
acactagtccttacgtattgttagacttgtgacagcaaattacatgtcaatggataccaattccatgctcacatcattaaatgcattaaacagtaaaatctggttcccgtatccaccagtcaagttccccatctgctgaacttgaccaagtttaatacacaccagtcgctactggtccattgcctatccgtaaacaagtcattacacctgtaactcatccatcttcaccaaagtcccaggttcagcagcctcctgctgcaacaattcctaaacaatactaaccaacatctcaaccacacaccagcaacaaactagcacaccgcaagattatctgtgccatacaacatctacttctcatcctattgaatccttcctatcatacattaaactccgtcctcaatttttgagctgctgttctagcagtctacactcatactgaacctaaaaactttgctgaagcatctttatttcaacattggctgcaagccatggacaatgagacccaagactttaagaaaaaaaaaaaaacttgggtgatcactaaactgtccctggccacaaagctattagctgcaaatgggtgtacaaagtcaagtacaatcaaaatgggaatgttgataggttcaaagcttgccttgtagccaaatgtttcaaccaaagacaaggcatagatttctcttagacctatgcactagtggccaagttcagtatgctcaaaattttcttagcactggcagcaatttacaattgtcatgttcacctattggacattaataatgccttcctccatggggatctctatgaataagtgtacatgaaaataccgcctggatacaaggatcctcccaactctatttgaaaattaaacaagagtatatgtgccttgaaataggcctccaggctatggtactcaaaactcaataccactctcattcaagatggcttccaccaatccctgtttgataattttttgttcattaaacgaacacactttgacttttcaacatccttgtttatgttgatgatatcattgttgccagcaacaatgtatctaacatcacacaattcaacaattcctctgacaagaaattcaaaataaaagacttttggaaacttcgctttttccttggccttaaaatcggtcgtaccgaagagggcatatcaatccgactgcataggtgccaaactagcttcaacacctatggaaacaaacttaaaactcagtaaagacaaaggtgtaattctcactaacctgattgcctatcgtagcctcattggtaaattgatatatctaaccatcacaaggctcgatatcacatatgcagtcaatcatctcaatcaattcttatcttgtccacgagtttcccatctacaagccactcatagagtcctgcaataccttaaaaaactccgggcaaaggtattttttctcccttcaaacactgtctccaaaatcactgcctatgctaaaaccagcttgtcatcagccaatgttcaacttttcttttttgttgatgcagattggggcagttgcaaagatacaaggccatcaatttcaggttgctgcatcttctttggtaattctctcatcttgtgaaaataaaaaaaaataagttatctcttaatcctctgctgaagctaaataccgagccatgacaaacgtaacatctggacttacttggattcttatacttctcaaagattttggtgtctccatccccacacacctgcgaagaagtactgtgacaacactgccactattcacataagtgaaaatcccgtttattataaacgcaccaaacatgtggaaatcgattgtcacttcatacgagaaaagatccaacaagactctctccaactgatgcatgtgtcctcacaataaaatctagttgactttttctccaaggctcttctccctactcatttctattagatttagttagtattagttatactcagtgatcagttaattagttgttaggctttactgtttcagctctaattcttttttttttttttg

SEQ ID NO: 197406 - DNA, 532 bp, Cannabis indica
gtttaaaaaaaaagaaaagaagagaaaagtttttttttttttttttttttttgctgtgtaacttaaacatccactgaaagaagaggagaagtctcttcctctcgcttatgaaggggatcatgccacaatcttccacttaatagatctgaatatagttttcaatgattggaaaaaaaatgggtgggagagagtaaaatctcattcaaagctagtagtgtcaaacaaaattactaaaagtgatgtgtgtttgtggcttattagccacgattcgaagcctcaaagcctctcactcatcagctttcactgccgccactgccaccaccacaactttcttttaccctgggcttcaaagcctctcactcctaagcattcatatcagccactatgcaaccattgtagaactcattttgatctcgggaacactagtaagtataattttctctcatatttagtggtttaagcttattatttttgtgtgatttatgacttcatagtataatttagttatgatttatatgctaatgtttttttt

SEQ ID NO: 197407 - DNA, 727 bp, Cannabis indica
tttttttagttgttcaatgaacttctcccccttatattaagaggctattcccataaataaatttgatatattttatatatatatatatatatatatttctattttctggatctctcataagcatgggtaatggtaagtattccttaatttcatatttagatcactgttttagtaaattcataattattagatttatttttatatataataaataaaaataaaaataacttaaacaaaacaaaagttgttaaagaaaataaaataataagctattttataggaggtaatacgtagatgtaaatttctattataccgccaaagccaaatttttatttagcgcctaggtttttaataaacatttaccgctaatttttagtttccatcatattagactaccctgcagttaatctccatttacctcatctcctcaatctctttcttgtgataacaggctacccacaaactcacacgaagatatatataatatttatatatatatatcttaactctcactcttctaatcacaagttgcccggatcagcttggttaaagactaaagaggctctttgatttgcttccatcggttatatgaagacaagaagctgaagcagtttatttgtggatttagattgcagagagatgttgcttttgatcatgatatcttagattgtttcataaggtttctttctcccttttggatattagatagggttaatttcacaaatgc

SEQ ID NO: 197408 - DNA, 717 bp, Cannabis indica
aaatttctcaaaaaaaaaaaagagacaaaagtcttaaatagtaaaaaaaagaccattaatataatatgtagttaaatttgaattagtggatgggaatgattgaatagggtgttgtttggttgtgttgaaatattagacagaagaaagcatttaatgtgagagagagaacagtctctggtgggtcccactatttattttctatatagtttgacttacatatcccaaaaaaccaaacctaaacaaacctctccttccaaatttcatatttatatttaatttaattaattcaattattcttttcttcttacgaaatttcctccaaacccaaaacccaattctttttggagtaaacgtaaataaacaaaatcaggaatgagcttccaagatctcgaggccggcaccggcaccggcaccggcaactcccaacgccaagacccatctcaggctttggcttcagggattttccaaatcaacaccgccgtctcttctttcttccgcctcgtcaattcccttggcacccccaaagatactcttcaacttcgcgaaaaactgtaaaccccaaaaccctccttttcatcatcttcttctttgtgattttctcttctccaattttgtttttgttaattattatatcattgtctcttacaggcacaagacaaggatccatatcgcacaattggtgaaagagacttcatctaaactcaggcaagccagcga

SEQ ID NO: 197409 - DNA, 1214 bp, Cannabis indica
tctttctaataaggtcattttgcgaaatggccttgctgtattttgtgaaaaattatcatattattgttgtgcaaatagattataagatgaagatgattcatcaaaattactattttatgaactaatgataattaattagtaaggtttaactctggactaaggcgggctaagactacgtttagagtccacttagcctagaggcccaaacaaaataattaatttttgaagtatacatattttttttttagtaattttttaaaaaataccatctgttcttttaataagaaataaaaaaaatattttcattttttaattattcattcaaaatgaagtatattatctatctaaaaaagttttttgtgttaattcagagggcacacactaatctataaataacatagattaagattacgataaacttctaataacctaaaacaaaaacatcttaatcaaattgtatcttcaagtattaacttaatgcataggatatgattttggtggatattgaagaatgtaatgaaaacctgagcaaagttaacagcctcagccatggcctcaaaggtgagaatggcacctccatcatccgaaatgtagcatgagagcttttcggtagggtaatcagcagaaagaatggagagaattgtgttggcagtgaccaaaggaggttccttttcagggtcagcagtagacacgaacacatccacaccgggaaggtccgagcggccattagggttagatggggtgcgctgctcaaacttgtcgcgaagggcggagagatccgtggcgcggttgatgggattaagcttagggaggacatccaaaagccatgaaaatgcaaaccaaatctcacaagcaatggacattccccataaccacattgcatcattgtttggattttggattctccatgctaagaaaaatgatagcactaccattcggatcaccactagtaacctacacattatcaattcataacaaaaacaaatttacttgatttagattataatcaaacttgaattaattaagcatatttattagatttatcatctagattatgtatttgagcataaaaactatactaaaaagagtagttagtccttttcttttctcaaaatcaaactagctacaacttcttggcattttaacataaatttaggtattctagcatagatttataaatcaagaaaatcttaaagcagacagagtactctgtt

SEQ ID NO: 197410 - DNA, 620 bp, Cannabis indica
aagcatagactacctgagtctctaatacctcgagaacctaaaacagtgaaatcggctctcaaagatcctatctagaatagatctatgtcaagtgagttctatactctcaaagcaagaggtacttggactctagttccttatgaacctcatatggtcctaatagacaacaaatgggtttttcgagtaaagttaaatgcagatgggagccttgataaatgtaaatgaagattggtagcaagaggatatcttcaacaaccgggcattgattttgaggacacctttagtcctgtagttaaacttgtcacggtcaggttagtcctcactcttgctctcacttttaattgggaagtaaggcaattggatgtgtcaaatgattttctatatggggatctcaatgagattgtatatatgacccaaccaaaaggctttattgatcctcaatatccccatcatgtttgcaaattaaacaaggctatctatcgtttgaaacaagcgcctagagcttggaatgacaagcttaaaaccactctattcagctggggtttcacaacttctcgtgctgatacatccttgtttctctatggttcaggtcatacacaaataatactcctagtctatgt

SEQ ID NO: 197411 - DNA, 1402 bp, Cannabis indica
aaatggtatctttaaaaaagttcatatttttttttggactttaggactcgtttggtaggtcgtataagactcatattgtattaaataataaataacactttatttggataaaacaatacaatgtattaattatcacaagtataattattaatacaatgtgagtcgtattatttaatacataacaaatgacccgtattagcttgcattataatgtttacaaagggtctgtggtcacccccggccacggaccttggacccggaccgataccctaaccatggacccggacctagacccagactcagacctaaattccagaccccgaccccgaaccttgaactcgaagccaaaccccaaaactaaaactgggagctagacctcaaacccagacctcggacccgggtcccaaacccaaaactgcactccaagtttaggttcgggtctgggtctagagtttgggtccaagtctcgatttagttctagggtctgaggtttgggtcgaagtttgggttcggagttcgggtcacagtgcaagcctgggctccaggtttgagttcaggtctgggtctgggtttgagtttggggtccaggtctcggttcgggttcgagttcggaggtctgagttagggttcgggtccagattcgagtccaaactgcgatcggggttgaggtcaagaatattgtaaagaatttataattttatattatctattagtacaagtcaatatcaaacatagtattgtattaaataatactaatataataaaatacaatttaatacattactatacagtacaataccgtaatgtacgaaatcaaccttaatagttgcttaatatatgtagagggcattatatattgagtgatatttactatctcatagataaacttaattattagtagcagatgtaatgtgacatggtctttttattcctcttcacatggcctatagctagagaagatcataattaatcatgaagattttgacataataataaaatttatattacacgtatgtttttttgagcaaagttgaaaaggaattcattaattctgtatataattattccaaaaaaaatatatattattaaggttgagatgatacttgaaacttgaaaggtaataatgcaacatggaatgataaaacagtccaaacaatggtcatgattaatttcccttgactgattcatctcaagagatatatattaaatataataattatggttccatgaaagaatacacgcaaaataatggatatttgtaaacatttataattattatacatataattttgattaaaaaaaatggcagcaaaatatgcactcatactatttttgttcattaaatattaactcaaaaatatgtggtgatttattattaaactatatattaaataaattaaag

SEQ ID NO: 197412 - DNA, 1654 bp, Cannabis indica
agatcaagggatgcaaaactcaactggcagaaggttgcaaaacaagaaaccaaaattgatgaagccctaataattcgaggaagacaaccagggagaagaaattaaaggttcagagatcagtctaagttcaggaacaattcaagaccaagggggaagacaatatcaaaattaagaccaaaagaaaccagaaaatgccatcactgtggcaagataggtcatttgatcagaaattgttaggaacttagacataagaaaaagcaaaagcaaaacaaagatgaagaggagaaatgcagtgattcaaatgctgcagttgatgatcactacacttcagatggagatgttttcgtaataatcaaggctcaagatgaatcttcaaagtcaggggatgcatgtactagttcagatcacaaagatcacgatgaatggattcttgacagttgttgtacttaccacatgagtccatacaaggattggtttattaactactccaagattgatggtggaaatgtcgtgatgggaaatgatcacaagtgccaagttgttggtattggcaccatttccatcagaagctatgatggcactatcaaaactctcaggaatgttagacacattcttgacttaaagagaaatttgacatctcttggcactcttgatgatgaaggattacaaaattggtaagggaactatggggatcactaaggattcattactagtcatgtgagccattaagaaacatggcttatactttctggatggaaaaacaatgaccctgcacaagctacaacagtcaccaagcgcaaaattgattccaagctctggcatgctagattcacatagtgagcaaggattagtggagctgtctaaataaggtttacttttgaactatactcctgcaaacttacctttctgtgagatctgtgtgcagagaaaacaacaaaagatcaagttttcaaggagcaattatagagcaaaacaggtgctggactacctacatgctgatctttggggtgcaagtagggtcaagacacctggttgtaatcaatattttctatttgttgtagatgattataacataaaggtatgggtttttctattgaaacaaaaaaactgattgtcttaatatgtttagaagttggaaaatatttgttgaaaaccaaactgacaaaagggtaaaatctgtaagagctgataatggacttgagtttattaatgatgagtttgatgagctatgtgtagaaataggcattagaaggcctaggactattgtcaaaaaccctcaacagaatggggttactgaaaggatgaatagaacacttctaaataaagtaagatgcgtactgcttgattctggtttgtccaaaaaatattggggagaaactttgtacacttcattttaattaataaatagaagtcctagtagagctattgacctcaaaactccagaagaattatggaatggtaagcctccttttctaatgcatttgagaacttttggttgtgttgcatatgcacacacagtggaagacaagctaggtaagaggtccattaaatgtgtctttcttggctaccaaattggtgtcaagggttatagactactatcaattgaaactaacaaaattttgattagtggtgatgttatttttaatgagaatga

SEQ ID NO: 197413 - DNA, 1834 bp, Cannabis indica
tgcaaactaaaaaataaaactacaagtccacagcatcgtcatcattatcgtcatcaccgagagggacagtcagtgaacaagacccagtgccatgtggccgaaatagtggaattgctgaaatcaaaggcattgggggcatgttgaatcctagaatagtgccagccagctgcatcatttgctattgaaacacgctcatgatttgatcctgagtttgcatcatttgttgctgccactcgttccatgcttcctgctcttccatcgtttacttcaaggcctcatattgctcctgggtgacagtgggttgctcagagggacctgccctgagaatttccatctttgccgccgtcctatgtctcggcaaatggcccatccctcccaagtggtgtgaccactcaccctgcacctatgtcataacatgcaattgttgtgtgtgttcatcacgcttgttgtccttgcagtggaactttgcaaaagtgtccacagcattgggaagttcccctgtcttgggatctgttttttttatacaatataaaaattagaaatatattattcaaaaggcataaatttttaaacaaatatgctgacaacatcataccccgctcgcgatgtggcaaactatggtcccatcaaccttgaatcttcatctgccttcgattttttgcattttgtttggctcttgcctgtaatttaatttaaatttattgttagtaaaatgataaaaaaaatcattagttaatggatatttaattttataacttttaatttatacctgttgttttgggtctttctagcatgcaataacctctacccacacctccggcgtcaccacatcttgacgtgattacttagctacttccacctctccatattttttaatattcctctttcatgcttttttcaaatttgctctccagtcacatagcccttttgacattgatttaagaacgtaatcctcgaacataggattgccaattgggaactcaaacttgttttttaaaaaaataaacaatgaagtcatacatatttgtttttttataatggttttgtttgatctattgtaataaaaatttgaaagttactacaattttgtcccaaatagtctgaatgactatctcttcaacatcctactactcaaacttgttcaaaggaatggtattgcgaacaagaaacttgatgtagttgttaaacttattgccatagtcttctatcggacccgagtccccttatgaaatttaaatttcaattctgatagcaggttacttggccggttcttgttcaatatttttgtccttgtactattccctaactctcattttcttactattgcttacacctgcattagtcattctaaacatataagctaggaataattaattaatcaacctattaaaaaaaggaacatctatttgatttaataaacggtgggtttaaatattataatattttaaagtctacaagttatcataatcatcatcataatcattaacagttacattattttcatgatcactatcactagtgtcttcatcacaactctaaacaataaaatcatctaaatctttatggtgaggctactcacagtccctactagtcacttcaatttggtcgacatcatcacgggcatattcgacatcgcccagtagtgaatgttaaatgactaactggattcccaaagagtttctttcttatatagtcttggtctcatcattgtccttatctaggaattcctagacattgtgggggtgtaaacatcgacaagcttctaatttaaatctgagaaatctcgtggaaagaccgcttagctccattttagaattagcaaataattagggtt

SEQ ID NO: 197414 - DNA, 1794 bp, Cannabis indica
aaccagagagagaatgttgttctttccatagcaaatgcacagtcacgacttggcatacctactgaggctgatccagtgagttattttcatgctctaaccacgcgatttttttgagggtcatttctgttttgttgctgtataaaattaattaaagtaattgaatttgctaagcttaggctagtcaaatttatgtgcaatttattttctttgtagtactttgtacagtgtacacattataatctatttttttgaaaagagtgtacacattataatctagataatttattgtgtatagatattctaaatctaattgtaatgatgttggttgttattggttactgctgtttttctgttctactgtaaaggaaacacatttttatatgcagtaagcttctgagtggcaagaaatttaggatgttcctctttcgttaattactcttagctctcaaaaacactttgtccagtttcttttttgctttagtttgtattttttattttcttgtggataccttattcccccttgccgtttcgtttatatgattaatagaaattttgtttagtattaatagaaaacagaaaaagtggacatattcatctactgtgatgtgatttaaaaatgtttctgtttttcagaaaatagatgagaaagcaatcaacgaagtatttttgaaggtgctggataattatatcaaatggtgcaaatacttgcggatacgcattgcgtggaataggtctcttttacaacctgatattttttttcttcaaaatttctttcttcagattttactcttcttatttcattgttttttcatatacagtttagaagcgatcaatagagacaggaagctttttcttgtttcactgtactttttgttatggggggaagctgcaaatgtccgtttccttcctgaatgcatatgttatatattccacaatgtaagtctccacctttattagtgaaattcattgtagtgtttgtctgataacttagtctcattttctttaactgtttctattatgtggggtcaaaatatcttctcttttgacttcagtggagaaggaatttaagggcttttgtgtttttctttaaccactgaaattctttgtttcgtggttgtttagatttggtttgtttgtttgttttgcggtttagttttttggtctatgggagcatatatactcatctcgcacatgttcttcaacttttgagcattagtgaaagttttaattcttataagaacaatattttgttgtatagatggcgaaagagttggatgctgtattggatcatggagaagcttatcctgctgacagctgtaaaactgaaactggctcagtgtccttccttgacaagatcatttgcccaatatataagataatgtcattggtaaagtggctatatcaattcaagtatttttttgttacttatgtatacgtgctgaacttgattttgctttttgtctaacttctgtacagtgttgaaatcattctcttttcaaaattactccatttttaattcaacttagctgtgctgtttgatcttaaatgttgttgttgttgttgttgttgttgttgttgttgtttttttgttcttttttaaggattttttgtcttttgcatattttcatctcttaccaagttgttactatttacgtaatttcttcttcattttcttcggtgaaccacaggaagctgaaagaaacaataatgggaaagctgcacattctgcttggcggaactatgatgacttcaatgaatatttttggtctgctctttctttctctctctctctct

SEQ ID NO: 197415 - DNA, 1830 bp, Cannabis indica
aagtaatttattaagtaataacttaggtaggtagtatatataacgtacgatgtggacgactaccttaagagttgtgggtatatcgcctaagtgctcggaactgggatgagtcgaatggtggattggtttattttgtcacggacaaaatgacaatccaattcgatatgtttggtacgttcgtggaatttagggttgtttgcaatgtgaattgcagactcattgtcgcaatagatgaaggctgggttaggttgcggtatgtgtaagtctttgaggaggtattgcagccatgttatttcacttgtagtagctgcaagtgctctgtattcagcttctgctgaacttcttgaaatggttatttgctttttggttttccatgatacaaggcaatcgcctaagaaaatgcagaaatcggtcgtcgatcgtcttgtgattgggcaagaagcccaatctgaatttgagaagcctctaagatgaagagaggaagtggctgaatatagtatgccctgaccagggctgcctttgagatatcggataagatgttgtaatgcttgcacatgtggtgttctaggagaggccatgaattggttgagaacatttactgcatatgtaatatctggtctggacaaagttaagtacaatagcttgcctatgagttgtctgtagttggacgggttggtcaaaggttcacctagttgatcgtcaagtttgtgtctaggatccataggagcttttgcaggtttgctgcctatatattcggtttcttcaaggagttgaatggtgtacttcctttgggagaggaataaactgtcttttgttcttgctatctcaaaactgaggaagtattttagcttcccaagagctttgagcttgaacttatcatgtaaagagtcttgtaattgttgtaaaatggtgagatttggacccgtaatgacgatgtcatcgacgtagacgagaaagggtaatgaaattgtcatctcgacctctagtgaagagggtgtaatctgcttgagattggtggaagccttcttgaaggagagcttcagtaagtttcttgtaccactgtctcgaggattgtcgtagaccatagatggatttttggagtttgcaaactaagtttgtacctgcaggggcagaagcagatagattcacacctggtggcaaagtcatgtaaacctcctcatttaggtctccatttaagaaggcattgttaatgtctatttgaagcatatgccagtttttgattgtagaaatagcaagtaataattgaatgtgaccattttggccactggaaaaaagtatcaaagaaatcaaggccttcttgttgggtatatccttgagcaaccaatcgagctttaaatctttctacaaatccgtcactgttgagtttaattttataaatccaacgacatccaatggcacgtttatttggtggaagtggtacaacaatccaagttttgttgttgcaaagggttgttaattcagagtccatagcatcaagccattgttgaaattgaattgcttgctgatatgtttgtggttctttaagagaggttactgcaagaatgaacactttacaagactcagtgattttatgataagatagatatttattaagtgggtgaggagtagaatgtttgtcctgtaaaactgagtagcattttgtgtctggtgtaccaaaattgttgtcctgcagagaaatatcaatactaggaatagtagtgttagtagtagggtaatcacctacatgtgtattaattacatctgtagtaggtaaaacaatggtagtaaagggatcaacattaccagtatcctcattcaattttaagaatg

SEQ ID NO: 197416 - DNA, 1399 bp, Cannabis indica
atcctcgcttcgcctttttgggatctgttcaccagttggattgaaatctccatcgtcccttccagaatagggagtttcaatagtgttagttctctgcgaagcccgaggctcctttctagggcaatgggttgtctcctctgactgattctcttcatcatactaagtatcgtccgccataaaggataacattaaataactgcataatcgctctttgtctttatccatcaacggttatgctgactgtgttagattgttctctccatttgcatgttatctctcttatccatctttgtaaaaaaatattgtgtagagatacaatgcttcctgctgttctcttttgccgtttggatggtattagcgaggcggttacttcaacgcgtcaaaagcgaggtgaacgaatgttgttgtcattctttaaacatactcacgagtatatggatcaattagctgcaagttctttggttactcattctgaacaactttcattgtgtattctgtttatcccgagatagacttgttatctcgccaatctcacctgttaattgttattattcatatctcgctattgcttatatagtagcgagttcgaatatttctattaactttaatttctaaggcgagttatttaatgtgcatttaataatgtatgattttggttggttcgtatcactgtcttagtacacgtgtcagctttttattattagtcgaaatttgagtataaaacaaaatatcacttttcctttatataaatatatagatatattttttttttcttagtgctttacacactttttctaatattaagattttgacagaataataaataaaaaatttataactacttaaacaagattagattaaataataataatattttattcaaccaccatatataaatattaaaaaaattaatttgattataaataaaaataaaaattaatactttatttatactatatagtataacattcaaaatggttgctaagattatttttaaaacatgtatagtcaaattttcttaataaaatgagaaagtcttacaaatgagtaaaaatagaataaaatcacataaaataccacataatttcttataattttttttttgttgttcatcctttatataaatacataaatatataaatttataaataaaaaattcatagttgattggatacaattaaactatacattaaaattacatgtactattggatctacagtagtaaatataccagcagctaagttcgtttggatctcgactttcttgttatagtgaatcacaatacctataataacagccataagattaccattttcatatcaatatgtatatagtgacctttctttggaattataaactcaaatctaaccagatagtgactaaattattggttttgatt

SEQ ID NO: 197417 - DNA, 1391 bp, Cannabis indica
actggtgatgaaacccaccccaagacaccaccagcggggatggagctggagtcgacgtcaatcacgttgcaggcaatgacggagccgaaccaacagcggaggtcgtcgccgagacgaagaagggggagacgtggctgttggtggagtcttcggggcagctggtggtgacgccggagagagtgttgtcgtcggtgcaggagcagatcgtcgtgaagaaaaaattaccaccaccatccatcaattcagtcgcgcacggggttcactcagtgaagtcgctgaactgggaaaaggaaatgggaattgttggttggtgttcttctgtactcaaaccctaccaaataaggcccaagcccaattcattaagccttgtttcagctttggcccacaagagtgaacttaacccaatgggtcactttgaattaattaaattggaacccacccactttattttcatgtccagtttagtaagtgagggtcattttgggaaccaaactcctttccttactccatcttgggcccagacattcaaaaggctattttgctttgaccaagttgtggtcatggcccaactaaacaaagaaataaaccaatttatttttaaaggggtgccaccatggatgtcctacccaaaatgtcattttaatggaggcaaaaataaaatgccttggagcccaccagtttcttttgagcgtcccatttgttggttctcctgtaccatggaaaaaattttcatggaggccaagacaaagtcagtgtagttttgggtctttgatcggggacgaaaattgaaatttttcgggattcttttgtggaccaaaatcatggtttctcgggcgggggttattagaatgacattgctggaatggattttcgatagaggtcgactcgatgagtggtgactgtctttatagagtttatggaagcggtcaaagaattttctcaactcgcttggttcttccttgtggtacctttcaattgaatttttccacctcaaaggctatttcacagaggatgtagcgcttggtgccatcaatcaccttgaggacaaggtgaaactcgggcggccggtaatgttaggacctaggattagtggggtgtgctaacatatattaaataaaagggtaattgagtctttgtattgagggtagtgttttggagggaatacaatagtatatatagaatattaaggggaattgaggggtaagcaatgttttgagtaaatctctatttgcaccaaaggggcctaagggctccgttattttgtaattagatttctcatacattcaatacacattttctattgttttgctattgttctattcctattattgctactgttttattgtgttcttgagcaaaaaatctcgggtctcatcacaaatttaaggtgt

SEQ ID NO: 197418 - DNA, 1709 bp, Cannabis indica
aacttattcatgcaaatgcaaagagttagggatctcatttcttgcaagttaaggaaaaaatagagttcctaaacttgacaaatatttatgtatttgaaattttttctaactaaataatattgactcgtggactagaaatactacataaaaccactaacataaattatctatatatatttcactagtctacataattataattatttaaatattattttaaatttctaaaaataatttaaaaataaagataattataaaataattcatcaaaaagaattataagatacaaaaatattgatatttctatctttttttttcttctatccttttcgtttactagctactaatatccctataaattgaattgtatttcaaatttgtaacaaaattattagaatttgagaaattttacggtcaaaaaattaaattgaagagtataataaaaatacaaagattatatagaattttaccgcaaatattcttataatttataattagtgtatattatatatatatagacatgtgaaaaaaaacttgtatattttagtttattaaaagatcacatttatataatccaaataaattataaataaggattaatatatctttgcgtggaggaaatgattatatatataattatatttacgtgtgtgaatagtaattaattatcaatataataatcacgtgtttaatatagttattatgattattactatagctatttaaaaagcacgtatacgtcaatatacatatttataatatatattatataatttaatttagacacatttttcaccactaattaaaacacacacacaaacgttcatatactgtttgtttgataactaattaatataataataattaattagtaaacttaataaactactctctttcttgtgatggaaaataaagctagactcagtttagtatagtcaggcagggtaagttgaaaaatactatttttgtcaattaattaatcaaatttacttttaattttatatttaattgaaacatacttcttatatgtattgtacccaaaatatcctgacatacataaatagtatcttgaagtgacagaggaaaaattggtacaatatttaaaaaaagaggtaaaaataatagactttaaaaaagaggccggtaaaaataaaagagaagaatataaaaagggtatagagtgtaatttcctctagtacgcttgtgtttagggctcacttagcctaaaaacataattgactttgaacataggcgggctaggcctctgcctagagtccataactagtccaaaaaaaaaaatccttttaaaaatacacaattttttttacaaattttaaaaaatttcatatttttttaaaataaaggctcaaaaataatttttttcgtatgcctaataaatttcagggatggtcatgcctagaggctaatattttttttacgaattttaaaaaatactatatttttttaaataaaaaataactcactaaattttaagacgacttgtggattttttttttttaattaaaatataaaatttagagcaaggagtggaacatgataaaggccaacttatttttttattgtttttaaggtaaataattttgtaaaaatatggctttaattatctcaataaagttattttatagaaaaaattacaaaatatgagaaaatagtatatatccttacctaattttttttttcatattttt

SEQ ID NO: 197419 - DNA, 2331 bp, Cannabis indica
caccaaggtaatcaaaattttctctgggattagccttttaaaattcatagaagacctcaagggcggcagttttcaggctttccacctctttctcgagctcttcctccctgctctgcttagtctggacgtctccctccaactttgagagaagagtgcggagattctccctctaatctttaagcttattgacctctctagacaaatcgtcattgttcgcctccaactgggcagttgacgacatctcctaaatctccttggtcagctcttcaacccttttgtttgcagtaaggagctttttgttcacctctatgagctcgtttcgtacgtcttgaatctcctttttacctgcatctacctccctctacaaagtattggtggtagaagggtttttggtcattgtggactaagcccgcgaataggcgcaagccatcttcaaattgacctgcacgaaaaaatattaaagcccgaactaaaaaaaagactaaaaacaaagaaagaaatactcacctgagtagcctttttcaatactcctcccatgaccagttctgaagacaactcattgtccaccccagaaaactgattgctcacttcaggaagtgatcgattcagataatattggagcacgtccttgcccttctttgcctctgtgctcagcgccatggccgtcgaaggggtcttaatctaatcagacccgtccaagctcccccctttggaactctttgactttgaaaccttctagactagagggtccacggcaggccattcctcagaaaggtcaatgaactcttcgaccgaccccttctctttggacgaggtctcattgcccttagatcttttgggcggaagagtctggcccaagctatcccccactctcttcgtcaaggcctgaagcaccttctaagacatttttgcacaaacaaaatgacacagttagaagaaaatgtggtgtagagcatgttatgaaagaagtaaatgcaagataaaaataccctgcatgtgggcaggagcattttcccgaataagaacagacggggcatcatcatctgaagagtcttcctcctgctccaccaggagggctttcccttttccttccactggggcggatggccgagcaggcatatcaaggtttaaggtttagggtttagggtttaacgtgttctactggtgcttgctcatttgggagagccttcttatcttcttgctcggcctctcctgctctaatattcttgagcatactgcttcactctattgctcccttcaacttagactcacgcctgagttgaatgagctcattttcctactcggtcccaccagcctggcttggctttgccttttttcttcttctccttcacaggccttggaataaaatcccctgggaagagtttgtacttaacatagttggcctcagtggccagcagggtgatgtttcgtacagcatctagcagttgaagaattttctgtgccctctccctgagtcccaatgtgaaaagagggcgccactacgaaagaatctgctagaaccgagtgtggacagtatccataccctaaacaaagtagtactagtccacaaaatgtcctattttgttgacatcggtgtccacagtgcccgttagccacttctcatccagttgagagaagtagaaatctcctgacctgctctgcttgggagttgacttcaagtcgaaaagccagttggtgtcgtgcggggatggctcgccccatccttgcgaggcataaaggatgaacatggcggatggatatttgatgccctttaaactgaactgagtcgaccaaaggtggtagtagtctgcaatcttcttgaagtacggaagcaaaggcaacagtgcacccttcttggtataagcgcccgaccaggcacaatacccctgccttggactagttgcccagttatttggagagggaaggaagcattcgacatcccccaagtagccgtgcttctccaaattcatcatcttagcctaggttactatagatggaggagaaacccaccgagctcctgcggcacttttccttctctgaggaactacctcggtgtattcctcagtaacatagtcctcaccctccaccaggacttcaccggactcagacacaggttccctatcctcgtcgaatcccccaaagggcaacctctgaataaaactctcctcctcggcttcaaatggagtatcaggacagacctcgccctgatcttccatctcttggacttcagcatccccctcactatcttcttcctcagcagtaggccgggcctattcagcgctcggcaatatggcaagtcaagcaacgagaggatcagtcaaagaagattat

SEQ ID NO: 197420 - DNA, 885 bp, Cannabis indica
gagattagtgcttgatttaggaactgcatgtgatttactttctacctgaagaataggaatttttggcctatgactgaagtatgattgtaggccaaaatagaatgttctaggtactgtctaggatagatttagcatctaataaaaactagacttctttttgttttattattctaggaaaatgcccaaattacttcagatatatgctggcaaaatttccccttctttgtttggaacccttatggttccagatgatgtttgcatcttcctttcacctcattcatgttgttcccgatctggttatttggaacaattattctttgagaatttattccaaatgctaggtccggtgggaactctccaagaaatttgaggaggatttttcaatacccttactatcttagttagtttgggtaattcactgcttggtgttgtttttcattttccagatccatcatgtctgaaggagatattgagaaaatacccaaaacaagactttgaaaaaattccctaaaaaatggtaggtcgtttatctaaaaatggtaggctatttttctgggacactgctaggaaaaacagtagatcgttttctcataaatggtctaccatcttctgcaggaaacaaaagttttgagttttacacaactccaacctttccaaactcaaccaaatcctaccaaacttcatagaacattcctatatcatcaatcacctatcaaaatccaccattagagctcaagcttgagttccatcaactcaaacttgaagctctcagccaaacctacaacaaagcaccttaaactaccctctataactcaaattaaagcttcaaaatataatctaacctatagccatctatacagaagtaaatccccaaaaagcatgttt

SEQ ID NO: 197421 - DNA, 1735 bp, Cannabis indica
atataaatataaaattaattttagaaaaaaccgtattagtatttaaatttatttgagttcaacgtacactctttaaaacaacatgtttctttttccacatattacgttacaaaaattcaaaggtagctagtgatatattgttattgatataattaagtatttaattttatataacttaaaagtattgttgttggacatcagtggtggctaacactttttataggtgacgcttcaagattaattagtgatattacctaaaaaaattattttttttaacttatataagatttagggtgatagataccgatagtgtctttcagcaattctttaaaaaaaaataatttttaatatcgctaaatggaacaatacctataaaaaataataggtactactatacctaataataatattctaataataataatgtatagtaaaagaaatggtgggtcacattaattataattaattaattgttgtcccaaaacaatagatattattattttttattatattaaataaatagttgtataaataggttagtattggcaagttataaaaggaagagagtttcagttttcttatttcttcttcttcaattcaattacatacaaagaaaatcaaacacagattacagaaaacaaagaaagaaagaaagaaagaaagagagagagacacagatttgacctagggatttgggcttatttatatcgtatttatatatttatatatatacacgtttctctcctttctctctttctctctctgtctgttcatggtgatcgctgtggagattgagagcagtagtagtagtcatcatcatcaacagaggaagataggtccgacgggaatgcgactgggcaaatacgagttgggaaagactttaggagaaggaaactttggcaaagtcaaacttgctcatgatcttaaaaccggtaatctatttgctcttaaaattctacagaagaatagaatcatcaacctcaatatcaccgatcaggtattaaagcccctttcaatctcttatttgtttttttttgaattgaaatatgttgtttatgattattgacacgaaacgaaacgaaaattgtttcagtttttctttttaaagaataaaatattattaagtgtttagaattttgtgttgtccaaatccaattccaatcctaatctgaagccataaatgattaaatggtggcgggtcatctggaaaattatgactagtgtttgtcgttttgttctattcctttatttccattggatttcaaattcaatggctggcgtatacccatacgtctgattcaagttagctgctattggtaatggtattgaatgaaatgaatgaatgaatagtgccaaaaccaaggcacgtgtattttgtggttaaagacttacctactgtcctgccctaaccaccaacccagacccagtgtagtgtagcagtttggatatgggcccatgcctcactcctcttttgccccttttgtctatgctcttctttaccctttttgcctttgtgacacttttttctttctttctttaattatgatttatgaattccagactttgtaaaacagtgatgtgatattctgtaatctcattcaatttttactctttacaggtcttggcaagcaaaaccaagatttacatggtcttggaatatgtcactggaggagaattatttgatagaattgtgagaccatcttattattattactatgttttttttttttttatt

SEQ ID NO: 197422 - DNA, 839 bp, Cannabis indica
tgtaacacgcctaggtatcagggcgttacacgttatatcatctagaattgattcatattccatttattggacacgtgttaatttttgaagtgaaaccgaattccgtgtataacacaatctaacagtgggggttcatctctatgaagatccagctaaggtagcccatgccatgacgtcggcttataaatactccaacgaatgcacaagagaaggggtccagatccatccttcatactttcacatacaaatcaaagaccttttcttcactaagaaaacacattattctgtaaccctactattaacttcaacatattcctactaagcttcttcttattcaagaggaatacgaaagaataggagcaaagtccattattttatatttgcataaacaatctctggccaaagagcttaataaaatggactcgtgaagtaaggatagttaacgcctgaaccatgtaaaagttatttgtccattattgcgtcatttataccttcattaatttcttaagctctaaaattattcgattgccgaaaaactcggtaaacatctcctttatatagatacatagattttagggtgtgtgttagaaattagtgtataattattagttattgtaattattaggaaagtagttacacaatctaccgattacactatattttaaaatagaagatatgtttggatatgaggtggtaattgcatatgaaatcctaatatattgtttgacaaaataattaataattacacagaaaataatatttttaatagttaatatttaaaatacaatttttttaataatcacacagtgtaattagattcaattcttatgatgggtcat

SEQ ID NO: 197423 - DNA, 822 bp, Cannabis indica
gatagtaacacacacgttacatcatatattttattttactaaaaatattatattaatttaatattcttattttagaaatatagaaaagaagaggaagttgcttctctaatttctaattttgaagaaaataagaaaaaaaaaaaaaaaaaaagattttacatttattgccaattttcaattgattatacttttatttattttcaatttagcaacacatttattattttttttatataaaaaaaatacgtttctctaatttttatgtaaaaattataaatatttatctgctatcaaaatcatagcattttaatcttcctcttttttgtcaaatgtgtttgagaatatttaataattttttaaaaataagttcaataatcagatatttattttaataaaaaatactttttttctttgtaaattactttttgttctgaattattttatacaaatgagtcaataacattaaacaaaatttcttttataatgtttttttgctattattaaaagatatactttcttgaaaaatatgttggagtaaccaattacttcttaaaaaagatatatcatttattttaggtcacatattaatacaaagatgttgttattggataattattattagtgtaaaatatataaaatttgaaaaacataactgatcatgagcgtccttgtaaaagcaaaccgcatcaagtctgatcatattttgatagagcagagcacactagtgcataaagaaacaaacaaacaattagtaatacattagatgaatgataagtcacctcactcaaaacaaaattaaaatgtaataatagaaaataaata

SEQ ID NO: 197424 - DNA, 1627 bp, Cannabis indica
aaaagatttggaaacaaatatttcaagtaattaaaactgggatggcctaacctataatgccacaacattatttcattctcacaagacaaggtagtaaaacatcttggtttctgaacttgttcatctgaaggattttccgagaccaagtgatagagtccatcaacctccttagcattgccaatcatcttccccgaacaagggtcctgaaattcaaatccagcaaatgttattgtagcaatacatttgcaatcatgaataatacgactgacagaaatgaggttgcaagaaatctttggaacatgtaggacatttagtaatgtgagagatggagaaataataatagagccttttccagcaatagaggttagagaaccatcggcaattttaactttcaaatttccagataaaggataatatgaagagaatatggaagaactaccagtcatatgatctgttgcccctgaatctatgatccaagggtttaattttgagccggctgtgaaagttgcagggtatgtacctttttgagctaaagaagaggaggcaatgtaagatgatgagttaggagtgttggatatggaatgagaactcattagttgatacaattgctctagctgttctttgctgaaggcagacgtctctgaggcagatttcggctctttggaagtgtcttcggatgaggcatgaaaaccctttgaatcatgaggattccggttagatgaagggttctcggctggctttccatgtagcttccaacatttggccttaacatgccctggcttgttgcaatgctcgcagattggccggtctttatcgctgcgacggtcgttgcggcgtggtggctgactagagaacagggcagacggctcggtgggagctggtgagtgtcctccgagcatgacggtccgccggctctcctctcttctgacctcggcaaagacttctctagtactcggcagtggatcacgaccaagaatgcgtcctctcacttcatctaattccttattaaggccgacgaggaattcgaagacacgttctttttccaccattttttgaaacaaagccctgtccttcgcacagctccactcataatcgctgaacatatctacctcttgccacaaggtttttaagtcagtataatattgagtgacagttttctcaccttgtttcagcctccatagacgagtttttagctcaaaccactgtcctgcgttcccgagatcagaataagtctcgttcacagcagtccaaatgtcatgagcagtaggtaggaagagataggttcttcctacactcgagtccatagaatttatgagccaagacatgatcatcgaattctctgcctcccacctttcagaaccttcatcttcctcagtgggcctcgcattggtacctgtaagatagtcgaattttccacggcctcgaatgaacagtttcaccgattgggaccactgtaggaaattgtttccattcagcttgtgagaagtgatggaaaggttttggaaagattcagtgtttaggggaattgagggtgagcgaatagagctcatagaatcgataccagaggtatcatcagagtgtttagccatttaggctctgataccataaagtcagaaaagaatgacag

SEQ ID NO: 197425 - DNA, 1113 bp, Cannabis indica
atatagccattaaaatcaagctaactttttatcaataattgtcaccagattaggctcaccgagttcaagagtccaaaatatttttttatttttgaaaaatataaataatttctagtgttttcataaataccattcatttcttttatgaggtccaatagtactttttgtcctaaaatccacaaactttcaatgccagccccgattggcacctatgttataattaattaagggttaattactgcaaaattctcaataattttattttacttgcaattaatttttaaaattcaaattttaggagtaaaactcccaaaattataatacagtaccttacaacttctatccaaatttagccgtgtagttatagttcttactttttaccaaaataaaaagaaaataatgataaaaataattctccccgatcaacaaccctaccgatttatttttctttctttatgtcgataggtatagctcgctacacatatggataaataatagctttcctatcatctccttacaaagatataaatatacacatagattaaccactatagctacttatcaatttacatgcatattcctctttttatatataataaactttaataattgatacgcattcacttatatatgtatggtatattattaattaatacagctatatatacatataaagaacgtacatgactgatcgataaacactagtttcagagtttggtctccaaatgtactatatagttctcacctttgtaccattttggatgtatagattttgattaatgaccaagaaaaaaattaaagaatatatattattgataatattttatatcaatattatatagatttacaagattaattaagaatcgatccaaaagtattttatacttcgcctatgatcagttggcaaaaagatgaagagagagatatattcaattattttcttttaattattattgcacactatatagtttttatttattaattatattaatctcaaatcatgataccatttctgcagcaagcttaagtacttatatattaagaggaaatcctatagaaaagaacgaaagcttgatcttttcttggaaggatcagagtacacaattactgtgt

SEQ ID NO: 197426 - DNA, 2066 bp, Cannabis indica
ttaaaaaatttaaaataaaattaatgatatatttttttgaaaaaaaatgtaatataacgtaaaaatttgagctaaaagaatctggtaatgtatatatgtattcactttacttcactctaataaagtgagatatacataattacatattaagtgaatatttgacgtggtgtgtttttagtataataagttttttttttgataaatttcaattacatataatatttatttaattactaaaatttattttattatgaaattaaagtttggggtttagtataataatgtataaaaaaattaaaatatttgttatttatgttaattaatttgagtatggattggatgtatgactcatcctattaaacctgctaagacccagtcttcgtcttcaagggtctgatcatgcgtataatcggcccatttacttagagggcctacaaaagtttctgggccgcccaatactgcactttttgatacgtctagccatattacattcccaattctcaactttcttttaggtaatgtgtatcatttttatgggatggtagtttgttaacgattgctatttttttttataatattattaaatttaaaatttaatatttaattaaatataacattttgtgtagcactactaatatcatttagtatttctctttattattagcaaagcaaagaaagtttgaaagccgtacagacttcaaaggctttgatcaaagttctcctccaacacctaagaggccttgaaatgatgcatactatagagaattaaaaactagttactcacaaaatgaaaaggacacaaataccttaacaaacaataaatgaaacttgtttttattttatttagaacttcagccaccgacttcttgttggtaacttggtatatatggcttttagccatcatattcatggagtttaaagtcattagtgtttgttgccatgaatgcattagagagtatgagctttcgccatgattgtatattgattattccaaactaaagataatggatttagctctcctcccccttattaaacgtgcatattaaatgacttttcaagtgtggttatattaagaataagcatttttattgaacagtactttgtatattttataagtggcgtttcataattagttagcgatattttatatagctatttaaaaaaaaaattatataagattcgatatttaattacaccaataataatataatcacactaaaaaaatattacgacccaacaataatttttaacaattctcaataagaatatgctaggcttatctaagaactcttctactacttaaataagtagaaaggcccccctactaatttctccaaaactaggatataccacactagtgggtatttattgaggagattttgtaccacactattagcattaatgggtcatttattatctacccttatttttctcaatgaatatttattttattcgtactaaactgtagaagaaaatccttaccccaaaaaaaaaaaaaaaaactagtagaagtgttttaaaaaatttaaataatataatttataaaagacttcacactttttttttattttattattgtattgagaataaaaataaataaaaataagaaaacaagatcacattctaatttaaaaaatacttcaccaacaacatgaaagacttactcttaaaaataaatttttagtactccaaaaatagctttcaatgtcataccaaactatattctgtatgtatttttattttttattccattttagttgtttgatttaagtaatcataatataatagtaagagtaatgatatgtgaatgcaaatcatacacaaaaaattagatagttttgttacgcacaccattgtataaaaattaaaaaaaaattaagtaattatctcttttattcctatatttttctttcaagtggtgtgtcacactccacactccacatcatatataaagggagtaactaatttcactacgtaactctgtatgataagtacgtatcatgacattttttttctttgggcgtttaacttattaactgcatcttgtatcttcaaagccttatctt

SEQ ID NO: 197427 - DNA, 1022 bp, Cannabis indica
tataagtatttatctatatatattaagtgaatatcttgtaatatgtatcatctgccttgaacttcactattcatttaagaattcaatggaactttactggtaattgttattgttgtgtgtctgttcttttgatctctcccttcaatcaccaagctgcagttcatgatagctgttgcaatcctactttgtgctgtttgtacaattgatgaatctaatattagagacatttcctgcattgtaaagatcactacactaaattgtatattgacatatttctggacagtggggtatatccttcagagatccttccatatgaggtacaggatcccaagactgattcacaaaaatcgaggccagttgagaatgaaattagatctgcagctgagaatcttgaagttggatacatgaggatattgaggctctgcagatgtgtttcccaagttctgcaagcttcaagcatgtaaaatttgtaaacaatggaggttagtaaataggacacttcatgcacttgtccattaaatttgggcattgtagttggtgttttgtggatggtgagtacaggaggtcctgtccttgctcttatattttagctgatgatagctccatcatgtatttgagatttctatgtgttcctatagcgatgttctagctaactgtccatcgctacgagtgtaaagttaacaagtcaatctagttttgtgagcttgaggatttctttgttcctgttgtcattccaattgtttatttgttaaaaaaactaagtttcacaagttaaaatgaccacaactttgtttggaaaggaaaaaggtaacagagaagctaactgaataatggtcctgagtcccaaaaatctactcaaccagaaaaggttgtattattgcagatatgggcaagaagactgttgtctttttgactccagggtgccctaaagcttgaactacattggctgccaatgaatatctctgcttttccctcggaaaaagaaagatgatataatgaagtttcttattatattccctgtg

SEQ ID NO: 197428 - DNA, 1335 bp, Cannabis indica
agccattgaagatggcaataccttatttaaaccaacatcaactagtgttcccgacgagtttggagctctttctttaagtgtgacacctatgaatttacaacaaagcatcatgtatcataagccataacatttccagttgatcataaggaaatttgtaaacaacatgacctcaactacaaactgaactttccacatagaaaataagcataccttcacgaaagggaccccattcatgtttgcgcaaatgatgtggcgcatcaagcgggggcaacagaccctgcaaaatgcaagcaagagacaacctttgttcaccccatgaacaacaataaatgaacactgaaaactaaacaacaatgacagaaacaaaaataaaacttggaagcaattgagcatttgtgttctctcttaccacaaatcttaagctactgtgcatagggaataaagcttttctcagatactgaggggtttcgaggtacttcaagattcttataagaaaatctgcaccactttcattctcatccgagttatctggatttgtatagtagctagaatcattttcagagttactcttgttgtcaaatattaccacctgcatagtaatcatacttatcaatttttcactcaccataaattccaacagcatatatactaattccaacaaatccattctaaaattaatcatcttttctgctcaataagcaataaaatatcagatggaataactaatacagaaatgaaacctcgtcaattcgaaaaatagttgcggcacgagcaatctgaccagccagctgcggttttaaggaaaaaaagagagaaagaaaatcaccataacgaacagaaatattcgaattgatatgttcccagaaactaaacagaaacaggaaaaagaatactccatactcgggtggcgagttcgtaggactgtgtgttgtctattatagaacccggcaaggctatggtgactgtaggtatgtccttgggttggagcccttctccttgcttatcccttttcttctttttcttcttttggtgagaatctccattgggaagctcgacctgcttagcttcagttttttcctcttcatcaacttctgcttctcgtttattcttcttccccattgtcaagggttttgcgagttggagggtgccctctcagggtttttcttttctactctctcttaggaatatttacaacataaatactataagtttttagttttatacacttaaatactacttcttttttaacaaattaaatactttaagttacatttccattacttccgtcactatgtcaccttaaaaaaaatgaagaatggtcttctactattctca

SEQ ID NO: 197429 - DNA, 1003 bp, Cannabis indica
aggcatgtacacgcatagccccagtctgacttagtgacaggatctaacttgatgtcagacgaggtataactatctggtgtagttctgtactaggccataaggagctttcagaaagtcctccaaggccttcctgggatagccaattcctgatcatcccaaaatcctcgtgcttcctatttacctccaaatagcaaaagtatcagattagatcttcaagaatcattctatccttcgtaagggaagcattcttccaaatacttgaatatcttccgtgatcctatcttcgaaaagggggtatgtgatattagtatatgatttgacgtggcatccttctgccacttccatatagaacccatccgcgaacagtgataacagagatatattgtcatttatgttgctttgtcaaagagaagtagagttatttttatacttgttaatggatttatgctattggtacttgataaaaaaaaatcattcttttctttttagtcagttatgtcaatgatttgtgtctataaaattctttcattttggtttgacttatgtcctttttggtgagttatgtaaaaactagttttaatcctttcttttttggtcagttatgataatgtgttatgttattctttcaaagttaaggtggtattattgatatcgcccaattatttacactgcgatcatagtagtatacggaatttgttatccataagaagacaaatcaccactaaagattaatttagtaaaaataaaattaatgtgatacaagaaaataagaaataattaaaatgatgagatgagaaaattgatcagataaagagctcatgaataaggtagaaatgtagttatgtaaattctaatctaatattgaacttaattcatacacagttgcaattctaaactattaattacaacaaggagatatacacactaaaagtacaaattaattaatcttgcataaattgaatctcatttgtaatttgaggacatatcatattatatatcataa

SEQ ID NO: 197430 - DNA, 2219 bp, Cannabis indica
gagttagtcttacattgtttatgggtagaaaaaaaattaacatatataagaagaatgagctactccttgtgaattgattttgagataaaatctcatttaccttatcccaaattataacatggtattagagccacttgtgatccgttgtgagcctaaagtgtcactagtccaaaaagtcatttgtgatccgtttgtgagccaaagtattgctggtccgaaaagatatttcctcggtctcccctttaacttccatttgggacttttcgactaatgtatactaatttccagtattggagtctttgacttgtttcaaaattcacaaattttacgacatgtacacttacaaattctcgatatttggtcttgtagaattctttaaaatgtcacgttcagcattgtggtttcttaaagggtcttgtgatttcttaaaagttgttcgttatactcacattttctaaacccaaacgtgaggatagtgtattagagttagtcctatattatttatggataaaaataaattatcatatataaaatgaataactactcttttcattaccaattaattttaagaagaaacctcattcttattatcccattcccactgccatttgaaaattatttatcttttttaataagtggtgagaagacaagaatgtttgattgtagattgaagaatggataaatagtggtacataacattgttagaagcgaaactaaaacgtaaaaatcttgtcgtttattggtggtaaaaataaataaaaaattgagaatgattggcttaaaatagaaaacgtcagtagcaaacacaaataaataaacctcatacaaaaatgttttcgtcttgtctatattgacatggtctaaagttgttgtttgttttgctttgatcgcttggataagaagagttgttctgtgtttattctgtacgtgatggcttcgtcaagcagaggtgtggaggagttggaggtacggtgggatgacttgcagattgatgaggaagaagaaagaggagtactgttcgataacattgcagatttggaggatgaggttgatgctagatggtgtctagtggggagattactcacagatcgtgcatctgattttgatactgttcggaatgtgatggcttcactttggcgtccagtaaaaggcatgtttgttaaagaattagaatttaatcgtttcttgtttcaatttttccatgaacttgacattaacagggtgctcgaaggtacaccatggacttttaataaaatacctctgattattcagaggttgaaaataggggaaaatcctagaatggtacctctaaacactatggaaatatgggtacaagtgtatgatctcagggtggggtttcagtcagacagggtgcttagggcctgtggtgcttatattgggaagtttatttcatcatgtcccaagaattacacaggaatttggagggagtacttgagagtccgtgtcttgataaatatcgagaagccactgaaaagacgaatgaagatctactataccaaagaagactacttctgggctaatttcaaatatgaaagagtgcccactttttgctttatttgtggtgtactcggacatggtgaacggttttgtccccggctatttgatgaaccagttgagaaggttgtgaagccctatggtctattcatgaaagctccagatcgacgttcccagaagcagataggtgcgagatggctccgagacaatatggcccgtccgttgcaatcggctggtggcagcagttcatcgacgacagcgagcagttccagggcagagaaatctccgaaaaatcagggtgaggatatggaggatatggaagtttatgtgagtaataatgaggagagaataggcgtggatcatgggatcatgggaggggatcacggtggaaaagaaatctccacaaattcagggatattgatgaatgagggagcgggaaaggaaagtggctttgataaaggtggtttcatttttacggatccaaaaagaaggagagtagatgagtcttctgaagtgggccttgaacacaatcaagctattgggccggcccaatgtttggttgataaaagaagtggtgatgtgggtagggccaatttaattgcaacagaacttagtatgggccaacatattgatgaaggagagattgggatgggggatacatacggtccagcaactataagggaggaagatgatatttttcaaaa

SEQ ID NO: 197431 - DNA, 655 bp, Cannabis indica
gttgttgatatgggaggagagacatgtttggaaaaaagtgtgtcataagggaaactggtttcattgaatttgactgtgcgggcaacgtagattcggccagtacggtgcatacatttgtaacctttgtggttggggctatatccaaggaacaagcagtgagctgtgcgaaaagccaatttatttgtttggtaagggcgaagtaaagggtaacaagaacaaccaaaggttctgaggaatgagaagtcgggtttttggtgaaataatacctcaaatggatttcgtagttgtaacacaggtgtaggaagccgatttatggtgtaggcagctgtggtgaaggcatcccaccaatgtgttagaggcatatttgcctgagccaaaaaggagaggcccatgtcaactacatgacgatattttcgttcagctcttccctgttgcttgtgtgtatggggacatggatgtcggaagttgattcccaatggttcaaggatggactgaagtggcctatattcaccaccccagtccgattgcacggctttgatcttagtattaaactgtagttcaacataagacttgaactgtcgaaaaaatggcaacgacttcatatttgactttcatagggtatatctaagtgaatttagagaaatcatcaatgaaa

SEQ ID NO: 197432 - DNA, 780 bp, Cannabis indica
tttttttttttttttgtcttgctataggcggcaggagtagcagcctcttcttttgcttcttgttatttcacgcctctcctctcttctttttccaattcaagcctattgatgatattttataaaaaaaaaaaaaaaacctattgatgatatatatagggaaacttataaaattactacttttttactaaatattttcaaaaatactgggacacggcaaactttacattttcactgtctaagcccgtttttatttcttttatactgtccaggcccaatatatttacttttatactgtaaacagtaacaaaacacaaacgacacctctccttcgtggttggggacggacaaatcaacaccggaatcataaaaacaccagaaaaaaaccataaaatctagcaaagagaaaaatttactaaatcaacaacaaatcaagaacgaacaacaatatttatagcggaaagaaacaacagaggtaaacacacataaacccacattattttaaattttaaaaaactagaaaaaacccaccaaaatttagatctgaacattaaaaaaacttaaaacagtataatctaaatttgtttaattatacatggcattttaaaaaaaaatatattcacatatatcgttcctaagaaacgattaataatgaacaatataaaaatcaagattgttttaaagttatttttatcttagtaacagaaatttattgctaattataggtataagcccaacaataaaaaaaacaccagaaaatgatttgtgtgcattattttgtag

SEQ ID NO: 197433 - DNA, 893 bp, Cannabis indica
acttcttcttcactcactttttgcaactcaaaacattgaatcaaagaccctaatgtcaatccaattacgcgttgggccataccatttcctggacaagatcttcttcctaacccgaatggcataagcaaattcatgttgttctcgttctcaaatctctctggcttaaagctctcgggatcttcccataactcaggatctctatgtatagcccatatattaaccaatacaattgtgtcacgtggaatgtcatatccctgaactatacaatcttcggaggaatagtgaggaagtaacaatggagctggtgggaacaaacgtaaagtctcgaagataatacattgtaggtatggtaatttggaaagatcttgttcttcgatcaatttatgttcaccaatttgttcattaatttcggctttagctttttccagaatatgaggatggttgagtaaattagaaagtacccattctaatgttacagatgttgtatcagttccacctaacaatagtgactaaaaaaagatcataaaataaattaataaggtatataacaagatttaatatatattaaatacttctcaataggtattacttattgatggttactaaaaaaaaactacttaatttaagtttcaatgcttaaaaattaagttttcatgtttaatttaattaattaaaaaaaacatctcattttacactatatcaaaaatatatttatacaaaaaaatatttgacatcactcacaatcatagcccatataatataaaaataaaaaaattaattagataaaattaagtggagaaactcaaattttcctcacaatattcattcatagctaatactcaaattaaaaggaaccaatagtactataagataatatagatgtaatttaatat

SEQ ID NO: 197434 - DNA, 1140 bp, Cannabis indica
aaaaaaaaaaagaagagagaaaccccacaaaaagaaaccaagaaaagcgaaataaccccaagagaactggttctcactattctatttatacatatatatatatatatgtataatatattaggatgagggtgagatgtgatcatgaccatcagttgtggagagggttgggtccggaggggaccagtctcttctcaacaccgtatcttggatcgatagtactacttccgaatctaccggacggcgtcggaggtggggtgggtcttgcaccgcggctcgtgaagtcgttgctgtgaaagtggttgcataatgaacgagacttttcgtgagaaaaagcgtcgcagggcttgtggtggtggacctgctgtttagaatcttgctgtgacgtcataactactttcccttgatcttcttgatgagcttgaagctttcttggaaacgacgtcgtttcgggaagaacagctttgagatcagaaccgtgcgccgaggtgattatgaaaactatgaacagaaccactagcattctgaacccgaaagtactgtacataataatattggtggaagaaagtgagttcttcaaaatgttatagttagctgtgtgtttttagtgaatgaataaagtaagaagaagaaaagggatgatgatgagtttgtatttgtgcggcgttttttgaataatgagaagtttttggggaattaatagaaactaaaactatagaaagtaataaggtcatagtcgtacgtagcctataacgagaaaggagagagagagagagttaatgccgaagtcgagagacacatgaatcaattaatattaaggttatcaatataaatttttacctcccctttccctttagcaaatatataagttaatgaaatatatatatatattttttatatatatatataagttaatgaaagagggagggtttcctcacaattgccatcgatcattcgtgagtagttggcaatgtattactttctttcctcatcagagtgtaacctttgaaatgtagtgtaactataatattttatatgtatgtttatttcatatacatatattatatataggacatgactatagtagggatggctaaaatgttcctatggtaaggacacttttgtaaccattgatgatccatt

SEQ ID NO: 197435 - DNA, 3196 bp, Cannabis indica
ggtctatctggcaagatttgtctatctttaggcagaggaaggtctatcctcgtgctcaagggactggttggatagtctatcaactatcaacatgcctttaggccctgcctaaactgtcgattaaccttccttacaaaggatctcttaccagatcctgaactcttcccatggttctctcattgaattgccttatcaggtcattggcctccttattacggcagttcagctccgcctgatgggcttagaggatgacctcttggtcatccatccaccttagaaatttgtatatctattggacaaaagcatcacaactacacaacgcgtggttcttctgttcggctgacctagcctacaacttctctgcacctggccagctcaatatcatctcctaggtctacatgaggctcgccaatagctagtttgccaattcctagtcctgtttctcctgcataatactgtggaatagtcctagttatgctccatgaaggctattccatgttgacaggaccttctgttcgaggtgttgttgatggatctattctgggcagcaaggtctgatcatttagattcgttgagttagtaggatcaacatgattagtggtattggatgaatttgcagggtttttgtagggtttgtaggattgacggtgttagtcagattagtgggaccttccatggtgggaggaactcaaacatcaggatcaaccgtcataggatcttgagggagaccctaggaagtacatgtagtggttctcctagttacaaccatgatgattgattaagatgacaaacaatgctctcaatgcaagcaccaaaatgttgaccttgaattcgggccaactgacagtagagccttatttattactgataatcaccacatgtaaattgtaatagcaaataataaagtgacacattgatttatagaggttcgacccccttgtttggcgggtaatgacctactctcctttttgttgtattaatttcagagataatactatgcagattacaaacttagaccttgtaatttctagccatgactttcttgaatattacaatggtgagaaacaagtgttacacattcagaacaattgagagaaatgaactaagtgtctaatgaaagggaagtggtgtgtgagagtgagtgagagagcaatagagcttgagagacttgaaattcctgtcccttttctaagtgtttaagaccctttatatagtttaaggcttataaaatatcactattcaaataagttaatatctctcaaaaatagggaaaacaactctattatcttctattttaaatcataaaaaaggataactaatattcttaaaaaataagtagatcatttgatggagaatccctatcttcttgggttgttggagttgtcccgtagctaaaatcaagttgttgaccgtccaagaagtttgatgcagacttttccaattgttcaggctcttttgtgcatgctagctaacctgccctattcttagggcctgaccgacacttaggcttcattggctggctagggtatggtctggctagaacctcttggttggccatttctttcaatcttggccttgccatttggaacccttgttaattgacgtattgagcaaggtgactttgctcgtctactatcaggctatattctacgtggccttagttttgcctatgtggacataccaagttaagtgggcaaaaattaggataatattcttcttttaacaaactacatactataatcttacattcttttattttgaattcaagagatataatttgatgagacaatttttttatttattttagacattgatttatttttagaagtaacatgtatcaacttttcatacataacctcgtaagactcagtcagagattcttcacagatttcagtttcatctgatttagaatccttttttttaatggtattattcaaacgtactagtctttctcttacttgtgaatcacaaacaatcctagaagagactaaagttagtacaacattttcaaaattaccttcatcactatcagttttatcaccactccatgtgactttgaaacttttcttattcctttttattgtattagcacattcagactgaatatgaccaaaatcttcacatttcctgcactgaattccttttttattagtcagattatttaaaagaagtatttccttttgaaaatttgggtacaatttttttattactcatattttatatatttatgaaagttcttggttaataaagcaattttatcatcacattcatcatcataacttttcatttcagcaacttttagagcaatacttttacctttatcacatgtggatttagatttgtccttctgcttgatttgctgatttaattcaatggtacgcaaggaacccattaacgtctccgtcttcatcttgctaaaatcttttgtttcttccataggcaagagtttagtgtcagacctgtcttgaagaactctaacaattttactgacaagagcaaattcatcaagcttttcaccaagagcaaaatattcattaactatatcaaataatatttcataaaactcagacacagtttcattttcagacatcctaagatcatcaaatttggtttgaagcataataaacctagaatgcttaacatcaaaagtttcttcaaactgagtttgaaagatttgccaaacatccttagtagattcacagaagatataagcttaataaagtcttcacctactccattaaatatagcatgtgatgctttactatagtaagcgaataacttatcatctttagtagaccttttaagttcaagttttaacttttaattaccttcagaatctaccacaacaaggggagaccatcatgaaaaaatcattctccatgctttctcatcttgaaactattctaaccttccaataaggataattagaatcattgagaagcggtggacaagaaatggaactcccttctgtaaaaaatcgacatattgcacaaaaaatacaagaaaacgttagtggaccacactaagagtttagtgtcccgctttgataccaattgaaaagttgtgtttttgcaaatgctaatatatttattaaattcaaatgattaaaaacacaattgttacaatatgcagtaacataatagaaaattgcagtaatagaacataaataaagggcagaatattaaaacttgacaca

SEQ ID NO: 197436 - DNA, 2423 bp, Cannabis indica
ttttccttatttgtttcagacaaaactaagaagtaaaagtgaacaataaatcaattaattgatccacataaagacaaaacactaaaaggcaaaaagaccaaaatggccttgcccacactaaactaattaaaaggtttctaagggtattttggaaaaaatctaaattcccgactaatcccgacattcccaatgtctaaataaaccggcccactatactgaaatactaatttgtgattctactgagccatacaccgagttccatgttgccggacaccgaaaatgcaaaattatgacatttcactatatgacataaaaatgcattctgaattcaaaaataacagcataaataattatttaaatatctataaataattttccataattaaacatgattaacataattttccatatagctgtttcgagcaatcaagtttcgtttcaaagcctctaacaatgaatagaatgcaacagtcgatgcactcgcttgactagcaagtagcacgattgatgtcaatgcaaatttggtgctagtttagttcttaaaagaacaaaccattaccattctagaggaggttgacatgttggatgatagtccaacatggattacacctattgcagcttacctccaaactaaagccttgcctaaaaccaaaagcaaggaaaaaaggatgagaagaaaagttgctaggtatctaatgctagattgagttatgtacagttgaagtttctcaatgtcattcctaaggtgtgtcactaacacaaaagccgagcaattattgattgaagtaaatgaaggcttttgcgaaattcatgccatggggaaaattctatccaaaaagatactccaataagggtactttttggcaaccatgatagaggaatcaatggactatgtcaaaaaataggataattgccaaagattctcaaagatcccgagagctccaccacactagctcacattaattcattctccatagccttttgccatacggggaatagagctcattggtcaacttccaaaagggaaaggaggagtggaatatgtcgtagtcacagttgactactttaccaacttgacaaaagctaaaccctagcgacattaacttccaagaaggtcctcaacttttgtgtcaagaacatcatatgaaagttttgactgccacaaaagattatatcaaacaatgggaagtagtaagatattgacatgttcactaatttttccaatagacatgacatgatcaaaaggttctttgtcgttgctcatccttaaacaaatggacaggtagaagctgtgaacaagaccctcaaggacattttgaaagagcatctagaagaggcaacatgaaactaacctaaattgcttctagagctacactactcatatgggacaactaagaagacgaccactgggaaaactctattcactccagcttatgactataaagtaatgttactcgtagagctggtgcccccatctcataggaggacaatctatgactaagaagtaaacaacaccttgttggcataatcccttgataaaatagaagaaagaagagaccgaagattccacaataagagtgtttggacctaactatgaaagcccttactaagttgtagaaataacaagtaagggcgcctacaagcttggcatgtacaatgaggacatggagttcgttctcctactaagatattggaatggagagcacctccaaaagtaccaccagtgaccaacttgtacaaacactactcttcagtagtagtgctggtaactcattataagagataatttagaaagagttaagtctccagcactcttcagtgatggcctctacatcacatttcaggtaggggtagccgcttgagttctagaagtaaacttttaatttttacgcttttagaatcaataacaaataattaagaccaattgatgaataaaaatggtgtttttcaattaaaaaatattgtgtttaaataacttgctaacaagataacttcttaaagttattctttatttttagttgcacttgcgtacaaccggtcccctccaagaaaattcacaggcaaggtttatcaaacatggtgagttgcaagtgactaagagaccataagtctgcttgctcacttggggggcacccacattgtacaagcatcaaatgagcacagtgaatttatcccaagaaatttaatgcttagtataagcaaaaaatataaagctaagtcagtgcaggcatactttgttagacataaaaaaagtgaatttgaatacttacatgtccagaataagaagaaagccaagattaaagactgcatggtcggtcatatgttcatagtaaaaggctttaaggctgaatataagtagtgtttgaaagtaaagggccaacaggccttactgttgggatctgatgccctaaataaaacccatt

SEQ ID NO: 197437 - DNA, 503 bp, Cannabis indica
agagagagagagacccttttagttttggattatatattctaagctactcgtttgattaaatgttaagcacaactcctcacccattaaattctctctctctctttctctaactttaattctaaataaataacatctttgtgatttggtcggcctaaacctaaatttattattatatctttctaatgcttatgatggtttaaggtatttccaaactcaaaccaatgggctacaagaagaacaaatgaagtaattagtctcatgcattctaatataattagttcatgttttctctaagcaaacgtgtgttatgtaatggattactataggggtgttacttttgtctcaactaatagtagtgtgttttttacattttcacaaattataatctcatttttttatatgatggttttaaaaaaaattataatagtgaataatttacaaataggtttacaaaaaatcaattatttgtacacatacaagtgaatgcatcaactcattttttt

SEQ ID NO: 197438 - DNA, 1064 bp, Cannabis indica
ttgaaactttttttttatgatcaatatacattacttaatattaaaatattctaggctttatttttacttaaaaaaataagcaatgaaagaaacaaaatattaagagacgcgcgcagaactaataataatgcgataatggtgttgatgtaaatgattgtggcttcacgtggtggcgagtatattgcacaataataaacacaagtccacaatcatatgtagcagcagaaatcactacttaatacttatcatataataatgatgctatggaaaataaatatacattgttatgacttacagtagtccatatatacatgatgtgtactttgttcagaaagaaaaataattcttgatcaatgttcttcatgaaaaagcaatttttatttattcatatataacaaataatgacagcaactacttatcagttttaataatgaaatatagaaaaatcaaacatgtagaggcgaatattgttattaatcgaagaaaaaatgcattaatatatttatatcatatgatccgtacagaaaatacatgcatcaaggaatagggcaagattcaaagggcatccaatgtttgtcaattctatcagctagctacgtcaattattttgacaacactagttcatagactaattgactgaaaagaaaaaataaataaataaataatatatagtccggaacaacatgaatacaagaatgatccatcgatgagttactactaacaagaaaagaaaagactagctttcattaagacctgaaaccctaatcagatcaatgagacgttttgtcgagtctgagggaagaaagacaagttatataatattattgggagaattatataattatataaattttttacatttttacagtgttttataaaaataacacaaaaataataataaataaaatctttataaaaataacaaaaaacaatatttaaataatgtataatataaaatatattaaataccctatttttcataaataaaattatacaaatggtaaaatatttaaaatttagtacaatcacatttttataatttttgtttttgtttgtttttgtcc
